United States Patent Application Publication US 2020/0157537 A1 - sequence listing, part 15

SEQ ID NO: 30364 - DNA, 1134 bp, Mus musculus
gcttttcttgttttctcaagttctgagaaataaatattagtggtgctgtggaaagcaagacacttgcttttgccactgtcatggtcatgactgatgccctttagtagtaagtagtgtctacacaatgagtgatacagggatcaccaccacacagtgactagcatgtgtgactagcacatagagccaacacctgccctcctttttcttggggaagactgctgtttattcctgcactgttcaaatgatgactggttggttgcatctgctcctctgccactccaggttgtcacatgatgctaaggagggcccagatagctgttgtccccctgtgaaaggagatctgtcctgagcatcagaaggcttaccacaccatataaaacagcctcttcagttgattcctgccttgtagcagattttgcctcttggtcaagtgttttcctctgccacctattacagaacgttttcttctttttttatttctgtttcttcttaggaaaccgacctttctatatttgatctcattgggctagaaaataaaatcactcgccatgaagctgaattactgtgtaagaaaaaagtgactcggaaactcatggaggaagtctttgcttcacctcctccgtcagcccgaccagcagcagtgaagctcaaggccagcaggtatgtgcatgggttagaagcagcatgtggctcacctggcatagtcactgctccaaggactgtgtgctggttgggagtcagatgcctgggctatgatcagtaccttcctatagctgactctaggcattctgttgagaatagaaagtctgtgttcatcgattctcggccttttggctaagatcaagtgtagaaagtctgtgttcttctttttgtttgtttgtttttgttgttgttgtttttggagacagggtttctctgtgtagccctggctgtcctagaactcactctgtagaccaggctgacctcgaactcaaaaatttacctgcctctgcctcccaagtggtgggattaaaggcgtgcaccaccactgcccagtaaaagctgtgttcttgagaatgttcggagtgtccttgttttcagtgagcacaactacattaataagacactcaaatagaggcagcaaatccccagtga

SEQ ID NO: 30365 - DNA, 1177 bp, Mus musculus
gaatatttttggtcaaatattgaacaggtaagtgctaggattcaatgggatctaaaaacaaatataatgtgtccaaggtgtgaggctgtgtgctagggtacagagcctcagcagctccagcattcatgcatgtgcagcagggagccttgtgcaaggcttaggatgatttcattctgactgctttgcttacctttgtaccctcagaagccacagctttgaggtgataatgtagtgcaggcctctcaggtagtacttggtgtactgtggccatcaaaagtaaagtctctttcagaatatctgctcccatctatatattctttcttttaagaacttttaaatttttactatctagtaggatttgagcaggttagacttagatacaaaataaagaatagagtaccaaactgagttttctctttcattgttgtgaatgaggttggttagctgtttaatgttttatgtgtagaattacacagtttatatccttaatgacttgcttatatatttattcttttatttatttattttggtatttaggttgtggaaataaaattacaagtagaattagaagagaaaagaaaaaaagccttaaatttacagaaagtttccagaagaggtatgatgttaagagctgttttttgtattacatttacttacttggtgtggggatgggggaagacaaatgtgtgcattatggaatgtgtgaaggtcagaggacaactttgtggagctagttctccccttccatcatgtgggttctaaggatcaaactcaggtggtaagggtcttcaaaattctgatcttcttactggtccagttgtggtttttgaaaaatgtttttgcaggtttatttattgtgcattgtatgaggtgtatgggtaaatgtgtgccaccatgtgcctgtggagttctaaatacaacttgtttcctcatctgttatatgggttctggggattggccttagactatcaggttgatgataggtgtttttgggccattttgcaaggcttttaaagacagtcttttttttttttttttggtttttggagacagggtttctctatatagctctgtctgtcctggaactcactttgtagaccaggctggtctcgaactcagaaatctgcctgcctctgcctcccaagtgctgggattaaaggcttgcgccaccatgccc

SEQ ID NO: 30366 - DNA, 1226 bp, Mus musculus
ttcagtattgagaaagcccccagagacaggttcttgacattctagtggaagccatacatctgcattgtgctttctggtgattttatttctgtgttcctaattgctactgctgtcagataccttgtgattatttaatgcttgttttgcttagtactaactcgcaatagttgggtgcattctttccttctttgtgtgctcatcctgaccttaggtctgctctaggacactcccattttgactgtaacagttctcatgtgagaggtagaatgtccagtgtgtgtccttgtgactcatttggtagaagctgctatgcactaaggtcagtgctttgggctctttcttatttttcaggagggatgcccccaactcctcaggccacacagctcactggacagaagcagagtcagcagcagtacgacccttccacagggcctcctgtgcagaacgccgccagcttgcataccccaccaccacagcttcctgcgaggctgcctccggccagtgtcccagccacagccctcccttccaccttacagttttcacagcagtcacagatggtggaggcttcaactcagctccaaatccctgtgaagactcaacagctaaatgcccccatccctgcccccctgcccagccagctccctgctccttcttcacagcccgcccagccggccctacatgttccgatgcccgggaaggcgcagatgcagacatctcagctttcctcccagacccaggtactctgtggacattggctgttttactagtgaggtacagaagaaaagaggaaacagtctgcagaggtggcttggcttgctgtctaggtatttggtagggtggtctgcgctgaacctgcacgttcctggaagcagctttacctgccctcttagcacagttggttattgtagaagttgcaaattaattttatttggctttgtaataacaatcattaaagtaatagaaaaccattattattgttgctgttagtagagaaagcctcgacctgttgagttacatgctattcagagggtgttgtattcgtcaccccatttggtcttttgggaactattagatggtgaccaattttaccagtcttgaaagttgtgagactgacccaaagagatgaagtgacaattcagtgttgactctagctttgatcaagggtgaagcccggtttttcaccatcagctagactttctcctttgctttttttccagtgctatgaa

SEQ ID NO: 30367 - DNA, 1543 bp, Mus musculus
tcacactggcccccctgccactgcccaaccccacttctccaggttttcagtttggtgcccagcaaaggcgctttgagcatggctctccatcatacattcaagttacttctccgatgtcgcagcaggtccagactcaaagccccacacagcctagccctgggccagggcaaaccctgcagaatgtgcgtgcaggtgctccaggtcctgggctgggcatatgcagcaacagccccactggaggctttgtggatgccagtgtgcttgtgaggcagatcagcttgagtccatcaagtggtggtcactttgtatttcaggaggcaccaggcctgactcagatggcccagggagcccaggttcaactccagcattcaggagctcccatcactgtccgagaacggagactctcccaacctcatgcacagtcgggaggcaccatccaccatctagggcctcagagccctgcagctgcaggaggcactggacttcaacctctggccagcccaaaccacatcaccacggccagcctgccaccccagatcagcagcattattcagggccagttgatacagcaacagcagcaggtgcttcagggacagccaatgaaccgatctctgggatttgagaggacacctggtgtgctgcttcctggcgtgggagggccttcagcatttgggatgacatccccaccaccacccaccagcccttccagaaccaccatgcctccaggcctttccagtgtgcctcttacatctatgggaagctcaggaatgaagaaggttcccaagaagttggaggagatccccccagcctcccaagagatggcacagatgaggaagcagtgtctggactaccactacaaggaaatggaggcactcaaggaagtcttcaaggagtacctgattgaactgttcttcttgcaacatctacagggaaacatgatggatttcttggcttttaaaaagaagcactatgcccctttacaagcgtatcttaggcagaatgatttggacattgaagaggaggaggaggaagaggaagaggaggaaggaaaatctgaagttatcaacgatgaggtaagaaacagcagttcagtagtctagaagggctatgtaaagcaaaatagatggtgtgcaacagcagactgaaaatgtgtgagcttggggtaatgtagggtttgggtgtcacagaatctaaagagaagtaaaatgtttatttcccttcttccttcatgtagaggaagcgctgttcagtgtagctgtctggggagggagatgaaggactatgttgtgactgatgccttttagaaccaggtgttgtcactgacaaccaaaactcatcctgggcatagagctcagccaatactgtctaggcttctcccctgtctgtatacatgatccttggccaacaagatagtgttgccagtcctctggcaacctacaggaaaggttctccaagaccagtgaagcttagctcttctctcctggcttcctggtttcactgtatgtttatgtaggtctgtccataaaaacaaagtttttaagcc

SEQ ID NO: 30368 - DNA, 1131 bp, Mus musculus
gcccatgcatcgtgtgtatacaccttagcatgaaagggcactttttaaaaaaagtgattttttttttcctattaaatatgttttgcttagtgaattattctttgcctattttccttttctggctgtgagatgagtgcaacactgctgtgttcgggatagctgaggggtaggcacagaaggtcagcacggggtgtggttggctgggcaggcagtagatgtagccactagcagtctgctcccggctgctgctgatactctcttccttccatccggacctgtcctttgagaccatcccggttttctctgaagtggctacactggtgatttcatgctgcctattcttgggagacctcaagggggaccgtgcgtcagcagcccccacctttatgccctagtattcttcacctccttctgggtctccttttttttttttttttttttttttggtttttcgagacagggtttctctgtatggccctggctgtcctggaacttactttgtaggccaggctggcctcgaacttagaaatccgcctgcctctgcctcccgagtgctgggattaaaggcgtgcgccaccacgcccggcactgggtctcctttcttatgtgctaaccatgtatccctcatccctggacagccacggccacttactcagcactaggtttggaatgccctttcagtccacagtgtactcctcccagacctctctcgccttttatgggtgaaggcattctcagatctctagcatagtcagtgttatggggcccttagacctacacagatggcttcatcccatgacctgcatttttggtttgttcggaatggcgagcaagcagttttagaggagtaacagctccgtgaggcagggaggggtcatgtcctcaaaatgggtattccttttttttttttttttttgcagagaagttgggtttgctttccagcagcaatatagtggctccatacaatctgtaactccagttccagatgatccaacaggctgcattcaggcaggcaaaacacttatagacaatttattttggcggttagtgggatggcttagcagttacaagtgcctgctggtcttacagagggcccaagttcagttctcaacacccgtgctgtgcaggtta

SEQ ID NO: 30369 - DNA, 2225 bp, Mus musculus
gcctttccggagcttaagtgggggtggtaggtgtggcctccctgtctcatgctctctcctccacaggcaagctgtgcattgagaggagactctcggccctgctgagtggtgtctatgcctgactacctgctgccaacctgcagggtagggtctgagacctggcagactgtcctcaacactgatcagatccgatggtgctgagactgctgccagccaactccagcagggatgctccacagtggacctgtgcagactggtgcaactcttgcttcctagactgccagtctctgctggcaggtagacatcagagtgccaggggtcccttgcccactgggacaggagtttctgaacatattcttcctagctggctccctggcaagcaggtatggtgccgagaagtggcacctgccacctgaagagcccatggcagccctgtgtcaggcaagggcctgagaccgttgctgactccaagccaaagcaagcttttcctcacagttcacttgccccattgcttgtccaagaaaaaagggtatggtcttctggccccctgttctctctaggaacttctccctctgagactacttacccagctttgtaagtcaccggagcactttatgcatacagagactggagaacctagccagcagtgcagactgctgggaacctgcctcctgttcctggctttcgtcctccaagacgctgtatagatgcagaccacatctttgtgtataaaaagcccagtgttcacctcctcctgtgtctggtctttggaggaaagcaacaggcttgcctcctgagggagagatagtcctcacgtttaaatgttcattagggacagacagttcattgtgtgaagcaccacccatgcttgttaaaactcctcaacttccacactttactcctaagatgtgtctccaccctcccaactcagtttttgttcataaaaggaaacttcagatgtttaaggattgaaagggcggaggcagggcaggccaggtatcacactggatgttgtccttgtaggagacggtgcccgctgtgtggctgaggctgtagcatgtgccagagcgagtgtgctgctggctatctctattaactttccctggaagggcggcagaaaaggcagtgcccaggtgccgtcctccctgtgcagtggaggtgtgggtgaagaataacatatgcaaacatgtcccctgtggagctttcctgtcagtctggctcctgtgcttggtggccttcaggatctgtgctgaagctcgtcttccaggctccagggtggacacatgctaataccttcccagcctccctgacctgccagtcctttgtcacggctctgttcatgcatacttgaaagtatctgagtgtccacaagctgatgtggggtttcagagttataggccacacacacacacacacacacacgtttttctttgcaatacttgaaatattgccactgtgcttggttgtacaagagttgtacaagaaagcagatctctaagaccagtctcttccttagtcaccctatgacctcccttgcatgtaacatgttgtatttattgctttgtggccaactggaacccagagccaccagggaggctagtgcagggattcctgacccaccacctggttcctgaaaggctcctgggtggctgtgtgtgtgtgtggctggctgtgtgtggtatgagccaaacctgctcatgaaagcagtgctcaggcctgtcaattttaagatgaattttgtgagtctcccccttttgtgtttcactgtgtcatatcagtttaagaaaataaaaattggaattatttatgtggtgtcaatttcatcctggggtgccactgtccctccaggagccgggtgtgccttcaggtctgtctgggcaggttgcctgtgtcccccagccagattgagtccagtagtacttcacggtgccggtggtgtggtggcttgctcagcaccggaagcaagcctcagtttgatccagggatagctgggtgggttcattgtatcacccaggaaacaacagttcccactgggtcaggtgaggatccagagagggtggggcaattctccaggccccctagagtggagcatcattgataatgaaccttccccattttgagagacagggtctttgattcctaggctcagatgatcttctgttctctgcctcagacttcatagcagggactgtcgggcaccccattgcacctggcttcacttgtca

SEQ ID NO: 30370 - DNA, 1114 bp, Mus musculus
gaggtctcccagcccatgggactttctcagtgctgtctttccctcctaggccgggccctcctttgacttccccaaaacccccagctctcagaatttgctgaccctgttggctaggcagggggtagtaatgacaccacctcggaaccgtacactgcctgacctctccgaggccagtcctttccatggccagcagctgggctctggccttcggcccgctgaagacacccggggtccctttggacggtaagtggagtgggacgactgctcaggagctgttctccctaccattgctgacccaactcatcttgtgctgctggctgcccagtgtggcaggtgttggagatttgtggtgggcatttgtgccccagcctggttccttgtttgggagattcgagaagtcggttaaatgactgaagctgagtctagttatgcctggcctgaggaatggttgtgtgcaggaatagggccccagctgtctggcccagaggccaccaccacattagtgcctccccccactgccacctcaggtccttcagcaccagccgcattacggacctgctgcttaaggctgcatttgggactcaggcctctgactcaggcagcacagacagcctacaggagaaacctatggagattggtatgtgaggggtctgtggggttacttgtggacagtctggtcccaacccatccctgagcctgtcttgttcttcagctccctctgctggctttggagggactctgcatccaggagctcgtggtggaggggccagcagcccagcacctgtggtatttactgtaggctccccacccagtggtgccaccccaccccagagtacccgtaccagaatgttctcaggtaagatctgtgccaaggaaaagcagcacacagggcggggatttttgagggcagtttcctgttgtgtaacacaggagaccatagaccatagagtatatggcatttctggcatgtctatagagcagggatggtaatcgagatactagtctctatgtccagcgcccctggaaggccagcctgtgctcctgccacttcccagttattgttagtggttgccttttcttcctagaccacctccttctgcacacgccatctcta

SEQ ID NO: 30371 - DNA, 1179 bp, Mus musculus
ctggagagcctttgtgttcaggttcaagagtataaaaaaagggacacggatggtccaggtggtatatatacaatacaaaggtggctgaaaagggctgccactcacttctgtcccagagcagactgcttgcactgggaccctacaaaggcactttatcagcatccagctgcactgcctgactgcaagctctagtgagaagagggactttggacataatatggagagccagagagaaggtcaggtgagccagggagagcagaggaccccttggccagataccatcttcttccacaggtgatctagttgctgaggcagccagtgccaagcccccacctgatagcctgctgtgtagtgggtgagtgagtccctctttacctttgctcagggataagttgggcttttaggagagccagtgctatcctgccaggtccagtctttttggctgggaataaggccatttgggaaggactaaggctgctggggggaagcctgttgagggagtttagaatctgaatgcatgtatcaacctaaaagtgtctacctgtcccttctgccaccaggagctcattggtggcctctgctggcctagagagccacggccgtaccccctctccctctccgacctgcagcagctctcccagcccctctgggtaagtatacgtgagcatcagtcacactctgggtcatggtcacccttcttggcatgatctgttgtatctggaaggtcctgtgtttggtcaaatctggccatggcagtgtggatgtcccactgaaggcctgtggaagtgtggatgggttgatgaagggatcaactgagaatgttgatcaaaggtgctttcaggacctttgctaggttagagtataggcaacaattatgtaggggtcacacaggtacagttttgggtgattacagtgttgtgaaagccagctgccttcagtcctggccaaagttgagacattctgccaaaatgtctgtgtctgagcttcttccagtgctgtctataatggctattctctctccacagccggcctggccccttctccagcaacaggtacggtgcctcggtccccattcctgtccccactcaggtgcacaattaccagcgcatcgagcaaaacctgcaatcgcccactcaacagcagacagccaggttagtgtccctgaccttagtgagaatc

SEQ ID NO: 30372 - DNA, 1374 bp, Mus musculus
gggtgtggggaatgagaataaaaaccttttagctttatgtgtacgagtgttttgtttgtctgacatggagactacatgtatacctgaagtaccttccagagggtattggaaaccctggtactggagttacaaattgtggtgagccaccatgtgggtggtaagaagcagacttaggttctaactgagagtggtggatgttctaactgctgagcatctctctgtgtccacttcacctagacttgctttgtggaagccactgtggtctagggggcaagagacctacctcagaagtagggactaaatctagtgattggattgccatagggacggggaagatctaggaggtgtccaggggaggagtagaaaccaacatgagcagagtgctatcagccaagagctaacagcgcccagttatgtggaaggggagtcctacaaggatgtgtgggaagaggggaggggaccagcttctggaagttgcagtacaagctggccttggtgcctaatgggtcagccctgtgtgctggaggccctctgtagagtggtgctggtgcttagtccctgcacttgtctttccacacagtcatgtacactcctgtctctccagagagagagagagaccatggtgtcccaagtctcctgagcctaccttttcttaacagctatgcgcacactgagtgaagacactgtcaggcttttcctacagcagatcgctggcgccatgcggctgctgcacagcaagggcatcatccaccgggacctgaagccccaaaacatcctgctgtccaaccctgggggccgccgggccaaccccagcaacatccgagtcaagattggtgagatgtgtttgggtggtggctccctgagagactgcagcaggggaccctgcccacagagatttcagatcaagacatctgggtgcttctcctgcagctgactttggattcgctcggtacctccagagcaacatgatggcggccacactctgtggttctcctatgtacatggtatgtacccacttgtggtccaggaccacataaaaccaactccatgtatcctgatgctgcaggcagagctgggctcagcctccaacctgagaccctttgtagaaacatcagaccctctgaggatcagctatggcctcattgtgggttgtagacagttgtgcacgattttgtcatgtcagaactagctggtggagtttgtgtgttatgtgttggttgcttagtgcctagcagctaccatctccaatttgctgatgcctggtacctgttactgattattgcacgctgctgtacagaggtgctgatctgtgttgtcactgtgtaggctcctgaggtcattatgtcccagcactacgatggaaaggctgacctg

SEQ ID NO: 30373 - DNA, 1193 bp, Mus musculus
gaggttatacttacgtagtgggacaatggaaacccttaagaaattcttcttagtgtttaaaaggactaaacctatcaaatatttcctttattatttataaaaaattaattatgacattttgctggtatccccaacttgtgagatcgcagctgtgtattttgtcttttttgttgtggtgtccttgttgcttagttcatgcctgctgtttagtaagcattcagtaccctgtaactagtcatctacaccatgcctgctgtttagtgagcattcagtaacctgtaactagttatctacactgtgcctgctgtttagtgagcattcagtacctgtaactagttatctacaccatgtctgctgtttagtgagtgttcagtaccctggaactagttatctagatgagtaagttgtacagtgatgtaaagtgtatattctttaggctaaacaatttgagagcaagatcataaagtcctgccccgaatgtcagatcatgtctaactttgtcattctaagtgagtactgggtggaggagaaagaagagaagcagaaactcattcagaaatacaaggaggctatgagcaacaaggcgtgcaggtattttgatgaatgacgtgggagctgcccatttggagggaactgtttttacaagcatgtgtaccctgatggccgtacagaggagccacagagacagaaagtgggaacattaagtagataccgggcccaacaaaggagtcacttctgggagctcattgaggagagagagaacaacccctgtgacaatgaggaagagcaggttgtcacctttgagctgggtgagatgtttatgcttttggctgcaggtagggatgaagacgacgacgaggagctgacagactctgaggatgagtgggacttgtttcactacgagctggaggacttttatgacttggctctatagcagggttgcgtggcgcgggcactggtctgcggagcctcagacagtagctgtcccctgcgctgtgtggcagtgtgtgtgactctcctaggcctctcaaactccaggtgctgtgatcactacccagggcctgttcctctacccttacttttccctcaagagtgttgttttctctgtttcaaatgttacaaaaataaatcttaaagttaaaaaaattccaatttcacttttcacagaaataggaaaaagtaattctaacatt

SEQ ID NO: 30374 - DNA, 1221 bp, Mus musculus
taggtggctctgtgtgagggattaggcttttccaaacatgcactgagtaatggatttaagagctattggccatgttgtgtgagagatttctttctcggcagggatacaggcaaaccctatataactacacagtggagtgcttactagattttaacatatatatgtagttatatacagagatgagtatatatatatatatatatatatatatatatatatatatatacacacacacacatgagtatgtatgcaggtgggcatacacatgcctatagactatcatagaaatgcctaggaagactatggactccagagagtaaatttgcttatgagtaattattatacatttatatatctgccttttggcagtttgcattaaatcttttattacttttatttttttagaatccagttgttactccctcctagtttgccctgctgaccatctcacggtgacgtctcccctgccatgtcacagtgacccccccccccccccgctgatcatgtcacagtcgcttcccccctgctgactctctcacagtgacctccccccgctgaccctctcacagtgacctccccctgctgactgtgtcacagtggcctccctctgctgaccgtgtcacagtggcttccccttgctgactctctcacagtggcctccctctgctgaccatatcacagagaccaccctgctactgacccttgcatagtgagctcccccctcttaccctcccacagtggcctccaccctgctgaccatgtcacagtgacctccccctgctgaccctctcacactgacctccccctctgaccgtgtcacagtggcgtcccccctgctaaccttgtcacagtggcctccccctgctgaccctctcacagtgacctccccctctgaccatcatgtcacagtggtgtcccccttgctgaccttgtcacagtggcctccccctgctgaccatctcacagtgacctccccctgctgaccatgtcacactgacctccccttgctgaccgtgtcacagtgacaccccctgctgactgtatcacagtggtgtccccttgctgactctctcacagtgacctaccccctgctgactgtgtcacactgacttctccctgctgaccgtgtcacagtgacctccccctgctgaccgtgtcacagtgacctctcccctgctgacagtgtcccagtggcctccccctgctgaccctctcacagtg

SEQ ID NO: 30375 - DNA, 1199 bp, Mus musculus
ttagtggatgcaaccagaaataaacagtgaaaagtttggaagtagctctcctgtgctcgctccagaagatgagctacatcctgttcctcagcggcctgcttcataaggccaggtattgttcagctcgtgctctgcggtccctgcccacgaggcaaggactggaaaagagacataaagttaacatttgaaagtatagcagaaatgggcagacgccaaccggcggagttgggtgagtctttctgtagaaaatggggtcccagctgggctttgaaagactgggagagcttggcagacatgctggagggggaagtatttttggcagaaatggagcatagaacagaaatagtaaaatgtagaatgtgatcagaaacagggagtagaactgtggatggaattaagactgcacagaggcaacgggatagaggtaattagtgaaagacacagcccagcaaggggttggatacaaatcatagaactctttgaaagccaaactaaaggtccagtgagatgggtcatttggtgctcactgccaaggtggcgtcctgagtttgatggccaaggattcacacagtggaaggagagaaccgacccctgattgttgccctctgacctccatatgcatgtcacggacttacaccccctccatgtatgtacgtctgaatacacaaatcccaattcatgcaagtaaaaataaaaatagaaaataggactaaaggactcgatttgctctcagtagagtggtaagccagttagagttgtaaaggaggggtgacctaatcagagtttggaaaggtgcaaaaaccttgacatgggtgactacatgtataactcagttatacatatggctgacctgtatttatttcccacactagtcctgaaagcattgtatggctagcatttgaaaccatacaatgtttctctgtaccttttgttcaattttgctctgaacctaaaactctttttaaaattgtatctactgagttggtcatggtgatccaccttttgaggctgaggcaggaagatgagatgtctgaggtcaaccggggctacatagtgaaacactgtgtcaaaatcagaaccaaacaaaactaaagaaaaaaaaaaaaaaaaagaccagattatcaattaaggccagaagaaaagccaggagactcgatgggacgttcctgtaatcctagcacgtgtgagatggaagacga

SEQ ID NO: 30376 - DNA, 1205 bp, Mus musculus
cctttcactttgttaatgatattaacattgatataccttcacacaaacatgtgcacacatatgtgaatacacacacatgtgaatgcacacgcatgtgaatgcacacacatgtgcgtacaccacacagacatacagaatgaaaatacaaagagaataaggaaactaaatttacaatcttgagagaaaggcagcattttgaatcatgaaaagaagaagattaagaacaacaaaatggtctttttatgaatgtcttcattcagagcgttacacagagcaccctcacactgaagttagcttgtgaggcctctgggccatgactgtctggtggaattctagagacggcagagtggtgtgaactgcagaccacagtttacagtctccacagagagtatttctagagaacgtctacaactgtctcccgggacaaggctttgcaactctcagggccatcaggcaaccttctcttttatgtccagagtgaattccttagattcgtgctaattaaaaatgtgtctaagtatctgagagtctttgattcagtgacaagagaagtgtaaccctctctgagaaattgtgctctagtctcaaaaaggtggagtgactgtagggtctccaggcccgacctctgaggtaatgtctcagaattgagtcttcagtacaatagataaaatgtctttattcaggccgtcaagctgaggcacatccatgctcttgctctgctgggtggctatttgctgtctagggctgcccacttctgtgagtgctcaggcagctagctgtaagggcgtgcagcctgccccaagggaaaaggacagttggtgcagcctgttctggcaccatcctggtagaggctctgccctcctgtccctgccctcaagaaattcatcagctccccagagactgtaaggcattatctcactcagccctctggctccaagtaggaattcacttaagttatctctgcagaggagaatgtcttcatgttcaacctgcatgattaaaaattagttttaaattaaaaaaaaaaaaaaaagaaacattacccatgggggatttagcaatacctgttcctaaggtggacagggctggagggtcacttggtgcttcgagaaataactgtgatgatacggataattggagcttacatggagtgagtgttctccgtgccagatatggaaacaagggctttatcttttcacttactt

SEQ ID NO: 30377 - DNA, 1177 bp, Mus musculus
acagaagagcaagcaggtgagccaggatgctgtgccaatgtcagctctggactctgcctgtgggacacacctgccgagttctgtgtcacgtgctctgatgcacctgccatgttctgtgtcatgtgctatgaatgtacctgctgtgttccgtgtcatgtgcactggatgtacctgccctgttctgtgtcatgtgccctggatgtacctgctgtgttctgtgtcatgtactctggatgtacctgccgtgttccctgtcaagtgctctggacacatctgccgtgttccgtgtcatgtgctctggacacaactgccgtgctccttgccatgttgagagcatctgatagagaggctctccagactcagacatacttcttccccaagttaggctgtaaggatgtattaggcaaatgtatttatttatttttgtcaggaaagctcatgcctgcccttcattatgaatggaattctttcattgtcttaggccaaaggtccattttaaaacacggatctatgcatattttaaaatcaaatgcaaatatgcatgcataatttgttcccatttcctaggtttaatattcatgttaagaggctgaacagggcttggactgattatctgggggccttgtttctgccagtccctattcgggtcaatctccaacactgacaatcaagtttgacaggttcctttcacagtggaagagactcgacagatgtcgtcctgtgtatgtctgaggacgatgagcctaatagcaagtagacaggcccagaacattccttatcgccaagcacacagtgcaggcctcagaagtggtacctgctggatctcagacagtaaagtgtgtcacacacaggtacactgtgaagactgtctcctcagtcactgagggctaacagttactgtggggttttgtttttgttttctctttgttactgaagagtggggacccgagattgatcacctccttcggatcatgtagatctttctatcacccacagcgaaggcccagggctacacttggggttctctgctgaaagtatgcgggtgacgtgtgctgttccccccacctgccccccacatctgctcatctgagctctcagccccagaatgtctgttttcattcagacgcccagtctttccacaaaatttggagctggttttcagccctccgtgtcaaac

SEQ ID NO: 30378 - DNA, 2993 bp, Mus musculus
ttttaaacagaacaaaattttagggtgcggtatgtggggaatattttctaccaaagtttttccgtgtggagtctctcaggagagcctgtggcttaacttgctgtgtatttctttactttcttacagctacggagtcaaggccaagtgagggggaccagtgcggcctgtgatgactgaagccaccagcgtctcagtgttggacgtttccagtgtgtgtctgacgattcgagcacacgtgtgcacacacacggacggacacacacagacacacacacacacatattctcacacacttatgcgtgtgtgaatatgtgtgtggatgtctgtagctgtatgtaaagcacatatggctacaggtctagatacacacatgagtgtatatatatatgtatgtccatgctagatacacacacgagtgtatatatatgtatgtacatgctagatgcacacatgagtgtatatatatgtatgtacatgtaaagatcgaagggagcagggcgttttctccaaagtactgcacctgccttcaacaaaaatactaaagaaaatattttcaatatatatacctggaacagatattaataatcatcaacatgatgcccttgatggacaaacggactgccctgtggtgccccgtggtgctggctggcgtgcttcgtgaatgccaggtgtggaccagtgtgtacagcctatgattatgtttctgttttttcaagtcaccacatacacacacttagtctcattccatcagcaacaactcctacagaaagatttcttcaaatttttagatactccagtgactctggaatgtaaactctggatgtatttataactatttatttctgggtggccactatcttccagccaaatccaacattatctgtcaagtaaggagtcaaagctctttattggtttgcccgagggttggggaagtccttttttaaaaattgccactttttattggatttttgtattttgaatttcaagtatttttctacatcaaatttagcaaaaaacagtgatgacggtttgtgatttataataaacactagacaatattcagactctggctaagcaaacggcgatcaagcaattaacctgagtggtattgcaggctgtgtggagcacttctgtggagttttgtttctgaaatggcttttctggaattacagcctggagactttgtggatagtctgtattgttctcagctcacagggtgggagagtgatcacgtccagctctttttctgttgtggtccaggccaggaggaaatgaagagctaggaacagcttgagtgtggcccaggtctgtcgccatcctgacgcccagccagacctgagcgttgctgccgactctgcttcctcctcattgctcctcctcttcctcctcctcctcttcctcctcctcctcttcctcctcctcctctgcctctgttttttcctgtaagagaaaggagcagtagctgggtaggattttctttccttatgacctttctgtctgatgctgtttcctcttgttagccctgggaccctgaccagaatcacactgctgaatccttcaggttacacactgcctttttaacccccaacccagagcacagcaccctgccatcagagcacccgagtgacccctttgttggcagacttggccttcatgtcccctccgccctgccctgtgtcccatgggagcaatggcagagattcccactgcatcgcactgcccggttaccctcagcagcaaaccctgggttctaaccccggcactggagagcccaaccgtccccagtggaaccaactcagacatccatgtttccttaggagcttgggcacaaaggcaacggactcctgtgttgttctaacagctgtggagactgagggacgtgtatgagcgtaaagcacctgctttacttgccagtctcctgtgtaaattacagtaaaacaaaggaactgaaacggaaacaaaataaatttgatctcaaaattccacctgtgtgctcctgtggttgtttgcctggtgccacgtgcttgggatagcacagaccactgctggcctttgagttgtggtttttacagccccgctctgaaaagacaaacaggttctgctgtcctgcttctcctgaggggtgtctgtccttggatgtgggcttgtgccagtcaggttgtcacctgtggattctgaggtggtttcctgcccttactggagttgagtgaactcgggtggaggtcctgttagcctcacagttggcaaaagattattctttttttttttttttaaagatttatttatttattatatgtaagtacactgtagctgtcttcagacactccagaagagggcatcagatctcattatagatggttgtgagccaccatgtggttgctgggatttgaactctggaccttcggaagagcagtcaggtgctcttacccactgagccatctcaccagccccaaaagattattcttaaaggaagagatacagagaactcagtgttcttaagtgttctgtcgggttttgctgtcatacctaactgtcccaagagtgtggctctcggatgttttgtccttcagaactgtgttgtcctcctgtgccctgtacggttgcagcactaagcaccggggaaagcctgttgagctttcatgtgcaccatgtttccagagtgtttgcacttcccctcttggtgccagcatgcggcattagtgcgcgtgatgacctgtatctctcttgcatctgtcaacctgagtgtggtcagtcacctggctctcagcagaagctctgaggcatgaaaaggcagatgttcagtccagcatgagagacagacataggaacaggagaccaccagttactgtggtatctcttcaggagtagtgttggagagcagatgtcagctagtcactttgcaaatgagaaatcaagattgtatgcaggtcccagcagctgtgaccccagaagctctgagacccctcagagttctactctgccatggaggtaca

SEQ ID NO: 30379 - DNA, 1172 bp, Mus musculus
aatggaataagacacgctgagggcgggcctcgggggactcggtggtacgcccattctctgatctcgggtgttctgcacacagacccttctacctggggcagacatgtgctttgagtcctttaacgtctcttccctttctcccctcttgccagctttctctcccataggcagctcttttgattactaattgtctaaccccggggcaccccactctgcaccctgctgccccttaactaacggccaccccgctgccttcttctctctagtggctcctgtgtgtgtctgctgatgctgtgctactaacccggccctactaactggtttctcttcttactaacccagccctgccgagctctgggcttcctgggggctggtccctccttttggcaagcagatgtccccaggctgtccaggccagatctgaggcaggggacagccgtatttagtgacgcccagaggaggaggaggaggaggctgtcctgtggacgtgggacgctgggctccgagcatgacctctctcctctgtgcacaagtctggttgccaccaggagtggatgggaccaggggacctcgtgggaaccattgtggtgcccgtggctctagaattggcaattctgggccctacctagctggggccctctgtgatttagggcagggagagaggggtaggaacatcaggggctggccatcttgtacaggagctcaaagtgtgtgtctgaacccaaagccctacctgggagctataaacatgtttcctaagcaggaaacatgtgaggggccatttccctgaaacaccacagcgcagagaagcccgaggagagagggcatcaggaagtttgtaagagggcctttctctcagcctgagaagagatggccgatgaccagtaagaaggttctccaaataggcggtcaactagccaggcctttcccactgagagaggcggaaatctcaaactggaagtctatttgggatcatttttcacacaggaagtaggtgtgaggatatttttttccctcaggaagtgtttagaaacactctctccacacttagagaggacaggctgccagttgtcctgatgcacagtcgggaagcgtctctacgggcccttagggcttatgggaggggcaaatgggtgccaggaagtgaatcttagaagcccacaggcggatgg

SEQ ID NO: 30380 - DNA, 1192 bp, Mus musculus
accggcttttgtctctgctgccacacccagcacatatctggatgaagaatttggagtctggggagggggaaaaatggtgttaaaagctggggccaagcccttttttcctgctgggggaaactgaggcctgagactataaacaacatgcctactgttggagtgaagagtgggggaggggggtggaaagcagagcatcaagagcatttgtcccatgggtgggagagaggcctgccaggctgtccaggggaacgccctcctggcaggggggacctacaaccccaccccaccccagggatccaggccacatgcttcctgctgaaacgttgggtcttagtaaggatgctggggtaagccatgcttcctatgatagagcttgctctctgcggctagagccatggttcagcaggaagtcagctcccagtcttcactcccagaactggtgctgctggagaccgaggaccgggggctgctgcgggcaccggagcacccatggaagaccccagcccctcaccctcttcctgctaaaccttttttcacgggttattcctctctgagatgcacactggtcctgaaggctcttggaggctcccatggggcccaactgtgccttgatgccacccctgcttcctctgcaggacgtctcaggctgccttgtccctgactccctggtttctgctgtctctcttgtcttggaagctgctttgacttcccacgtgattcccgttcttgctctccattctgcctgctgcctccttatctgacccatgagtttttgggcatccgactccttcggtcttcaccgacaccatgaagattgctgggggcatcacctttagctcgttccttggtgtgatgtctgagaaggaacccctcctccccatttgtgttgggtggggccctgtgctggagctcttaggccaggtccagggcctgtctctaaattcaggttttgcagtttgatgtggtgtggcttttggttgtgaaaggtgtcttagtccctctcgttgccgtgagaggacacctgacgtttgtttttgccacagtttgagggtcctgcctgtggtgtggagatgtcctagcagagcagtatcaagtggctggtcacattccgtgaggtgtgaaggacagggctcacactgctaccgctttctctgtttcactcactccaggactctagcctgtgggatagtgc

SEQ ID NO: 30381 - DNA, 1109 bp, Mus musculus
aaatccacctgtctctgcctcctaagtgctgggattaaaggcgtgcgccaccacggcaggatgagaaaccctgtcttgaaaattcacaaaaccaaaaccaaatcaaaccaacaagaaaccccaactccgttctttcccagcgacagagaaataactagagcaaagaggagaacaataaaactgcttcctggagagaactcgacatggggtcgcgaggacattttaatctctcagtgtcctcgtgacgctggtaacgccaagtaagactccagtgcctggcgacggctcgccctggaacgagacggccactcagcctcagttccgatgggaaccagaagcagcgcgaggcgggatcaccggcccttccgggttgcagacacgccccctccggcgtgaagtcgctgccggggcaacagcgcgccacttccgcctctgagcgatgacgtatttccgatgcgccggtaaaggccacatccgggtttgggctggcgggaccctcgcagattcggggacgctgggcgaaggctgtgtggctctcgcggatgctgagcgaggtgagcaggcggcggggtggcgtcccgggagcgcgggctgaggctccgaggctccgtgacgacggctttacggtttccctgcgctccgggcccgctgctgacattgagctgagcgtctcctgtcccctgtgctggggaggtggcggtgctgtaattgagtgggcctagggcttcctgctcctttgaggaaactcaacatgtgctggttgctggggtcggaacctgttgagtttcgccggtgcatagtgaggaggaggaggaggaggagcagcgggggggggggggagctgttagtcaccgcggagccgttttcacgctgtcagtcactggtgtcacatagtgaggatgttactgtgcaatgcacacagtgtcgggtcgggacctttgaatgtgataaccacactcacaggtgttcatagaggcgcgatttagactcaggctggggtgttaagtgttaatgattttcacaatcattttgaaggattcacttcgcagtcctgacttgtaatgagtgtgaacctgaaacccgatcatggagtggaagaagatgctttt

SEQ ID NO: 30382 - DNA, 1151 bp, Mus musculus
tcaggtgcctacatgcagccgggtgcgagagagaacattgcctacctcacccacacagagcgcaggaaggacttccagtacgaggccatgcaggagcgccgggaggctgagaacatggcacagagaggcatcggtgtggccgccagctccgtgcccatgaactttaaggacctcatcgagactaaggcagaggagcacaacattgtgttcatgcctgtcatcggcaagcggcacgagggcaagcagctctacaccttcggccgcatcgtcatctacattgaccggggtgtggtgtttgtgcagggcgagaagacgtgggtgcccacctccctgcagagcctcatcgacatggccaagtagacatcggccacaccagaccggtgtgaataaacagcactgtaaaccaagctgatgaataacgtctctatttgggagaccaggccaccagggcaggatgtgactcagtgtccccagtcggcctgtattcctggccgggcaaaggatctggtgtggtgtgcaccgtggctcctggcccaggtggagagaactgtcctgttactccagctgagcgatctgtagctttcctgatgatctccaggtcctcacagtcctggtagtcaggctcttcctgggatgcccacaggtccccaggcagtccttccagcttcaatagtgggaaccagtggacagatgtatcattaaaggtgtcagtgtactggggagtctgcggcagtgggacctcctccaggcctttcagaatctgagcagagaggaccagatacgggcattaggtacacccctctctatcttcacctggccaccccaccgtccttctgagaaataagggatgggggggttgtatttcagcacttttcagtcccatgccagtgagactgctgggctcgccctaaggatgaaggccactggcacacagtaggagaggcaccagctggttgtgcttagaaacatggacagtgtggctttgcaccctcaccccggcccagctattctgtcagacacctttgcaatgtaggggtaattttcctgcagaatcctcgccaacaacctacaaataaaaacatacatacacaattaggaagtatatgggtgtttgctttctttttcaacaggtaaaaactagttcagaaagg

SEQ ID NO: 30383 - DNA, 1336 bp, Mus musculus
tcccaccacctgtcaatagggagcagatctccaaatacccaggttcccggtgttgcagttcccactctgcatctctgagcgtgcctctgagagagggcctctgttgacgtttcaggaaggtcacattccagaaagcctgaagccatggcagaaggcaggagaatgtggcttcctctgtccctgtccctatcctgtgaccgcctcattacaccctagaacatccctatctctgtggctcccacagtgaaggacacctcatagcctgcatcctttacccaccaagagtctccttcagctgtttatgtcacctgtgctgtgacaatccctggcagctccgagccagctaaaaaaaaaaaacctgttagcctctagaggacaatctgcgttttaaatgtcatcccctgtcgccttacagaatctgttatatggggctcacagaggttgtatattgatctacagaaggcgtttgtaccagactctttcttactctgtcctagaatgatgacggtcctcctcaacacgcgttgtatgctggggtgggagaatggaattatatatatatgatataggatctattttcctaaccgttcctctgggtcctacctgggatgtgtgcatcgcgatggggaaggactcgactcgcaaggctgcagcattctgacagctgccttactaatccacaagctgcaggccttctgaatgacagcagatggtgggcactggagccagtcccaggaagaacctaactgcgtgactgagaattcatctattaaaaaaaaaaacaaactatatttttactgtcaaaacaaatgggcttcccggacttcgcagtggccggatgtcccctgtgcttttatattttgtcactgtaagaggttttttggcacagacaagcaagtcagaaatccagctgactgcactgaatgggtgaactctgcatgtgcgaagggggcacacccagactccaaaagtagtaaataaagctttcctgtcagtggtaactctgaggctgcatgtccacaagacagcaacggggtgggggtggggggtgttctcttgggtccttgaaggaggagctgctggggctattggtgaaaagagaccaggggtgctaatcgacagcctatgcaaggatagtcaataacctttccttgatgagagcactgtggcctaaccagggaaactaatcaacagcctacccagtgatgcctagttaataacttacccaggaatggcaagtgctaacctattcagggaaattaatcagcttactgaatgatgttagtcaatacctacccagggatgcaattggttgacatctagagatacaacagta

SEQ ID NO: 30384 - DNA, 2462 bp, Mus musculus
aaacaagctcccctttccccactaagagcctaccttctgacttctgacttataagcacagctccgccccatcctgtccatacccttatccttcctgcgaggccccgtgcacagttggcctgggtcgcacggctttcatgtttgcttcagaggggcataaagcaataatgcagccaatttcccctgaactttggcaaagtgcttatgtctcagcattgacagcaggaagaggcaggcagtgtccggttgcctccggttacctgatcgctgtccaagcttacgaaggcttgtgacgttcacccttgtccacgtctgggttgctctgatctccgtggggggcagcctttgcccccagtctcgagcgttacgaaccttggttggaattgtccgtgccctggccactcacgtcctggacctgctctttctgaacacccatatcctgctggagagaagacacaacttagctcagcggagcagacgcgaccccaaccccaccttccatggctctcctggacaagtgattatctaggtcccatgtggatgttgctctaactgaaaggcccctgtactgggaggcccaggccagatgctgggccaagaatgaggtctatggtgtcctccattgtgctacctgcatgttcactccagggagtcccaagagcgtctgtactcctgtttacttttcttaagcctccaaggtggcatcagaagccccccagcaccagcggtcacccggaaacacgaggccagctgcccgcagcatgcctgcagcttccagagacctttttccagccttgctttggcgacatgctcagcagttccaaggtggttcaaggtggccatggagggcgctgggtcgggtgttttgatgaatgcctgcctggcgcgtgtgcccaccgctgccctgaggtcctcagagttagaagttgctctctgtaaatccgtttctcacaggtggtattgagacctgcctcccctgtccatggctgcccctctgtctcttgcctctgctccctcccacccgtcctctctgcctggtttcccttgggaagggtgtggtatgaagaacacatggccgtgcttggtgtctcggtttaggacggtcacctgtgcctgtgggctgaggtgttcagcagcaaggagacggcaggccccacctgtaccccaccttgtgctctggctgcaaacaggagccattgtctgtttaccctgttcctgactctcttcctcccctgagctagtggtgagaaatcacttgggcttctgtctccctgcagactctcccatggttgctgtttcctgttctgttttgttttgttttttaagatccattttgtattctgtggcaattttgatctagttgcttgccagggactttttttcaaacacactagcagggctgagagtggggctcagtggacagagtatgtatctaacacacaggaggtcttgggttctgaccccaggaccacatacatcaactgtggtggtacacatctgtgtgattctagcacctggcaggcaggaggaggagggaggaggaagaagagagggggtagtggctgcttagaagtctaaggacatccttggctacataagataggaacaagccagcctgggctataaaacactcaaacagaacaaagcaacattctactcatgattttgagtctaacttgtcttgactcctttcttctggggagtaggagcctagtgtagataaagaccatggtgtcagggagtgctcctgggtgtcagggagtgctcctgtctttagtatcagaaggcacggtggaattaaaatgggcttgccttgtctcctttgctaacccctcaaacctgatgagaaatcagcttgattccttatgaagacccacgtatggacagcagctctggccagggcaagcttctatgtctctcttccccctccaccctccgcccctccaatccaagctctgacagtttcactgggtggcgagtgacctgctgcaagttggctgtgtccccatttatagaattgatgcagctcagagagcagaggcccatgctttggatccttagccgagctgagcaagtcctcttttaaaaaccaggtgaggttctggggccaagtagtgtgctgaatgcctccccaggaccctccttgtaaaggaacctaatatgccttaatcaatgtgtgtacttcaggcacctgcatccctctcccccagccctccctcctggtgactctggctgttttcagaatctcatgtaggctccatcatctcctctttgcccatcagcattttgacatctgaactttgggtccacccctcccatccagtagataggcattctcctacatagtcgatatcctcaaacccagaggcctttgccctgtgaaatggagtggcatggtgctgtcgggtgtcctcagctccagcagagaaactgggtggtcctggggagtaggaacttagtgta

SEQ ID NO: 30385 - DNA, 1174 bp, Mus musculus
aagattctgatgacctgggtagaaggtacagaggtgtgtgtgtgtgtgagtgatgagaacaaaaatcttgtgtatattttagcacaagctgttagtttgtagctttgcttcccatgagaaggccatgaggaatacactctctgctggcatggtaatgacctgcggccctcccacgcctggctcttgcctctcttttctatctttcctataatcagccacatatttcaacatatccggggagaccaagaagctgcaacgtataaaggctttagccccgttgtgtttggtgtcccagcctttgggagggagccttctggtggcctgggtggcagcacaacagacctcatcccggtgccccacctcctcctctgtccaggtgtctgtaacaacagcagctctacctgtcagggttcaagaactgctgaagaaggataccccagatgcaagcagtatgcaaaagcaaagagcgtttcttcagctgaatttcctgcttgctggggtctgtctcccccgtttgggaatggagacccctggtgaaatcaggggctcatcttttattgtcagttaggggaattccagggaggggtttgcgccctcttaccttgattggtcagctctatctcgggggtctgactgattctataatcaagctctgaagacttcccaggggtggcttgctcattctagctacctattcttacttcaggccagatgatgaggtgtcctcggactggctgcccgcggctctggttggctgaccacaggttcctggatcctggctctcatttctgggaaacagaaacttaggcctagtctcccaaacggccagtttgcagctgtcatggagtcagtctggctctcctgacctggtgttcccatttccccttctgatttgcaactggatcaaatcattgatttgtcagggttttttttccctccaatctttttcttcccaccttgtcacttgtcaggggcagaagtcgttattattgagaacagttactgccaagcaagttttcatatgggaacagtaaaaagccacatctgaaacctgtctataccttaatttgatggctattagtaaagcaagcctgtctgccgttttcgaaacaagaaacctagcagtttaacccgataagttaaccaatgaactaacgtcgtggtggattgtttt

SEQ ID NO: 30386 - DNA, 1186 bp, Mus musculus
gaggaagctcgctctcatcttcctccctcatgcctggcacctaggctgacatgaggacatgaaaccaccccctccaccccgaggaatatataaggataagaaaaattttttttctagaactaagtgcactctctcttaacttaggactccctaagcacactggctgtcgcaagatgctctaattccccctcttgaagctaatcttgggagttcactcatcctagctcctgtgcatcgagattatcttttcttggttgattttttttcaaacaatctccatactggattggaaaagccaacctctgccctgacctgagtgactgccttcttgtgaaggctaccaccacaataggtcctcctaatccttttggatacaaacaacaaaccttctagaaagtacttttggtgtgcttcgggctcactctgtgagaaacgagcaggccctgggaaccgcatctccatcacagaatagggaatagacagagactggctggctgagctccttttccagacacacatggcttttatctcaggccatcaaggcaccaaaaaatcacccctccctgtgccctcctaagctgttcacacttaccctacggaaacaagagaactttctgcacagctcttttttgagcattttaaaggccaaggtaataatgtcaactggtggtttcgagtcaggtggcttcctcctacaggctgcgccgtacccatctccagtgtccaacctggaagttatagctatgtagctatctcctctgagttcaaaccttctcttcaggagggaggagactggtttatatgattcaagaagtcaatgaagcttagagatccggtaactcagaaacttcaggagtttcacaagtctcccacccccaggttgtataagcaacagtgatcgcttgagaggggaacccccgtgggggagggcccgacagcagccataaactgtgcaggggagacttgtgacccatgcatgctggggtgtgctgttcagaggggtgtcatgtcctttgggatacctacccatgctcctgtgcaagaccgcaacaaactcattggttcacaaagctacacttgggtggaattcccaagtgactctacctcggtctctgtagaatccagtttttggttctttgttttgtttttttctgctgacacaagagcgacaacagctggagaagtg

SEQ ID NO: 30387 - DNA, 1214 bp, Mus musculus
gtaagacccatgagtatcctgggttccaggtgtccacagggcttgctggagcccaaccccagcgatacaaagtggccagtgttggtaaattctccccagtccctatcccctgtgagagagtgagccttcagtcaatgccatcttctccagaaaaagggattcatttgagggccgtggtatagagtgtcagactgggctggcgccttccccctggggcacgtgtgagagccaagaggggcaagtctctgtccatcatggctctgtccttcccgtgacaatgccacacagtgcacgttctgggaagctctgtcaagacctgtgctgtatattatcaatggacccggcatccacgggcacgccacactgcacacatagaggccagaggacaatttgcagaaaccagttttctcctaccatgtgggtcctgggaatcaaactcttcaggcttggtaacaagccttcttacccactgagccatcttgctggcccaaatctgtgcctttaaaaccaaaaagccagagatgtgcatgtgggcataccagagctgccttgggatgcttcctttgccctctgagtagccaggttatctctgcagacacagcccagctttcccgctgggtacaggaagactcgagagaaatcgtacttcgcacctagtgagctctatccccacagatcttgcttctttctaagatattctacaggagtttcagagagaaaggtggcacacagcggggtcccactcggccgccctgggccaccactgatgatgtcgcttaaccaggcgagtttagtatcccacctcagctatcctcaacctcatacaccctcaccgttagacacaagcaggcaactcctcctgctctgcggctccactgctttgaatccacgaaccgacacactacgtcataggtgtatgccccacgacatactatgacctcatcataggtcgcgatctgtgagtaagccaccctgctccccccgcatcccgagggccgtgaacagccccagcttaccttctctgtgcagaggtccacacacttgtccacagacatgtttggcatggcagctgacacgggcaaggccagggagaggttgttgggtcggcggaagcagcccctgaacactgcacttccatctgaggagccagagggaaacagctgtcagacccagctacggctaatcttgagcaccgagctatcagacctggctaa

SEQ ID NO: 30388 - DNA, 1242 bp, Mus musculus
tcacctttgttgtacagagagccatcaaagtagtagctgccagtgtagaagccggtggccagctcgatgaggtggcgagcccacgtgttgccagcgcccgggaagctggctagagcgatgagcttcttagacttggctgggaggaaccgtctgtccatacagcggttgtctggggagggaggagagggtgacacacaggggtcagcaccgtgtgccctagagacaaggtcacagcgggaagaggagactcttaagtttggcctagccgtacaaatatctctttttagcttgcaacatctcagtgttgtgttttctaggctgtggaaccaacagtctcgactgcctcaccctgactgacttaacactgggtgtctctacgtccttggactgcagtctcctctccgcagggaacagaagtgaacatgccactcagtccaaaatctgctgagaaactttggggagaagtaaagtcctggatcccaactctgccctattttgctgtgcggctctggccatactgatcaacctctctgttttagtcacccatttgtaaactggtcatcacagcatgcataccatcgtgccactggagggttaaacgagttaagcctggtaaagagcatcaggcacatagattgttaatggtgtggttcctatcaggagaaccagggtttattgtgtagtagatgcttaataagtgacacatagagaccatcaccaccaccaccatcatcactaccgtcccagttttcttctctgctgctgtgataaaacaccaagcaaaggaaccgtctctttggctcacacatcccagttccgagggaggtgagggcgggcactcaagcaggagcagaggccagaaccgtggaggaaactgtttcctggcttgctcagcttgctttcctatacaacccaagatcatttgcccaagggtgggtggcaccaccctcagtgggctagagcctcccacccaatcattaataaagatagcaccccacacccatgtctatgtgcaatctgatggggatgtccctcaactgagatcccctcctcccagatatatctcggcttgcgtcccgttgactgaacgaacaaacacaattgcaaccatcacctcccaatcccctctatcctcatcaccactgcctcgtcctcaccagcccagccattgccgtcatcctggcatcccctcgggcagtagagggataaacagtcagtgtgggctcccctggcaaaggggca

SEQ ID NO: 30389 - DNA, 1135 bp, Mus musculus
gggtccctccctggctgcccatcatcttgggccataggcatcaggcaccccagtgaggttgcggctacgtagtgccgtgtccaccattcggatgtaggcggcaatggtcctgcgcatctcggctgtgtaagggtcatactccagcttgcgcagccccgagcgcttgaagttgccgtccttctggctctccacgcacagcagccgatcctccctgaccgccacgcccagcaggctgaccatgcggcccagctgcgtaaacaagtcctgcttcaggtcctcgaagtgcaccaccaggacggtcttgccaaacttgagccagtccagcgtgtgcgtggcccaccacggggcatagttcctcacgaactcgggccactctgcggagagagcagagcgtcagcccgccactagatagatgggcagatgacaaaccttccggacgcctgaaacccacgtgtgcttttttgggtaacacacccctggctggtgcctggtttactacaggcacagccctacctatacacagaaccacagcctgaaaacagataccaccaaactgcggaggcacagagatgctgggttatacaggaagggctgggagcagagagcactcgcttgccaagattgctggaagctctgggtttggaccccaagaagctgtatgggtagagactgtagttctgtgggggaggttggaatgttgcagatccaaggactaattagcttaccttgggctaggcctagacctctggaacacctaggtagtgacaattttggtttctttaggaatataagaatttgcttttgctttaatcccaggtgtgggtaggggccgcttcagactgtccacagcagctgtcttatgatttgccttgtgccctagcaggcagatcattttgccagctgcagatggtttctgcaattgtgtgacaccggggattccggggacttttcagagggtagataaatgcttgagcttagagtggggagagttgttggttgtggtttgttgagtagttgtacataaaagaagagaaagaaaaaataatacataaaaataaataaaaaggagaaagaaaaaataaaaaggggaaagaaaaaataaaaaggagaaagaagaaaaatttggattctaatg

SEQ ID NO: 30390 - DNA, 1151 bp, Mus musculus
ctaccctctaagccatcagcctcccttcccttgcttgcaacccgacagggccagccccaactggggactcctcagagtccccactaagaatggctttccattcccattatgccgctgctctttctcgaagacgcttagacaccaaaggatttctgactcaagtcactgatcacgttttaggaagcatgcatccaggatccccgtctcccccaccttggatccctctggcttcccctccagcccttcaccgttcccattacataaacgcaaaagccatagtcacagccccttgctcttttgaccggagcagcccctcccccacctccacccccgcagcctggggggtgggggggcggggcaaatgaacactccttcccacctagccaaggaaccctggagaagattcgtgaaaagagagatatatttttttaagaggaatatgaccaagacattctgccccttggacactggccacacaaaaaaggactggcttcccttcccaacgccctcatctggagggtttggaccaccccagggctcagccaagggggctctgaatgtattttgtatggtgtttcccccgccccagactaatttctagttttcttttcactgggcagtagagggcctagcctcccctcctgcttggaggtctaagctctctgagagactctgggtccaaaacatgggccagttctttgcaagtggcctcctctggtcacgaactttctgttcgaagattcctcaggtcaacactatcattaaaagagagttttgttgctaactggctgcccagttgtgtatggcatgttcacacatggagtgtttcctcggggggcgggggggagtgtgtgtgtatgtgtgaatgagagaggagagggaaggcctaaggtgtgaacttctctgggtttatcatgcacagatgtggagcagagtgtctgtgggagagagatgcccagggaccccgcagttccccatctccatcaacaaacctcctcctggcttctgtcaccaactagactgggccttctgtggagaaggctgtgaccagagacttccccagtcagtggaaggaggagcttttaatgttgtcttgtgggcagtgagggagtggggctgctgagatgggtggagagaaagcagagaggggc

SEQ ID NO: 30391 - DNA, 1137 bp, Mus musculus
gagtacagactgaatctggaatgcaatgcctgcccgccagcaactcccttccagccccaaattctcagactagggagaggtctgacccaatggctcctctctcctcaacccttgtgaatgaccactagaggggaggcaggaactgaagtagtgatggagaacaaggggagtgagctctctggtcccttcccactctcaccacagggaccaccagcttcccagccagctggaattcaaaccactattttctgtgagctagagggatggctcagtgcctaagagtactcctcactcttgccaaggacccagggccaattccagacatgcacatggtgggtcacaactgtccttaactctagttttgatgaatcctgtggagggttgggcgaatgcaaggctttccccaaggccctggtgtaccgagaaagaaccaggaatatacttggcagagttggttatggcctagggccagagactggagggagttgtggctcctgatcctgagagatcagcttgtccactatgtgggtctataatgttcttgagatacctggtccccgttgtgcgatgctgctggattagcttcctgctgacttcatcctagcgtttgatagtttctgatgactctgtcccatttctcccctggaaatactgtataaggcgctgtacttgttaataaacttgcttgcaggagccatcagcttgtgtgagacttcttggtctgagactttcctgactttatcctctcatcttctggctactccctgacccccattcaggacccgccccatgactataggatgacctgctgctctcttttgaccttcacgggcaccaggcacacatgtggtgcacagacatctgtgagcaaaacactcatgcacataacatttttttttaaaggtcactggtttcttttcaaatagtgaccctgttataaatctcatgccatttccctcgattctttcaaggtgtaaacagatctcttcaaacagtttgttctataacaaatgtcacctatacaggggattttatggtcagtctggtcaagccttccccacatcctctgtactcaactggtcccacaatccatcagtcccaagatgagccatgccagctgcaccttctttcgatggc

SEQ ID NO: 30392 - DNA, 1832 bp, Mus musculus
tttgggaatgctccaatgcccactgaattttgcacaaggcggctcatgttttaagtggggttcccaagtgtggacactcttccagtaaaatggcaggcaagcaacccgagcctctacaacaggagcaggggaccgactgtgactgactcagaaaagggagcatctctgaagccaagacttgagctgtgaccaacatacaggccaacatacacgatgtcgccgtgcatgccctgaacatgctgcgcagtcttcgtgggtgaggaagttaccgcaaacccattgcagacctgttatggcaacatgacagtcaaaccaacaaagcccactacaccccaacatcctccaagaccttgactttggatttcagaagaacggggggtggggggaacgaggacctgaggggcttcatggaactttgcaagggcaacacagggttctgtgtgtgtgtgtgtgtgtgtgtgtgtgtgtgtgtgtgtgtgtgtgtggtaaagaggaggagacggagagcagagaatcccaaaggatgtgggtacaggatatcttacaccatcatgccacggaggagacagagagctatagtggtggttgcttgggggttcaggtggtggcagctctttgcttcagtgtgtatactcacttagcactgaaccctgaggctgggtggaggccttttcacagaagactccatctgatcccatcccatcccctcccctcccctcccctcccctcccctcccctcccctcccctcccctcccctcccctcccagggtctcttctcccctaatcccctcaatgctggctggaaaaagggcttagaatgtcccagagactggtctagaacggagttttgggactccatcttcagagtgtcttcccaaggctgtctggctggtcatctgggcagctgaccagctttcccgagtcctccttgaatgtatcaacagccccgtgggcagcccaggatcaggctttcctcccctggcaggaaaatggctcactcaccccccccccacacacacacactgttcatcagtagcaaaagacccgagccctgctccgtctggcttgacatcattcctcatggaggaggggtggtgtgcacttcgttagcatgtcccatgcatgttaagtatttcacatgcaccttctcatttattcttcacagaaacctcatatgtatgaggacaagcagagactcagagaggttaagcaactggcccgaggggacccagttagatgttggtagagactggattcgaatcgcagtgggcttggctcgaaggaagatgaagagtctggggaaactaataggttggggttttagccataaatgctgttttgttctgttttttccatgtaaacatcttaatggtctttttgacgtcttgcttgttgttttcagagtaatacaatatgcaaagaaaaggcgtactctccagccccagcctccctggctcccatcacacacaccctgaaatctgctaggcaagcagagggagggagcctggtaggtcagcctgtccagtccaaggtcttctggcctgcagtgtcctctgttcccttccaagccacttttccaccggggtgtaacacacagatgtgtgtcctccggccccagccagttcccgtattatagactgctgggagtcacacttcatcagggggacagattgttcctccctggtcgggtcttaagatgaggcagttctgaacagatccaagctggaacctctggcttctgagagagcccaaacaaccaaggattgggagcagtaagggtggtttaaaaatagccttgtgttcccattgtcaccctctccgcgactcccca

SEQ ID NO: 30393 - DNA, 1234 bp, Mus musculus
cgagtactaccatgtactggaagtcgccaacgagggtgacgtgcggcctttcatccgcttcatagccaagtgtacggaggtcacactggacacgttgctccttgccaccaccgagtactcggtggcactgccagaagcccagcccaaccattctgggttcaaggagacgctccctgtgaggccctaaccgccagccctcccttggcatccagagaaggcctttctagaaacagttctcccctggtagcaaaaggaaacccttaaacattctttacctccagatgtttttcagttgagaaagaaaactaaattattaagcctgtcttcaggataatttatagttcagccaagttatttatttaatttttttttcttacttttttggtgagctagcagcgaccgagtggtgctgcgaccacaacacctgtggtgatcccggaacccagtagggcagcagtgcttttctaatgtcctgagcctgggtgtctagacagactttgcacgaagggcagaggcagagagatctgtgagacggaactcagggccacggtgatcactcgggtgccttggaggtcctgagacctcagaaggctgcaaccttgggcagaacctgccctgtgctaaggtggggttttattcctgagaggctgtggcagcagcttctactggcagcccagccctttgccagtaggaggttgcagatttccgaagaccctctgagctattaacttgctaacctgagtggcaggggatagcgcttccctgcccagactgttctaagggtggagggcaggcagaagggctttcccttatctttgccctatacttcacttgcatcaactgaggctagccaagccaacctaccccctcactccacagagcaggtctgccttcacctcccactcagtcttctgaggacacgggaggtgacgcttggcgggagaatactacccagcatgcaccacacacaaggcacctgccctaacattacaaaagggtgtatctgagaaaccgcatcaaccccaaataagcagttctgataaaagactgaaaacgggcaaacacctgtgaccacgacccagcctttccccctttgtcttatgctttgaaaccctcttcccatctgatgccatcacagggtccagtgtccccactgccttggagtggccttcttctagtaacttgtaaagtgatggatggtgtcacatctgatagatacatttccaagttgtca

SEQ ID NO: 30394 - DNA, 1211 bp, Mus musculus
gaggctcctaagatgtccaatgctgattttgcgaagttgcttctgagaaagtgagcaggactctgagatggagatgccttacctgtcctcaagctggccgggctggccaccacgggccctggagacggaagggctgggcacttgcctgcgctcccacagattctcctctggtgtggatgggaagggagagcctatggtgaacatggcggtgaggagtgttccctcacattgagggcggaggccaaccgctctacaggctgtcccaaggtacgttagtgtcctaacaaggagggacccagctttcgaggcccacttgtcctgatgctttcaccgcctctggccccttttctacgaaccccctcccccagccctgcacagcacgtgtgcccatcactctgtaagtgtggaagatggaatgggagagcttgtcactcatcagaatggcctgtcgagaagtgcgggacgtcacagaagacacgtgtgatgggcttttgtccaaagaggctatgagtttttctattatgtatttctaattgacactgtttaatgttccctaaaagtggaatgtctgcgacctttgttcttaggaattgtgtgccagccactctggaccactttctttgcctgatgactggagccctaagccctctgttcagatgctcacttcgaaatgccatgtctagtacaaagttgagtctccccattgagttttgtttattaaactgaagttcttacagaagccttgtgcattgcagctgggtgtgtgtgtgtgtgtgtgtgtgtgtgtgtgtgtgtgtgtgtgtgtgacatagtgtgtgtgtgagacagagtgcacctgcttttcctcaactgtgtgttaacagcttgtgcagatcagtcctgtgtcactgctcatatgactccgcagtgacaggctggagtttctggcagcctggcactgctgggaagagtttacctctcaccttgagacatgcggttgctgccctgaaagcccttcgtcaaggggaagagagagcggtggggcaaggactcactgtctaaaagcaccttggagggaaatgtgagggggccgtgtatgcgtgctggatgccgactgtgtgtgctgttgtgcccatgatgtttgtctaggtgttagcaatggaaccgaggccttgtgcaagctagacccgttctctgcatcgtagccctcggtctgcatttaaagactcgga

SEQ ID NO: 30395 - DNA, 1213 bp, Mus musculus
tggggatgggggcgggggaggggctctgcattctgctgccgggtgtgggaacctgactgtgcagggatgaccgacagtggatgtttatgttcttggtttcattgacgcagcacctttgctggagtgtaaagtgagccccactgaattgagcgtggagacggtgcagtttgtatgaggtggggcaggcccgatgctgaaggagtgcagacctggctaactgcctctgcttgtcttttgaatgcctgcagagcagccttccaaacgcagaaggacggagaacagtctggcctctggagaggcttcggctatgaaggaagaaacagagctctccgggaaatgcttaacgatagatgttggtcctccttccaagcagaaagagaaggcagcctcccttaagcgggacatgcccaaggtggctcacgacagcagtaaggacagtgtcaccgtgtttgtcagcaacctgccctacagcatagaagagcccgaggtgaagctcaggccgctctttgaggtctgtggggaggtggtccagatcaggccaattttcagcaaccgcggggacttccggggctactgctatgtggagtttggagaggagaagtcagcccagcaggccctggagctggacaggaagattgtggagggcaggccgatgtttgtgtccccctgtgtggataagagcaaaaaccctgattttaaggtatgctttttgaagaagggggtcttcagggtgggctgcccgataggcagtgctcagcgctggagcccatgagggctgacagcggcaaaccttgcgaggcgctcaggctgcctcgtggcttggtcgctctgagccgctgcctcttggttggtggtggccacagtagcatttgggaggatggctgctttccttggggtgcttaagagggtggcaagagtggccctcacctgtgttcagtggatggccgtttacagaggtgggatgcccaggcgattttgtcacgtgagtctctgagaccagaatggctcagctgtgcctgcgcaggacacgcacatgctggggcgtgtctgcctgaaccacgggctgtgctgtgtttgcaggtgttcagatacagtaccaccctggagaaacacaaactcttcatctctggcctgcccttttcctgcaccaaagaggagctcgaggacatttgtaaggcccacggcaccgtcaaggacctcaggctggtcacta

SEQ ID NO: 30396 - DNA, 1199 bp, Mus musculus
agccttccgcacaccacagcgcttgccccagcagcgctcagtccgtgtggctgaactccctgtgcttcactgtacccttccctgggtctccatctctgttgtccttcagttctgacccagcatgcaatgaaggtccttctgtgtgaaagggccctggtgaagtccacgcatcagggatgcgtctctgggctgagtccggtgcctaggtcccctgccctgaccatcttgcgctaccctggcgatttcttccttgaggaagctaggccacagcattcttttatttatgttttagtcttcatttcttttgagacaggtgttaatgcgtagcccaagctggcttcaaatgtgtgactgtcatgcctcagcttcctgggtgctgaggtgacaggtgcacacgtgctcatgtcacccggacgtgacgagagacatttccagtgtgctgtgctgggcgtgtctctgatgctctcgagttacttttctcctggctaaaccctgaaaagaagcaacctaaggaagaggctgagggacagcccctggtgccgggctgggtcggtgtgatggtgtgcttatggcagggtatctgcttaccgcatggcctgagtcagggaccagtcggggtgcagggttgggctagggttgagctgtagctctgaaggctctcctctctcccaggcctgccttctcagcaggggctgcctcccaaagtttcagaacttcctaaaacagtgccagtagctgctactaagtgatggaacccgtgagctcgtggggggagtttccgttcaagctctgacactgaggaagtcttccaggctgtcctctcactctggaattctttgtcataggatcgacagctgaaagttaaggacttggttttatctgtacacagccgtgctgtgcggaactgcccatggacagttgccctgtggagtcggtaccttctggccatggagcgacatggactggaccatcaaacgatttctggtgtgaacgtttgtgtgggagcgtgtctgagttatgctttctgagtgttcttcctgtgtagctcactgtggagcccaggcttgctggggtgacaggcacgagccaccgtgccacagctctcagccttctgtctcctctgaggagcagagctgtggcagtgtcgagccagcaccccgggtctgccttgcagcagcagaggctctgtggcctgcaga

SEQ ID NO: 30397 - DNA, 1133 bp, Mus musculus
tcctgcttcaagtaggagtccagacgggcatgcacaggaaggcagagacagccgcgtccgagggaggcttagaaatcaaaatctttaagagctgaaactgctgagatccagcagctatgaaaccacccacgctaacatggcatggtggcacagggcacacaagcctgtaatcccagctcagacaaggaagggacaggaggcttggggtgtgatggtctccctcagctacttagcaattgaaagaccaccccagactgcatgagaccctgtcttagaacagtgtggaccttcacggggcccagtcctggatgctcacaacgccagccagctctaacagagccacctgctccacaggatccaggcgttctggccgttgagctcctgggggccagggagacccacacctgcttgctctgggggaaaatggctcgaaggaagttggttaagaactagccttggagaaaggggaagtgagactgggcacatgctcctggtatttcagggctctgaactacggtcagacagtaggaagaccctttctctgaccttgaggcctcttgtctgagggagaccggctttccttaatgcataagcatgcctctgcctcttcatccatcagaggtctcagacccccaggcatcctcaggcagatgctgcccagcagcctaggcgatgcctgccttcagtgggcagtgagcattcttgttcctgcttacacagccaggaagcccgggttgtgtccccgactagagatcccttggtacacagtggcagccctgcccaggaattgtgttgaattaattatgtagcaggagttccctcagacagcctatcctgaggtgtgttctgcccacgctcagcaaggtcaagttcactgaaactgtactttaccccgccacacttcaggtggaggaagccctgaccatcaaaaacaccgacatcgccaaggagctctgcctgccgcctgtgaaactgcactgctccagtgagtctgccccacctgccaggcagcttggatctgttcagagtctgctgttcccaccccacggtggccgggcagctgagacaggcagctcttcccccaccctgcgcttccccagtctgcctttgctgtctctgagtgtgtctgcagt

SEQ ID NO: 30398 - DNA, 1172 bp, Mus musculus
cagcctttcaagttctgggacgacaggcacacactacctcaccctctggcttttgtttttaaacaactttcatgcaaggcagggtatggccttctctctacaagagtcctgagcctggctttgcaaaactgcagggcagaccctggaggctaatccctttgtccacttccagatccacactgtgcatgcttgacctccagtctttacctcatctatctcacctcatctcctgcctgaccccgtagctcaccctggagtgtcgcttttactggagggtatgtggtcatggtctaccagcctgtttactggctggcctcaccatcccatggacaagggggattgtatgagaccaaggctgctgatcaacctgagatacaggcaaaggaaatctgttgggcaaaggaacagataagggagaaatccattggggaatgaccctccctgtctggcgagtccttgactgttggatttttcatggagcagttaagacagggtcttacttttttgttggtttggtttggtttggttttttggttttttgagacagggtttctctgtgtagccttggctgtcctggaactcactctgagatcaggctggcctcaaacttagaaatctgcctgcctctgcctcccaagtgctgggattaaaggttcgagccaccactgcctggcgagtaactttagcccaggctagcctcagacccacagtactcttcctgctttggcatccccaccactaagattaaaagtgagagccactacacccagttatgtagaaccctgtgagaggaaaagcctcgtagccccagagaaaggaggatcctgaggccaagctgagctgtggagacgtggagaggttggggagtatgcacaagaatgcatgtgactcacacacaagcacatgtacaaacacacgtgtacatgcatgcacacacgtacacaaatgtgcatatacacatgtatacacacatgcacacatgagcatgcacatgtacaaatgcatgcacatacacacatgagcatacacatgtacaaatgcatgcacatacacacatacatacacacatgtgcacacaagcacacacgtgtgcacacaccagcatgcacacacacaaaaaacactctatgcataagctccaaaaaggtgggtgatttgcagttcctgcccct

SEQ ID NO: 30399 - DNA, 2360 bp, Mus musculus
tttccaagttggagcagcagctggcgaagatggctgcctgaggcccgcccacctccacggacggtggctgctcctcctccgcgcactcccagggagggcagagagggagacactgccatttggagacattccatgtcagatctgtcagccagcgataggccacattccagtaagaactcggttcctctcccaaatttccgcaaacctggaagctgagcttttcgtcagggagctttggtgttcggcaggtctgctgacttgctgagctttcctacgtttgaaatgccagatgttctgaattttagagaccaagccccccacttgacccagcgtcctcctcacacacctgatgaccgggccagcgccacctctgctctgtctcttcctttttaatgttgccaaaaccgaaagtagcttttttttctttgtatttttctactttgcagtatttgtggggtttctttctttctttctttctttctttctttctttctttctttctttctttctttcttttctctcctcaatttaaaagggacagcactgtgtatgtttataaactaaatgaagatgagatgattattttgtataaacactcacgagaacaatcagtgcagccgcctgcacagggctggctcactcacagcacaaacctgggcgttagtctaacgactgtgcagaaggaagacttgagaaatcacgtggacccaccacacactgcccccattccattgagtcttcgatcaaaagtcctgtctctctctctccttgctctctctctcctagaagttgggtggttgcacagagggaactcggtgattatactctaacccgaactagctcgcgtttctgcagttttgttctccacagatggttgtgcctgtcccttccagcagtgtggttcccttccgggcagtttggacaagggcacccaaggcgagcggatacctgtgtgttgacagtccttgtctacagaggcagcttgcctggcccttgggtatagtgtggggcttgaacccaggcactgtgtgcacagcctctgccccaggccctctgtttccctcgctcctgtcttccctccttactttgctgcctcctgtctcaagcgcccagccagccctcgagggctcttgaatgttgcagcggagggaaaggtccagaacagagtggaaagggaagttcagagatcgaccatagctggccacgcacaggccctctgccccaccacccagatcaggctgctacttgccagcactggacgtgccctgggcatgcctgctccaagggcagcagctagaccttagccctactctaacctcacagcctcatggtgcgtgtctatggaagcagacgacctgggtagtgtcagatggatcacaaaaggcaagccttggcaagtgttggtgctggtgtgggcccagtgctggctgccagcaaatgtacaggttatcagggcagagcatagtatggcagcagccgcttagagtgtgtggactgactgggtagtgttgtaagaaaaggttctctcagccaccgagatgggggccgctggctccgaagcttcggggctcctgagtctctgtaggtttctgtgtctgtcttgtggtttaatgttggataaggagatggagagaccatggctggaatgactcacactgcattgtctgtacgtgtgctacgctgaggactgtgtgaagattcacaaaggttctggggtccgttgaattaattacgtaacaattgtagaggctgttgatgaagtcagaggggctgtggttgagagaggcgggagtgactgtagtgtgtgcccacctgacacgctgtggtggcctctgtttccctgtggcaccggaggaagacagtgaactgctcctacacccactcttatagagtggccatagtgttctgtcaaaacactcgcttccgttttcagagataaaaggcattgattacagtcgtgtgctgtgcttctttctcgcctcactctgtgaatgttcaacaaacactttacctaccaagccacagccgcagacctgggttttattttgtttattgtttaaaacaaggtttcagtacctaccactcagacgcagaggcagggccagcctggtctacatagtgccaagacagccagggctatttagagagaccctgtctcaaaaagataaaaaagatgaggtacaggtaccccaggctgtctttgaacttgctctgtggctgtagacagccctccctgcctctgaatcctgagtgacagcgtcacacaccccacagggaggtgggtgtgttcaaagcagcattttcagtgaacgggaacccttggctgtgcttctgcccattgggtcctcggtgtcctgact

SEQ ID NO: 30400 - DNA, 1162 bp, Mus musculus
agtgtctctgaacctttgttatgtttacagacaccttggccatagctttggctcgctctttgactagctcataacttaatattctgtttaatctaaactctgtcatgtggctggtcacctctgctcagctctcatgaattttcctcctttgtgtccagggatgaatcttcagtgcttggctctatcccagaatcctttctgcttatgggatagatacccttctattcagcactttcctattggccataggggtatttatctatttatttttattggtcggtgatgtagccatacactacacaggaggttctctctacatcccaggttctttaaatggaaagtgatgtttgtgcatgctggtctgagtgctaggggtgattgtgaccacagtgtgtctgcccgtccttggtgttctggacaagatcttgaaccatggctctcaaccttcctaacgctgtgaccctttaacacagttcctcgtgctgtggtgacccctgaccataacattattcttgttgctacttcatactgaaattttggtcctgttatgaatcgtaatgtagtggatatctggtctgtgaccctgaggggctcagtacccacaggctgagaactgctgatctagatccgggatgaaagcattcaaaggttggtgttcaggtagtgtttgcagtttacggcaggagcaagcggaacctcctgcaggtagatgtgaacatcttgagctctgtcgcttcccctcccacgttacaaacaacagactctgggggaatgcaggcacccaccagttgtcaccatttgtctggggtggaggctcaacctgaacgatatgtgtccgagtgttcaccacatgcgtgcagtgcccacagaggccagcagagggcatcagatcccctgggactggagtcacaggtgtttatgttatgatctgtcacatgggtgctggggtcagaacccaggccttctgcaagagcaatagtgatcttaactatgaagccatctctccagccccctaatttcaagtcgcctccctgatcctggaaaattatcccaaactaccaggtttctttttgttgttttcttgagattgggtcttgtattacagcccagactgatctcaagccctcaatgtcctgcctccattctcagagggctgaggctg

SEQ ID NO: 30401 - DNA, 1205 bp, Mus musculus
gccgcaatgggaaactggggcacgcctcactgtggatcgtgggttctgaaagtcagcgtccacctcaagagcatagcttgacatcacgtggggaagcttccggttcctgtactctcagatgtccgggactagcttgttctggttagtacctgtgcttggcttcgatagaggaattgggtcccctggagctacagatagttgcgagccccctgctatgggtgcagggactagaacttacgccatctggacatgtccttagccactgggccgtctccagcatgtgtagtcctttattagtagtggggagtgctcaggaacttgacttttttgttgctagggctcaggccagccagctgagaggacagccacggcctgtcagccaggtcaggaactcacggtctgcctggagttaaagcatttttctttttataaactgaggaacgaattcaagacattcttttcttcaaagaaatggaacaagccaattaagaagcccaaaataaactctgaatggctaatcttgcacagggttcagacagttcctccagcttccacatccacaaaaggctctgtgagcccgcctgtgcttctgcagaccacgggagactctggccctcacggcgctcgcagagacctgtgtggcgacgtggttcttacttaggttagtggcctgcattagtcagtatcactccatctctgtcggaatgagagtgcccactcgtccttgactgcggagagagcctagtgggtagagttagcgtgaggacctgacttcggatcttcaacatcctctgacaagccaggctcagtgatgcttgtccgtaaccccatcactaggggtccgaggcaggaggagcctaggggctctctggctgccaatctatccaactggtgagcttcagattcatttggagacactgtctcaaaacgggggtgggggaggcaagagaagatacctccacacgtatacacacatatccctccagcccccccccccccccgttactatgcctcagtcacatgttggctttgggaggtgcctatcttttgggcctttctcggctatgattctgtctgtgtggctttgtcctgcaggtgagggtggtggtcagtcctgtgctatggtggaaggcctggctgcgagccccaggtcacttgacctgatgtttctgcccttctgggctgctgcctggtcactggagcat

SEQ ID NO: 30402 - DNA, 5033 bp, Mus musculus
gacctgtccagcgaggctgacacatccaccatcgctgactcgcaggacgccaagtgtggtctctcctcttccttcttgcccgaaccccagtctgcgccaagggaccccgctgcaacctctaaatcatcagggaaatctgccccagaacacttgaaaagcccgtcgagggtaaacaaaagctgactagctttcagctctgtaaggttttcatcatgtcctgatctactctcatgtcttgatttgtgttaatgacttcagtcttctgggctttccccacttagatcccgtgaggggggacacccgggtgtaggacctgggcaacctggaaactgtcagccaagagtcacattcagatatgtacacgcaagccagggctacggcttggttgttaagagtgtgtgcctgacatgcaccaggctctcagttttgatgcccagaaaccgtaaaaccaggcacggttgcgcacgcgtacggaaattccaacactggaggtgcaagcagaaggattagaagtcatcttcagctacatggtgagttttaggccagcctggtggagagaaaaagaaaatgtgtgcggacatacaaaatacagtttgcaacatgtcaaggaaccacattggcgaggtcactgcagcccacgatcccggctcattcccgtcctcgagggagaatcctcagagggcaacacaaggcctacctctctgctcactgtgcatttttgtttataaaacggtaatgaccaaggctcgttctgagaacaatgctatgtccagaagggattttccaagagaattgtggggggttttgggtttggagttttttttgttgttttttttttttgttttgttttgtttttttgagggtggggacccgcagaaatgtcaagactttgaacctgattgtcccaagaacagctaggtgatatcatcagaggaaagcacttagggagagtggccccgtctaatcctccatcctggtggggttgggtcctcagctgttggcttcccttcaagcttatgtcacccagtcactgagaaggcactgcgagcctcatctgctgctaacggaggttgtgggcctggggtgtggatcatcctgctgtgaccacacggtaaccctccaggatggctcagtaggaaccatctccacacttgctgagaggaaaggcagcgtcagcaacggatactttcttacaagtccctccccagagccagtctgagaggagagagtctattgaaaagctgctctgatgtttaccagagtcccttcccgtggagagaatagaatattgcttccttgtctcctccggctcccccttgctgtaatgatgggacaaaggaggcttggccacagcacaggtgtgagcacagattagctcaatgaagcaggaggcctgggctctgggttcatatcatgggcctcgactggtgcccatcatgaaaagggtgcttaaggattttttaaattttttttttccttaaggattttgaagagagacaagcagagaggcagaccagcagaaagccttgacttggtatttagccaacgatggtgcacagccctgtgaggtcacatatccatttgggctctgttaatgtgtttaggttttggttttttgagacagggtctcaccatgtacctccgctgtcttggaactttctctgcagaccaggtaggcctcggactcagcagcgatgcatctgcctctgtctctcaagggtttggtttgggtattttggtttttgaagtagactctcaccctgtagttcaagctggcttcaaactcacagcagtcctcctgcctcagccttccaaatgctgagattacaggtataatcccatcatgcctcagacttggttgtttacattttgaagggtaaatggcgcaggcttgtgatctacactcaggagggtgaggcaggtccaccatgagttaaaggccagtctgggccacaaagtgagattctacctcagaagtagtaaccttgccagagatggtgttacctgcttcagatgtctgctgcgagccctctcagaaagcttgctgatgccccaaggctgcttgtaacactgcaggaagacggggtttctatttgaaggctgcctttgctccttggatatcacagaccaactccttccctcccacactccaaacttgccagcctacccctttacctcttgagcagatggagtccttgtggagatgaccacagctccttcctgcagttggctggctcagccagacagctcagtgagaccacaaagtcttcaaggatatgttccggaagtatgcgtatgggggtcctcccacactggttagaaccaacggagtccggatggtttggaggttgcagccaggtcccttggcacagcctgggattcgggcaagaaggaagaagagagaccgccatcctggtgaacgctctgggtgtctccaggatctgggccagttctctcttcattcgtctggggtctttgtgacctctgtctcagaacatttctccctggcatgattttttttttttaaatacatgtatgttattttatagggatttattttcccactactgtcaataccagtcaccttaaaaagcgatcatccacttattcctgaaaccctgtgggtttcttccactcttccctcagccaacaaaagcaaaaaaaaaaaaaaaaaaaaaaaaaaaaggccaagtttaatgacatcgccaagttcaatttcacatggtgggtcaatttctgtgtcaaaataattccttagatttggtaatgataggcttccactgtgtttcttaatcccatctgcaagagcgataggatttttgaaaactttcattttgaaagagtcaggacaggaggatgaactcaggcaggcctctcgctcccagcagactaccttacacctgtttgagaagcactggccaatcagccaacggtgcgaacagcaggggggcggatccccatcttcagaccggaatccctggcgggatcctgttcattccttggctctctctgtaaacacagtgaattggcatttaatggaaaggctactttggaactctccctgctaagctaagacggtggcaactcccatattgtctcaggaaaagttttgttccagctaggcttggtggcacactctcgtgatgccacgcagtggatcactgagtccagagctttgtagacgctgaccaccacccctcccccgccccgccaaaaataaaaaagttagctttgggagctgctccacacctggctattttagctttgtgtgtaatcatagcaagcagaggtagagggatttatgcagcgttgatgactgccattttcactgaatgcccttgttgaactaagagctttctgctcagctggatggcccgggaactttacatagccccccccccccccaaagtctgaaccatgtgggggccttgctctacaccaacacagaaggcttcctgaagtgtaagggagaagatactgggcagaggtgggagcctgatcgaatgaacaaagagccaggtgtctttctcagatcctcacccccatgttttcagtgcagaagccctaccaaccacacacagctcatccatgcggctcagccatgctggtctctccgaggtacccagatagctgcacccctctgctccccttgctcagcagcttgctctagctgaagatcaggcccagcatcctctgcccttgaagagcccagagggttctacaggatggaattaagttctgaaagattaggtgttgacagccagcctgtatttttgtgcacccatctcagggaccaccccggaaagcttgtgaatctcccactcttcaggagccatttctccttagcaagaacaagatcacaagagacatcacacatcacccctttagggagttactttctacctgctggcaaggttggtatgagagttgatttctaaccccaatgggctggctgatacttagcagggctcttgaggcacgttcaaccccttcagggtaaccagagtacctaggaccacttgcctgaccctagctgtgcagtccagaagagccagggaggctcccagtcctccccgtgttggctgcaatgtcactgctggtgagggagactcttggtcccaccttcccatcctaacggctgggttcctgctgatcataagaccagatgaaggtcattggtgttcccctatccaaagccctttgtttttcttactgtggaggtgtgagagtccagtgtgtatggagatatatgtacataagtgtatgaacatagaccttgtgtgtgcattatagatctatatacatgtaagtgtatcctactccatcagacctggtgtgtgctgttccttagcacacactgtggtctccagctttgcaaggaaatcaccctggacccatctgcaggagccaccaggggccatctggagaagggcgatcctttggcagtagacaccacagctcctctttcagtccctatcttagacacagcctctgttgccctggccgttggccttgctgcatgagaagacagctgcttcctcctctaccctgtaattattctttttacaattgagtgccttaataatggtttacaaatactgtgtatttatgcgcaaccgttcagctctcgtctttcgaggctgggtacttttgtctggtcctggtggttaagattagcacgtgagttcctccctacccccatccacttgtgttaatctgctctgcagttgacactgtgggtcctgactactccacagagcctgctagaaactcggctgcttggtccccgcaggccatgcctgcatgcatcagcacacaccgcagcccgaggtagccggtgagggacatgatttggtttgccaggtagcacaggggtggtgcaggaccagtactccctgaaccacagtccaagacctccccttagcccctcaaggtcaccctctagtttatagaggcttgccaccccctaacacccttcacactccctcctcctcttctgcctgtgtcctgagctccttgctgcaaatcatggg

SEQ ID NO: 30403 - DNA, 1234 bp, Mus musculus
ccaagttgttactatcattattaattattatcgtttgtggcagccgtggttggttttatccacttttcttttctttctttcttttttttttttttttaaattcttaggaaccaaaactgaatttaataaacacttggctcaagtttatttcctcatcctgccaggatggtgggacagatagaattaaggacagttgggctgttttgctgtgtctgagggacatggacatcctaggagctctcacctccctttggggcgggggggggggagggacacgacgacagggggacccttttgcctgtgcctttgcatccctcagcagcccattccctgagaaattctcagctttgagttgttttttttgttgttgttgttgttttgtcaaaagaaataaaagtggctaactaaataaagcttacatattgtaaagccccctcctcccctcccccaagatgttacacactgaggcgcaggtcagcagtgcactcaggagcccctgctgttccttaaagacctttcctgccattagacgcctgcagtacagccctgcctacagacctgaaggctttagagttggttgctggaatgtgacccaaccagcttgggagagttaggggctatgggatggggtctgctgctggcgactgtttattcctttggaaacggtgagggatatcctgtctgcctgcgagcttaattgatacagcctctgggagttgacagttgtttctagctactgtgtgtccctcacacacctcgctagcagagcctccaagagggagccatttctgaattgcctttccaccgctacagaacccaagccgccttgcgccctcttgcgctccctcccccccccccccctgtggacaggtcccatcctgagttcctctctccttcctgcctcccaggtctgccctgcaagtgcttcacaaggcctgcgaagtggcccggaggcataactacttcccaggaggagtggcgctcatctgggccacctactatgagagctgcatcagctcggagcagagctgcatcaatgagtggaatgccatgcaggacctggagtccacgcggcccgactcccccgcgctgtttgtggacaagtaggtgctgaggctcctcccacactgatcaacactgctccctctcagggtctggcttccctcacagccccttgactgagaacccccttccagaacaggtttaacctgaacctgtgcctgtgggccagagt

SEQ ID NO: 30404 - DNA, 1209 bp, Mus musculus
tgttgtgcttagttactgtcttgagtgctgtgctcagtaatgctctcccgtgttctgcctaaacactttttttttttttttttttttttttttggtttttcaagacagggtttctctatatagctctggctgtcctggaactcactttgtagaccaggctgggctcaaactcagaaatccgcctgcctctgcctcccgagtgctgggattaaaggcgtgcgccaccacgcccggctcctgccaaactcttgaagaagctctagaaacacgtttggcctgtctttggactgtgtgcatttgagtgatggaaggaagcctctcactttgatcgggaaacatgctatttgtgaagatgccgtgggtggtggtggggagccctgacctgcagaaaacaaagtgatggagagtacagctaccagagccttgccagtcacggtagactgtgtaaagggctcttcatgcctggctttgaggcagcttgtggcccaggtcaaggttccagggccggagacactggctcctgggggcagtaatgggctgctttttgctgcacaggctgtgtgtgtaggaggagagccagtggaatctgcgtgttgggtgcaggcccggaactgggaggagaacttgatgagggtggtggggcccccagagcctttgcagcttcctgtgccctgctcctgtgacccttccctggggtcagaattccttctaccctccacccgtccatcccttcctctctgggcactgggccagggagagcattgagctagctttgtctttaattgcccttaattagcaggatgcttgaagatgttttatagccgagaacttagaactgtgataagaaactgtgtctgtctgtggtcccttctcactaataaaagagaaagtttcctggtttggcactttggggaggcctgacataggatgggggttggtgtctctgtactttgacacctctgtgttccagtgaagtatttgtgtgtggtggtgtaggcctgtcaccccagctctctagagactgaagctctctgaggcctacagagttcaagggcaactggggttacattgcaagaccctgcttaaaaacaaagacagccgtggggggaggggggagaactttcgagcaagcgttgtgcctccaggctggtagcccagggtccagtcagtctgtccagatgagtcagttcttttggacccacagacaag

SEQ ID NO: 30405 - DNA, 1195 bp, Mus musculus
atcagatggggagtttggcacaggctagaccatagcaatgactttggatttttttgttgggttggtttgggtttttgacacagactcttactatgtgtttagcaagaacttggacttaggatcctcttgctcctgagcgctggggtgatggcacccactatgcctggcgatgtggggaatcttaagtcagatgggccttactctgtagcccaggctgtccttgaactcaagcaatccttcctacttcagcctcttagagcgaggactatggaactatgcttttgggggtgggggtggagtgctcccatacgtgccatacgtgctgcccacagctctgagaagccgttattatctttctgcatctcccctcctcttccccctgcaggtgatgctggaatcttccgtgtacctgaccctggctgtctacagtggctgctgcctcctggctggcgtggcctcctgctttctgcccatagagaccaaaggccgagcactgcaggagtccagccaccgggagtggggccaagagatggttggccgagggacaaacagcgcaggtgtccccaggtcggactctggctctcaggagtagtgacccctgggagttgagcttggagcctagagagctggcagagcccagctgggccacttatggtcactgccgacatcaagaacttcccccccacccccgagagggcgatgtggaccgacagggttttgtgtcttcactgtgtttgaccatgttcatcatcgagggtcatgcgccccaggaagatggggcagcattcactccagggggttctctgtggtgggggatgggctgcacatcaccgtggatctgcatggggaagctgctagtgagggagggtcccagggtgctcagagccagctgagcagatgtcacattgctacccagtcatacccttggagagccactgcccaaaggtctccatagatagtctccgcccagacccctgggacgcccgccattttgtccagttatgtttctcctgcaccctggcctcaggaattctttggaattaaggcaagctagctagtgtctggctggagcagctcttctggagcctgagactccctcacccccaccccctgctgctaccttggctgggcccctctagatgcctctccacaacctgcgggggtagaaactggccaatgaaagtgctttggaatt

SEQ ID NO: 30406 - DNA, 1794 bp, Mus musculus
tggctgtgggtgggtgtagacagtagggcagaggtgggagcatgggtgtggggaggagatgggaggggagggggagtactcccaggtaaagaaagggcttccaggggccaggcagtgagactgagcctggtgtgtcacacacatctctggctttgagggggagagcactcccccagtgtgatgtgagcactgggttttgtgaattctgggcatacacacaccttaggtgggcggggcggggagttcagggctggctggaggtgtggtgaccgctttacactctgaccttttacagaagcgtcaccatgtcctgcagacagctcacccctccccgctgtcggtgcacagagggttcctgggatgcagacatttttctaaagccaatgaactgctccagaagtctggcaagaagcccatcaactggaaggagctgtgacccgcccacccgcccacaggccgcatctgtccacagcggtgctttcagctgccgccgcagcttttgctggttaagttctaagttccttgtgtgagtggagaaatgacacggatagatctctataggaccatcatgagccaaccaggacacagaaactgcagctctggcaggcagaacctcttgcctggcactaggtttgaactctccaggcccggccaggtggctgttgagacacacctacttctcagaccagcggacacaccctcggtcccgtgtgctgctctggggtgggaggaaagatctgcacctttggaccagcagtttggtgcctgctgctgtccgctttatcctttagagttagagatttcaaagtgtgtgtgtgtgtgtgtgtgtgtgtgtgtgtgtgtgtgtgtgtgtgtgcttcaaaaggcccttttgtctggaaaggaacccttgggtgttggtgagtcctgagaagtctggcttacaactgaatgagcttcctgatcacaaagggggcggggttctccctgggttcacagtggccgctctccaccctgcgtcttgcctttgcctttgcaggctccgaagttgagcgaagcaggaatgggatagatttgtttttaagtgagggtgggtgggtttcctggtggcggtggagttgtttcctcctctctgcagacagcagactgccgcgcttggtgtgtgtggtgctggggatctaactccaaggtgctgtttcttaggggctgagttcacacaagttgtctttctgcaacactggagaacgttatttttttttacaaggtaggcaggtacagtaatttctttttcatgcttttctgaaagacaatcttcactgagtttacaagctggattccgtgagtccagctggttagagccgtggcctgcctgaccaggctaataaaagatggttgacaattggcggtgtgccgactattcttcagtgtttcacaagcccgagctcctgctgtcaccatggctaccactgattgcaggaagggcgactgtgtccttgcgccctgcttgtagctctctgtggttccacccactgcccgccagcagcttgctgcactgctgccaaggactggttggccagagtaggggatctgctgggacccaaagggacagcttcctgacgaggaaagtcacttctttgggggtgttgttggcttgcccatccatccttgccaacgtctgccctgtcctgtgagcttctagactcttccctgggaatatgaagttcaagtgtgactctgacctgttggtttgctgtttaggcctgggttgctgagttccagcatacaaaacacacagcctttacatttttattgaac

SEQ ID NO: 30407 - DNA, 1218 bp, Mus musculus
taggaatggagaagccatgtatacactgtgtaaatgctcatgtgagaatgacctagcggcacaatctgacttgccttggcctctggccttccggttactgtttttggcagctctctctaccttcctctatcctcaaaccttgtgcctgtagctttgtacttcagctcccagggataggaacagacctagtgaacattccacggtgcctgatctcgctggcaactgagtccagctagggcctgacccagcgtcagtctccaaagctctgcttccggattccaaacactggcgtgaggggcagtagtcagcacttctagatcaccatctagtgagtcgctggtgtagagtgaacttttactgcacactaagggctcacaattaaaataaaccagaatagctttttgctcatggtaaccaagttcagtgtctgtggggcccacagcctggcaggtctggcccagctctctgtcacctgctgtgggagatggaccgtttgacctctctggaggctgagaccccatacctgctgctcagtgctggtaatcagccctccccagagtgcgtgccggccagagggctccacccacagtccctggtcatgtacgcacatcacactcttcctgcctctgcactatgaaaaccatactgggagttttagaagtgctcactcttgtacgagtgtctgcggacatgtgtaaaataaacgttaaactctgcttctactcacgccgccttctggtcttttcgagatcgcctggcccagtcagcagggctactgaggtgcagcaagggcaaggctgccacatcctgcctcagagtctgtccttctctggagggctgagggatgggctggtgttagattggcatcagaggccccgactccccccgggatccgggagcctagcccatccctggcagcatgcgccacgggcagccgggttgagattgtgcctcttgacaagattttctttactcctgggtctcagcagcttgccagaggtacagagtctgccgcccaccctacagtgacttcttggtgtgcgcctaaattgggttccaccagggacaggggaagactctaggttggctctcaggaagcgactagatacagcgccacctgaaacctggctctgccgtagcatgggctccttgatgcggctgttctccaggagctgccgcattggccttgagcgtggataactggaggggtccatgctt

SEQ ID NO: 30408 - DNA, 1593 bp, Mus musculus
ccatggctggtctgtgtgaagctgaggagcagaccctgcccatggaggaagtcggatacccagaatagctttgcaagctctctcccttcactgtcctgggctcacctctcagttacccagagagctggggctttgcttatccctgtcattctcccacccgctcagaccccaactccccacccctgccatgaggaagatgtcactgaggacaggctctgcttgcagccgtgaatccgctggaggccgaagtgtagtcaagtggaggacatccagggagcactgtggactccctgggattgcattgtcagcctaggagctggggagcctgaggccctgctgagatgtagtgtgaggtagtggccatgtgcagccggctaacgttcccaccatgtattttgtggggcacaggttgagttccctgaagcccgcatttatgaggagaccctgaatatcttgctgtacgaggcccaggatggccgaggacctgacaatgccctcctggaggccacgggcggggcagctggacgttctcatcacctggacgaggacgaggagcgggagcgggagcggatcgagcgcgtgaggaggatccatatcaagcgcccagatgaccgggcccacctccaccagtgagcaggccgagcaccctgccttctgccctccctctgctcctgccccgccccctcagaccctgtgcaggctttggggcacctcccacttcccctggagtctgagacacttttgtaacaagccagatgattattttgttatttcttgacaaagtagattgcttctgtgttggcccgggtgtgcaccccttctgaacatgctgtgtctggggtcccacctcccgtgagagcctggagcccagccttctggggccttggaggaaaacgtatgaatgagtttggcgtgtatgtgagaacctttgttgcagtatttatttttatgggtgttgactacctattagggcctcttaggtgacactccctcaaggacttagtttggcagttgggaggaactgcgtagttggcagccggccaccaaggcgtccttgagcagcctggccctggtgtgttctgagcaggcagtctttgctctcctgtgagtctgctctgtgtgcggttttgtacagagccccttgggcacagtggaagggggacgaagtgtgcttctggcctctccctggttctcagcatggcaggcacactccaggctgggagcagaccgattcctggcagttggctgctctctcggctcagtccttttgatgtaccccatccaggaaggggcagccatcgctgctttaagggtctactcctctcttgcatggcttccttttctcatcaagggggtgccttgccctttggttaggaactggggtgaccgcagacactggcaccaggtgaggacaccactgagtttgcagcagtttccctgcagaatagagtgggcatgcagatacctttgggtcttgttgtgttcaggggatgtgtgtgtgactgctggtgggacgtgtgactgtagggcgcaggcgctcacgacaacagtcagttacctcgagtctgctttgcgcagaggagtcgtggctga

SEQ ID NO: 30409 - DNA, 1099 bp, Mus musculus
taagcgagaacagcagcggacagcagcggcccggcccgccactgtccatcactcacagaccacacctcagctgggcggggtggtgggggggcattcacccatgtcataaaatccagcttcatgtcgtgcggttgagtgactttgacacatccacagtgtgcaacgccagtactttatagcatttggccgtgtcggcaaatgaactgtctccctcatcttcccagctgccagcctagaacttgctgcatcttgtaactgatccctccctcactgtgaggtttttagggttcgtgagcactgtagcaccatcaccgtgccgtgcccttacagcaaacgccgttttattgtccctcctcagcacggtctcctgggtcctttgcagcttctgtctgttatagatgcggccgtgaacatgaaagttccggcgtgtgtggacatcagtggccctgtctcttgggtctctgtgactctggttcagttcctggggactgcactgtttgaacattgccacccacaagcagtggatgtttctagagcgcccttggctctcaggagggaacgtgctctgtaaaggagtgacttgagggatggagagagataatgaggtcatcacggacccagaagtcttccttgggcatatgcatccaacggggcctggcagcaaaagccaggagctggcacccagaggccctgcagtcagtgttcttcttaggtgtgggtggagcagatgtgccaccgtgggttaggggcacagctgccctggagaccccactctgccacttacacattctggagcagcagcctctggtacctttctcaggggctcactttcagtagagatagagaaggggccggaagggctctgagagcaggagcaccaggcggatatcagcggggtggccatctctgctcaatttacccaatgctcttctgcagcaattctgacgataacatgttgaaaaacatcgaactgttcgataagctgtccctgcgcttcaacgggcgggtcctgttcattaaggacgtcatcggggacgagatctgctgttggtcattttacggccagggccggaaaatcgctgaagtctgttgtacctcc

SEQ ID NO: 30410 - DNA, 1153 bp, Mus musculus
gacttacgcgaaaagtgatgtggtaattaaagggagcattagcatcttcccaggttatccgagagaggaacgcattgagcccatgccgcagccctgctccctgcctgtgcccggggttctcttctgcacccttctgtgacaggtgggagctggcaagtggctgaactgcttcctgtgtcttcttccctccctcaccccaggcctcctcaagcgtgcgtttcagaagtcggcttcggttcggaacatcctcaggcctgttgggggccgccgtgtcgactccgctgaggtgcggaaggtctgcaacatttgcgtgctctaccagacctcgctgacgaccctcacccagatccgcctgcagatcctcacaggtcaggggccctcggccgctgctcccacttccaaggttgtcaggcagtgtctcctggaacgtgtccatggagccccttcccctggctgccatcctaagtcctgcacagggtgacagggcgtgcagcagtaagtgcacagtactcctccactcactgtcccactctgtctgcgccctggagcgccccaacctcgagtctgcctgcctctgacactgctgctttcttcttgtattcagtaagctatcttagtcttgctctgcgcagtgttggattgctctgtttctgtctatgtttgtaaactgtaagctttctgaactcttgggtgtatgtggttcaggttgcgtaaacagagcacccctgtggaaccagtgggaccgtcaggaagcaagcaggtgtcagtcctgtgctgtttgcttcttcacgggcattcagtttgctcgaggcacacttaagtagcctgacaggatctccagagccccacccaggcagcaggcctctcccagacaggcctcatgtgagactaggagaatggctgatctgctgagagctgttaggtcctgtgcaaagcgtttcacctccctgcatctacaatgtgcctggaacctcgggttaggcatcttagtcactgactagtgtggaccgaaggtgtaccagtctacagcctgtgtccaggccatgcagccctgaaaggcagattggagggtcccccgttgtacctgttgccttgttgcttgcctggggctcactttggagtttctgccgcagtcatctcttgctttcctggt

SEQ ID NO: 30411 - DNA, 1148 bp, Mus musculus
gaaagagagagagagagagagagcaccgtgcatgaggtcctggcttcaagctgtagaggacttgatagctccagacctaggctcacggccaccacagcatctgctcgcccaagcccctcaggtgttgccactgctgtcctcctgagaacagagccacttgtctctaactgcttctgcttaccatgactgtgcagctagagaccgctctacaccgtgctgccacacaccaggatccaaaggacatcttctgatacagagcaagttgaaagccagctcgggctggtggagagcctatgtcagagatatataaaggagacctgtgttgtgggatgtcactctgagtggccctacgagcccctagcttgttcagtgagccattacttgataagctttagttccagagagtggcaccatagagacatgtgatgtgtcctgggcatgtgtgtgggacaagcacctccgctacccctagttctactgaacagcacacggagggagaagagcccagcatggctgcccctctgaccctgccttgtatttgcagtttgtgaccagctgctcccggcccccgctcctaggattcgcctacctcaagcctccgttctccatccgctgtgtggaagtatcagatgaccaggtaactgtggccacgtgttcccttcctttgtgctcagtttctgccatgcccaccacacccccacccttgcctccatggttctcagggcatgacagccagccacccacagagggcactgcagagccaggtcagtgtggctgcagcactgtctgaggaccctccttggtgaaggcctgtgaggtgtgtaattaggacagtctttcatggctgctgatctggccaggttcaagggccaagcagagggtaggaggacggagcaagtctgcttcactcctccctgatgacacgcacacccaggaggctgcctgttgactgcagcttaaaagagaatgccctaggactctgtccagtgaggtagaagcatgaccatgctgttgttcagatgtgggtgccctgggaaagcatgctggtctcagggtgtccctgcctcaccacctctctgcggccggcagccttcaggctgtgttcccatgggtcagacactagatggtcctccacttccaaattttgg

SEQ ID NO: 30412 - DNA, 2002 bp, Mus musculus
gagtgtggccagggtacccacagccctcagaccctctcaatagccatgagacacccaaggttggggatgctacacagtgccctccatgcactggggacagagggctgatgaaaataaccccccagttctgccctgtggggcctgagacctgggcctagtgattacagagcaactcctggagattctgtgaggctttcttctcttgccctctgaggaggacacaaggcctgtgcctgtgagctcctccttccgttctgaaaactcaggtacggcctcgccaagcctctatgcacagcaaagtccctgcctctaccctgtccacagtggcctcttcccaggcaaccaagcccagctcctgccagggaggccactgagcacagtcagggtctctcctatagggatccaggtggtccacaccacagccctccttcccaagtcctcagcaggccacgctgtcagggaacccttgctgtcagcccctggcctgtgcatcagtgtcctagcttgggaaagaaacccatcgttcccctggagaacagcccatttctggagtacccagagcctgctcgctctgggcatctgccccctattcaccttacggagaaccacatgagaccctacctacagtgcccagccgcctgggcagtactttattccagggacttcagagtccgtccttttgcactgacaggccctgggagctgaggatacgtcccacacatctcatctccacaccgcctctgttggcgcttgctcttttgtctgggacctcattctcttttcccacacactgcgctcctgggccctccctttccccatttcccttaagaactttctccagattcaggatgttgaggcagaggcccagggcttagtaacctgctagtagccacttgtctcctgcctcatcaggttcttgtctccctcccaccctgatggaggagtcctggcccctcctccactccgtggagccagcttagggctacagcgctcaaagcaagaaaacgccttccccaaggagcctgcacagtgggaagtggccgtgccctgttctcactttagcaaagatcttgggctggagcatggggtaggcccaggaaagcccctggggttctggaaggtggctccagcttcacgtctgccaaccatgtgtgttcccagcttgcccgcagagccctgtgccccgtgcacagcctgcacaggtaacacagagcctgagagttacagcgggcacacgggagagttagttgtaagcaccgatatcaacttgacccctttgtctttgacctagggctgtctgtcggtcacctagagtctgcttcccggcagttatgtcatagctgctgtttgatgacatctcagcagctcctggtggcgccagaaggaagcaggggtttttgtttttgtaggtaactcgtggactaagacttgtcagggctttattaaatttgtacttgagcacacgacggctctgttctggtttctacacagccccgtgcccagacggtttgggtcacatgaagcacccataggagcgggaagacaagagctgctttgacatcctggccttggagctgagctaggagttgtcacctgtgcccagctttgaagtgacatttcagagaagcatccctagagccagtctccctccgctccctcccacccggcagggtacctggtcaacatgcgtagctttgcagtttatgatgtatgtggcacctaccgaagccagcttgttcgatggggagagaaaccagatatctcaagatggatctaacctgaggtagctcagatgccccagtgtccccactaacagaaaaatactgcagacccccccgccccgagacacataatctcctgcagtgtggtgctcacccacctaaaactaaagcctggctctggctttgtaccttttagaactgaagttgccagcgcaaaaagctagcatgcagcaagcaggatattttgataggccagcaggacctgtgggtgctcgtgaaca

SEQ ID NO: 30413 - DNA, 1198 bp, Mus musculus
tggcacatggctcataggtaccacagtgagcctcagaagccacaagatacaccgcaggagggcctcactccaggggtgggagcgtccgctgagaaccatcccccaaggctgactgccctccctccccaggtctagagcaagccacagtggaggcagccaagcaggccctgaccagctgcgggtttgactgctgggagaccagcatcggcgcacccggagtttccacacactcagctgcagctgtaggggaccctgtccgacaagccctgggcctctgagaccacccgacacaccatcctaccaagaagcctctaagtatctggggctggagttggcctgcaccttctagactctgacctcatccgtgttctgccgtttctgaagccaggcagggattagttgtggggtcttctgagatggcaggctgacacaggaggccttcgccctggagctcctatgggcacatcggcctcacacaaactctctggctcctagccacgcactcttctgtccagccacgatgtcccctaaggaaccacctggccagcagctcgtggctcctggctcctggctcttgccctctctcggagatcatcagctgaggcaaggcatgccgactgcctgtctccgtgtggaaaagctgctgtgggggaaataaaaagaaatagtacaaacaaagccttgggccctgtgggaaggcagggctagtgcacgctgctcctcaacccttccagtgcatccgccctctccctgggagttctctgactgaagaaagacatctgtcttagtcagggtttctattcctgcacaaaatgtcatgaccaagatgtaagttggggaggaaagggtttattcggcttacacttccatactgctatttatcaccaaaggaagtcaggactggaactcaagcaggtcagaaagcaggagctgatgcagaggccatggagggatgtttcttactggcttgcttcccctggcttactcagcttgctttctattgaacccaaaaccaccaacccaggggtggtaccacccacaaggggcccttccccccttgatcactaattgagaaaatgccccacagctggatttcatggaggcatttcctcaaatgaagctcttttctctgtgataactccagccttgacacacaaaaccagccagtacagcatccatcactttgccgtgtagctca

SEQ ID NO: 30414 - DNA, 1116 bp, Mus musculus
gacagcagctggagccccagaccagcaccaggagcctgaaggtagcaggagggtacaggcccctcatcctctggaagcctacatgcgggaggagggtgaaacatacaaagccattcgtttggcagagctggctcaggtccttgagagagtcttggcacctgcctcggtttccctacctgcttctcctaggtggaggctgggctaattcctctggggacgagagtgagtcagtctggcctctggcagttcttcctggcaccattttctatcccttctgccaactgggctggaggctctggcttcttggccctgcacctgcatgcactgtggttaagaagtcccctacccccacccctgtcactgcatgcagcacctatcctgctgccgggggtccggtttctggcagcatctgactacaattagccccatctctctgtccttactaccctgtaatccaggcgctcagcactagccaaggtcttacccagttgtctggctatcctggtaaagtccaagggggagtatgatatgcagaggaggatctcgccactgtttctctccgtctgtccgtctgtccgtccgtccatccatccgtccatccaaccatcaggcctcagttcctgggctgccatctctcctgtggaatcttgcctcaccccaccctacagctcctgtctgtcagtgtggagccttccactcatggttcagacgactgacgaatccagccatgcagagtgggagtttaattgcagacagtttttacggatcatgggcccatctgtgctaccatatgcaaaagggaaaaaaaaccctcttttccctccccccctccctctctgcattgcaatcccaaactaaaccagaaatgctgttatgggtttttggccgaagccagtgtagaaccgtggttcatcgtgggaactttctgggggcatgaacctggcaaggccggtgtatcccagaggggtccaccctgacagtgggcaggatggcagaggcttggccagctgctcccaaccccaccagatcttcttacgagtctgagcctttgcatatgccatgggtgtccttagacaccggctggaggccctctgcatgacctctggctggatttga

SEQ ID NO: 30415 - DNA, 1738 bp, Mus musculus
tgcccagtcttggtcagggatggccctggtgcccagtgtgcaatccttggtccttccccactaacactgtgtctgccttcccccactgcccctcaaggccgccctgtacgcagcaccttacaagtccgacttcctcaaggcactctccaaggggcagaacgtgacagaggaggagtgcctggagaagatccgcctcttcctggtcaactacacggccaccattgacgccatctacgacatgtacaccaagatgaatgcggagcttgactacacagtgtaggcgcccggacacacagccccatgtgggcaccagcaaccccatcactgtgaatcaagctggaatcccccagctcagccagcccagcctggccagcctgggtctgcagggggcagccttagcttgttagaggtcttttgttttcttggttttttgttgtcttggcctattctaatggagcaataagcaccttccattcactcctcggctccccaagctcagccgccaccatccttccagtgtgcttaaaaccaattaacgttgctaactaacgttgctaacgtggaggaattcctagggttttgtcatttcctcccctacctagctcaggaggaactcagctcaggggcgacatacacctcacccagcaaagaagcccggcccatctggcccaggggtgtcttggatgcttgaaggacaatggaagtttgattggaagttcagcgggtgccctactgtggcctctgtttaaaaggcaagctggcaggagcccccctcacggggctcacacatccatctggcataaccagccctgttctcgttctctctctctctctcctctctctctctcctctctgtctcactctctctctctctcttctcaccccccctctgtcttttgtcagataatgttttttgggtttttttttcccctgaaatgtaccagcaagccttttcaaccaactgactaggcgcacacaggtgacccatatgtgactgtatttgcattcttctgcataattattttcttgggggttggctcttccaacctaagaaactgcctctcataagagccctccagctgcggagactcaagacactgccttgctgccttaaccgtccttctggagctgtattttttaaagtattggggtaaacctgccctgaaagaattgatgtatgtttaaaaaaaaaaaaaacccaaaaagcccaatgaggaacaattggtgatttttatgcagaaactaaataatccttaataaataaatctatattttgaaatcacacctgcatgtgtctgtggcgcttgattcttttagtattttcggtgtcaaaggttccagctgggggctgtgagagttaacccggcactcctgggaaggggggacctgcactgatgaaccaactgcctcctcctgactgacaggcctgtgggcacacctgtgctgcctgctcttgactgctaattgatgcaggatgccccgcccaccctgggcgctgccatcccctgacaggaggacctgggctgtgtaggaagctaggagttagtgttcctctgtggtctctgcctcaggttgctgccttgactgcactctatgatggactgtcctgtaaggcaaataaattctcacacacacacacatgccagctgattttggtcagaggtatggctgtagccacaaaaagcaaactagaacagggacccttcagccaaatccttcaagggcctgtcttctggtc

SEQ ID NO: 30416 - DNA, 1140 bp, Mus musculus
ccctgacccggtaattggagcttagcaactgatcggttagaaggctgacctgtgactcctgctctctgtcttttgggtcagctgtgtggctgccctagactccagcgggctgatgtacctccgccgtagaaacctcactggctccctgcacagcctccctcccatgctactgtccccagagtgtccccatgtcagctcctcttgtcactctgcacctcgctcactcaccacacacctccttccttgggtctggctggagtccacatgtccttaaggaattggcttagcaataactccacccagaaagtccttcctcctccctgtgagaaaatcattgtattctttgactcagagtaacttcagtgtccgtggcctgcatcatttatatttacttactttttaatattttgaggcccttctgtctggccttgagcttgtggaacttgtggtactcccctgcctcagcctccagagtgctggggttatcatccacaccatgcttgactgctttcttctcatgttaaaatctgtgactaagtcagaagacataagccctgcccatcctgtacttgtggcaggcattattaattttttaattttatttcattttttcgagacacggtttctctgtgtagccctggctgtcctggaactcactctgtagaccaggctggcctcgaactcagaaatccgcctgcctcctctgcctcccaagtaatcattcacaattctgtgttcttctcttagaacgaccgctcttgatcaattaaagttggttcgtgaggggacacctattttcggtcattgtctaaggaaaagccagggatagaggagcctaaaggaacagtttctgcctcttgtttcttgggttctaatgctggggacgtgttttcttcacttgtgactcttagcacagttaaatcagtgtccttagaatctggccttgcagatgcctgacacttactaagtgtccctgaaatgagtccaaaaaatggttctgtctctcttgatttaatgcttgcgccatggtggggagggaggaacaggggctctttagagtcacagaagcatctgcttcttgaagccaaagaaactgaggccggagaagttagaaagcttcccggggtcagacagccagtg

SEQ ID NO: 30417 - DNA, 2065 bp, Mus musculus
cagccttggtggcaaatcttttaaaactttctggcatgggcctccttcacaaaatttgatcattcggttgtcctagggtgggaacgtgggccttaaagctgtgagaaaggtgcagccaaggggcgagtgacatcaatagagagaggaggcatccgagtgggagtggggctttaaaactgtgagaaaggtgcagccaaggggcgagtgacatcaatagagagaggaggcatccgagtgggaggggggcggtccctggctttacaactggcttactttctgcccactgctgtttccttcagatggctctccccacgttgccctcttattggtccagccggaaacacatggatcttcgccagcgccagcatcagcaggaggaccagtttcgccagcagtgggaacagaacagtcgctatttcaggacctgggacatccacaactcgaaacagatcgaatggagctccaagatctcctaccagcggaggcaagtgtctgtgtgttgtcctgcccactggttcctaccacggttcggggaatgtagcctaggggcttagggactgtggcttgaattatctcctgatgatgctggaaactgtgctgtgctggggagaagtactgtacattttgttttttgttttttgtttttgtttttgtttgtttttttgatttttcgagacagggtttctctgtgtagccctggctgtcctggaactcactctgtagaccaggctggcctcgaactcagaaatccacctggctctgcctcccaagtgctgggattaaaggcgtacgccaccatgcccggcagtactgtacattttaaaagataaaccagaaggcagcgctagtgtcttctcggtaggtgtttagcccccccccccaagaattacatagaaatgtacatcaaactgtgacctggtgtgactgatgtccagggaactccttaacctagcatgcacgcctaccattgtgagaagatgaaggaggagaagaggaagattctggagctccggcgggagaggctcagagagcttctcctggaggaacaggacttgctggctgcggagctggatgagctcaggctgagcatgggcctgcgggagcaaaggctccgcgagcagcaccaggacctgaagtcagcccgagaagaacagaggaagctggtaactaccctagtccggaagcaggttgcagggcggtagcatccccgccggaacggacgagtgcgcctacggggttgttctcgggtgcctgttccgacgagatggtcaggtgactagagcccatggggaaaaccgcctccaaccccccacccccaccccccagagaggaaaggcttatttttagctcgtggtttctgagggtctccagcgattgtaatgaggaaggcatggagcctgtgaccaatggagctcaagttgcgctggctcaggaaacaggatgttaggaagagggttcagagacccaccacagtggactgttgccgccagctagtacctcatccccttaaacgccccctgcctcccctgaacagtgctggaagctagggagcagttgttttcaatgttgcttttgctgttttgaaacggtctcactgtgtagtcctggtttgcctggaactttgtttatagactagcctggcctcagagtcccagagatctgcctgcctctgcctcccacgtgctgggattaaaggtggatcaccggcctggaccagagcaagcctttgaaatgtgagccgtgttgagttgagattcagcacgtaacaatgatctgaacctcatttggtaacctgttagtgccagctggggtgtataaccacgttttgttggccctttgaggatgtagtccaggttggccagcagtggctgtcccacagcagacagaccagaaatcccgcagttgttgagcccatgaggctcagatatctctgcgcttcctgcctggtgctggagtctgggagggtttctgcagaacatctggctttcagtctgtgttaggaccctgaagaagttggaggtcattgtaacctcacgctttcccacctggcctctttgttccctga

SEQ ID NO: 30418 - DNA, 1215 bp, Mus musculus
agggccttttagaaaggggccggccagtgtgagctcaggcatcctctctgacaagcttttctgcgtgctccaaggatgactgctcttcctggcaggctccctggagctggttccagcctgagctggttcccaccatccccagagagagcaggcctctgttggaagcttccgggaagagaactgttagaggtggagtggtgcagtcccgttaagtcacgaagaagaatgctgtccttgagaaatcaaagaacacggggccagtacagcatttccagacgctctcaagaacaccagtcagtcccatgtcctcctcaggctgaaggccctgtgtggaggcctgaggagacagcaggaggggccccacacagtccctcctgagacctggctggggttagagcatactgttcctgtgggcaaatgcgttttgtctcaaagctcgccctggccgtttttgggttttttgcacgtgggtctcatcgcctcgcaggagtgagctctgcatccaatctggctgctctctcccctctctgggattctgccttcccacctgtgtaccccactttctaagatggagaggatgaagacacaattaatggagcaggccctgcctcaagctccgttcccggaaggcactgtggcctcagcaccacggtctttacttgccaaagacgaagtccagtgttgcgtgcactcgggactcttaacggcacagcgcaggggctctgccctgacctcagtgacttccatcatggaatgcagcctgaaagccgcgtgttttcatcctccacagcttcggtgggctcgcagtgcagtttcctttccttctttgtcctagctggctatcacccacgctcttacaaagcaaagtgcagcatagagaaaagagcattgcatacctggtgttaagccccctcgctcctcctcctctggtggcttctcagcatcctgaagttactgtccctgcctgtaaaatccttctggaatctgtgccccactggttatgcaataaatcgtctctttaagtgtgtggtcatgtgccccctctagttggtggatatttccagactaggtgggctggggggttgagatttggtcttttgttatctattgtaaagctaagtgcgggctcccaaaacctggttgtcccagagacaagagagtccccactgaagacattaggtgaccctgtccccatgttaactctgattggaaaat

SEQ ID NO: 30419 - DNA, 1085 bp, Mus musculus
aacagcagcctttgtagagtgggtacgagctggagacgttccttcctgttcaccaaagaaacgggttatgctgacctctttatttcccttcccgtagggctcttgcagcattgccattgtgccagtcccatttccacctcgttccatgccttttacccccagccaagaggatatgtacaggagctattttagattatggctatttgcatcaaattcagatatacaaatgaccacggatgttgccttagccttaaaaaattactaacagttttaagccacctcactccacacactgaggacctgatttgaatctgtaaaggcagtccctttgggagcagcatcctctgggctacaccaaaggcagctaatcctgtccttggaagagcagctagggggcccccctgtggctgggttctcagagcaggcaagctggccacatcactggaagagcccagccagtgtgttctccgcctgctcccacttaggatttccagcctggggagacccagctgcacagcctggcttcatagagaggacaggacgaacttgaaacaagaaagggagctaacttagagcagaggctcttcatccaaaagggaaaaatgatgactccacactgctttttagagttcaaatcaacatctttctggaaaaatatattttttaacagaatctttttattatttttaaaagatataaaactgactcctcccatcagtagcaatacaaggttatgcattttaaccagactttctcaggcctcttttggatacctttagtagttaactatttttgtctaaccctcctgtaaatacctactgcataacagcccaacccctggggaacacagccgagggcaccttgcccctctcacctggcgcaggcatccacccccacaaggctgtgctgatcacacggcaaaacagtaccttttcctctgttctctgtctgtttcctgttatgcttctttggggataggaagagaagccaccattcccaggaatgtctgtttgatacagtcagcgttgccagtaaaatgttctgagacacaaaggattgtgagtttcatttctcatagccatttg

SEQ ID NO: 30420 - DNA, 1178 bp, Mus musculus
cctgatcctcagggctggacctacagcttggggtcagttctcaggcttcgccgctgcacactctgctggtgggcacaggggagcctctctggatttcttggccttcttctttttcttcttttggatcccaagcgacaccgggtccccattgacaacgcctgcctcctttacctgttccagacctggggctgcagccaggtcagcattgtccaccttcttcttggctttctttttcaacttcttcttctcctctgccttggcagggcagtgtatggctgactcctggagaatgtctgaagccgacacagctgcctcccggcaccgctgcagttcctcatcgctgtcctcactgtcaccatggcgagtagtcaggttagctggacgggtctccgagctgcctggttgcctccggaccagatggaggcagccaagtagctcaggctcgagtcagcttctctgctcgtcagtcacatggctgcattaagtacccgaagcctctgacccttagtagtctcatctacaatgagggccctgacagtgtccaaacctcatagagcttcttctcaggagacaaggatgataaaggcgggactctggcccaagatggctgctcttgaaaaccatgggatttccccctcccccccccagaagaccctgtgccttcctgctgggggaatactttgccttattatctcatgatctcttgctccgtctgagcctgactggggttgcttagctattcctcaggctcggccaggagaggctgtgagcacttacctggagctggggggctggcgcttccggcagggtcttggagaggcttccttcttatggcctccggggatggatgtgaagaaaaggcggaagcctaagacaccacaggacagagtcagaagtcagtaaggcagacactggccctaagacaccacaggacagagccagcagtcagtaaggcagacactggccctaagacaccatagggcagagccagcagtcagtaaggcagacactggcccttcccccaggtgctaaggacgcagccagtccttaggtactcccagtctagtggcaaggcttagacctcactgccgtgtgtgtgtgtgtgtgtgtgtgtgtgtgtgtgtgtgtaaactgaagctgatctgaagcaaggcttgcttgccctgctgtggagccag

SEQ ID NO: 30421 - DNA, 1101 bp, Mus musculus
tttctgggatgagcttgacatctatagtgcgatagcagcccccagaatgcacaagtgtaagtcttacactaggtaagactcctcgtgggggatatggagcctgaaccggccagcttctgtaaccaggcaagaggacttccagtgaaggaattgggacaccagctgagccacaaaacctttgacctacaatgtatcctgcctacaagatgtgctggggttaaaagggcacagaacttgtgggagtggccaaaaactgtatgatctaagtagagactcatggcacgagtggaagtccatacccaagactaccttgaaggccaggaaccagctgctagatagcccagaatgctaggacggaaccaaacatactagcagttaaacaatgatgtcaatgaagtgattcctcataaatagaagcctaatatacttgtcatcaaacgggctttatccagcagctgttgggaacaaatgcgagatccacagccaagcatcaggtggatctggagaatcctgtggaaggagaagggtgaggtcataggagtcaggggtcgaggattccacaagaaaacccacagaaccaactaacctaggctcataggagctcacagagtctgaactgacaaccaagtagcctacatgggactaacttgggccctctgcatgtgttatagttgtgtagctcattcttcttgggagaattctaacagtgggagcagggctgtctctgactcttgcctgcttttgatatccatggaggcctattctctcttctgaaaagaaacaggaggagtggattgggaggaaaaactgcattcaggatgtaatgtatgtgagaagaataaacaaaatattaaataaaaataaaataagtatacttgttttgcccgggactggtgatttgtgcgttcctggaaatgcttgagaacaagattttgagtgtgggagcccaggcattagtgggactggagttgagggtgtggtattgtaggacagccattcctccaggtccaggccataagagaggcagctagcaggaagaagacagtttctttagacaatcatgtataaaaactagctacaaaatagaaactagttttagac

SEQ ID NO: 30422 - DNA, 1808 bp, Mus musculus
ccctcaggcctcagggcaggtgtagaggggccccacagacaggccagggcatctgcagtgagcaaggctgatgcgctggcatcctgataggaaggaaggaaaggaggacggaaagactactgcctcttgtttgaccctggacctctactgtgtccctcctgtcccagggtgacttacggaggatgtggtctgagcccttccactccaagtccagcagctcccggttcctggaagtatgatgacgcgggagaggtgaccagagcgctgtcctcaccttcctctctcaccgcgcggttttgttccctctacaagctggcctgactcaggcatgcctgctcacggaactgcagtgtgactggagtgtgtgtctgaggggagcgtttgcagagggcactggagccctgcacagcccttctcttctccgctctgggagagtggacccttccagaaggggcaggccggcccttcgcccggtgctcctccttcctcgtgtttttatggatctgcaccagactgttaacttgtggggagatggcgaagttgacttatttaaaaactacaaacagcaagttgttgttctagaactttgaacactaaatggaagaaaatccattagcagaccgaagtctcttcagtgaaccctccgaaactctgggaccagtttcctctgggggctccatacagagacccagggcagaacttctgccctattttttttcttttttcttttggatttattaaatattttctgtggtgtgaagtgacttattacatccacagacattgaatgacttcttacaacatacacataagaatttgttgtaatgactgtgtccagccgtgttggcagtgagcaggacgcggttggtttatacatacgtacatatatatatatatatacacacacgtgcacatagatatctgtgagtaaacagcgactaagcctgctaaggtcacgccatgcagctgccgggggcttgctgtcatgggagcatgtagaacagtttacctggcttcctcgcacacgctgctgtctcccttgagagtcgcgtgcggttgtaagctgtggatgcgctgaactgatagacttgtgggctgtggggactcctccttttgatcagtgtagcaaattagggatgaaaagtttgaactttttgacccttttctttttacaggcttttccctcgcagtttttagtaaccgcctcttgaaccagtgcatgtattatagcagccggtgtctttgtgctttctgatcatagttatgtactacctgtaaatacatttttctattttatatttttttgtattttttttgacatttcgtttcattggtgcgctgtattttccatgccctcagtcccttagaaaagacaaaacagaaaaaagcaacgcaactctgtccttgctgtgatgatcacagcctcagtttacctgtggtgacagcaggctgtggggacaaatgtcagttgcctctgcaaatggagctgaagtccaggagctggagacagagcaggctgctgctgtgacttcaaaacctggccccgcgctgttgctgtccgtgggctgcacagagcctggcatcaccatcacctcacacttggttagctgctgcctgggtgcgaggcggcaggccctagagtctgttccttcccggggccgctggcatcgtggcctgcctgtccctattcctgcagacattgtgcagagtgcacagcccatcgtgtccatggagcagcgtgccaccaagttgttggttcctctgtcgtcttcagactctgttgaggggtttgaagggttggttttgtc

SEQ ID NO: 30423 - DNA, 1226 bp, Mus musculus
ccagctcacggagccagagctcctgaagctcatgggccaggtaggctaacacacagaagccagagaccatgcctcagcaaggggtggataggaacaaactcgagaaggttatcccctgaactggagagatggcttagtggttaagagcacggactgctcttccagaggactcgagttcaattcccagcaaccacatggtggctcacaaccatctgtaacaggatctgatgccctcttctggtgtgtcagaagacagctatagtgtactcacatacatgaaataaatcttaaaaaaaaagttatcccctgatctccatgtgtgctctgagatgcacgcgcgcgcacacacacactaacatttaacttggtttgacttaaaattaatcctccctctcttccggtctctttggcctcgccggtagaagcaagatgacgaagggaacgtcatcctttggtaagcgtcgcaacaagacgcacacgctgtgccgccgctgtggctccaaggcctaccaccttcagaagtcgacttgtggcaagtgtggctaccctgccaagcgcaagaggaagtataactggagtgccaaggctaagagacgaaacactaccgggactggtcggatgaggcacctaaagattgtctaccgcagattcagacatggattccgtgagggaacaacaccgaaacccaagagggcagctgtcgcagcatccagttcttcttaaggatttcaatcagtcataaaataaatgttctgctttcaaaaaaaaaaaaaattaatcctctgtgatggccagcagttaacattcaacagtttctctctaggctcttgattctctgactattgtagggattcgatcagcactcgcataccagaagtgtgagatggtccgtcctttttcaagacaagatttctctgtgtagccctggctgtcctggaacccactctgtagaccaggctggccttgaatttacagagatccccttgcctccgcttgctgagtgctaggattaaaggcatgcgcactatggttggtcttctcttcctttctaagatattttcccccttttaagtttaggttccaaagtcattgtgaactcgttacgtttactttctccgattaccttatgtgtgtgtgttccggggtctgtggaaacagagtagtggagccactggacctggagatagcaggcatttgtgagcagtcatgtgggaacttggtcctct

SEQ ID NO: 30424 - DNA, 1137 bp, Mus musculus
acccaagtcacagggactttatgcttggcagccagggctctaagctggatgccccgcagcttgaggggtaggtcccgagtctgttgtttctggcaggcaatggcagtgatgctggagccgcttccaccactgcccgggaagagggtgactcatgggtcctcaacggcaccaaagcttggatcaccaactcctgggaggcttccgccacggtggtatttgccagcacagacaggtcccggcagaacaaggtgggccagcagacccctggggtggtccttgcaatttcttggtcttgctggagctgctcctgctgatgagcagtctttctttccccaatggagtttgcactcctacccaaagccagcagagggtacaggggctggagcgggggcggggctggagcttggagcctgcataggcgcagctctgcagactcatcctagcttttggggccttccagggtatcagtgccttcctggttcccatgccaactcctgggctcacgctgggcaagaaggaagacaagctgggcatccgggcctcctccacagctaacctcatctttgaggactgccggatccccaaggagaacctgcttggggagcctgggatgggcttcaaaatagccatggtgagcttggtgacagggcagcaagcacccggggtcgggccctgggcccagcctacagctactgactgggcggtccccacagcaaaccctggacatgggtcgcattggcatcgcctcccaggccctgggcatcgcccaggcctccctggattgtgctgtgaagtatgccgagaaccgcaatgcctttggggcaccgctcaccaagctccaaaatatccaggtaggggcttggaggatggggttttagaagctgggcaccggagtcttggtaggaaagctggcttttggcttgcttatctcacccctaccacaccttaccacctccaccccacccccacctgactcccaccctcacatatcccactcccacccccactcctaccccatccctgaccattgggtgggagagcatcggttgacgggtggggctggattgttgcagttcaagctggcagacatggccctggccctggagagtgcccgcctgctgacctggcgtgctgcca

SEQ ID NO: 30425 - DNA, 3665 bp, Mus musculus
tggtgccccctggcccttgggaagcagaaggcagcaaatctctgtgagttcagagccagccagagtggtacagtgagatccttcctccacaaaccagacaacccagagaggcaggtacagaggggcatgctactctgggtttctgctggaatatccagaggtggcagcaggccaaaagcagggctcactgctgggccggccaggagcgtggaggaaagaagtggtcgtgactgagaagtttgtttcctaggatacggcaagacagatgaggctagggatgactaaagagttgattgcatcctggtgtagaactggactggacgtcacagtccatctggcgccctccaggctccctggattcttttgcactcaagctttgcaaagtgctgctctgtctttggagggatgctgagcggcttccgcctggctgtggggcagactcacagagcttgctcttccctcacagttcgtctgatgattgaaaatccctatgagacgcgctccgacagcttctactttgttgacaacaagctggtgatgcacaacaaggcggactatgcctataatggaggccagtaactgctgcgggagtggacagggaggtcctctgccgccaccacgagcaccgagcaggaattgcagctgtcgcccgtcaacacccacctcgaacctggtccaggaagctgcagctggggcggcggcggcggggttttgtgctccaaggaggtgccagccagcagtttctcttcccagtgtttgttccctgccccctagttcacagaggtattatagtgaagtaaaagattagggtaagcttcccgggatccagataaaagattatttctgtatagtcttagctgtgcactgcttatcccgacaagcctgactgtccaggcacagctttgtctgccagaaggcttgtgctgggctgggctgcaggttcccagcccctgcaggttcctgggtgctttgggcagctgagagcagctcacttctcccccgtcccgtgccactggcacagtctgtcctcgcctatgcagttaggccaactggaagaaacttgaagagggactggggtaggcagagcccgggctaagccactgggttgggaggtggcaccagagtcaaagataaggttttgagggggcttcttactgcctttgagaagccacagccaggcctggggggaccacggtctcagcctggtggcatcttctgttcttgctctagaagccatgagcctccctcctgcttccctggccgtgacttttaccatgtcctgccgtggccctgggcagttctgttcacagaacggtgtctcttgagtttagtgtgcaccctgtgctttgctctcttccttctcagacttcttcggggatttttacgtcagtatttagagcccaggatgctgatagatcgtgataggactggtcggctcccaggctaatgtggctcatgggagaggcacagttggggctttagagagagctgactctgtttccagtgaccctggaagagaggctctgggtggggactgcctctagagcagtctgatgtttaggagtgctttcctctctgtttgcctttctgctaaagtcacatggtcctgccccagactgctgcatgtgtgagtgtttgggaagggcagcataggccgaggttgcctgtcagagcagtccttaggtgcgcctcaggggtcctcagatccccactgactgactcccacctctctggctccctaggttgtccctgtgggcagctctaggacactgtggctggggttcatttgtcactgaatgaagtgctggaagggtgggtgtgcatgaagtgtctctgaggcaccatgtcacctgtaatgtcacctgtaatgagaccagggccccagagtacttgagagaaaggatgtgctttggccgtgtcgctgttggcttctagggtgttagtggttctgggtttggacccaggccctgtaccgggccagcacctgatggtgcagtgatgctgtgctccggaggcttcgggactgggaaacctagttatccttcatgctgcactgcgtttacccactgagatagatgggggcccaggtgccctatggtgggcacctcctgaccattccagtggatctcagaactggagtccattccaactctaggtgccttaagtgtggctctgccccatgtgctgctgggagctgcggggccaatctccctcacctgcatacagacatgagtgtctctctgcctttcctcacgtggctcctctggtgagctttccatgctcttgacaagcctcagagtctttgctctattccagagtctgagaggtgtttggtacccggtgtatcagtaaatactgcctagcgtgtgcttccgagagctgcgtggccttagctcagtagctcacagcctgggacgctcctgttttctggcacgctgtctcctgcctgtcatgctggctttgcttggagagcccacactactggctggagaagggctgcatcccctttcccttcagcctgttctcagagcacactgaggccgggtgctcagtcatcctggtaggatggagcagtctttagcttctgaagggccagcggtccgtgtctgactgcttagggaagcagcttgctgtttgctagagagtttgaaattccaacttttgtgcctgacttgagtaaactggaagtcatactttgtaaataactgaacaagcagaagccgagtcagaagtcaaactgtccaggaacaccagtggctacagtggcttcctgtgatgcagtggaagagggaatcagtgcttgggggtcgggcatgcatgccccatgcccataacagtaatctgagaggatggcagcccctggggacctcgtccccaccctgggctgaacccttcctggtatgaggcaaagttctgctccatctccatccttgccccatgtcttggggatgagctgcccttctgaaccgtaaatacaggaataaagatggccagtacttgggctgacataagctcttgtctcaggttagcccaacgctggctcatatgagcctcctgaagcttctcctggccctgggcatctgatttccagttcctagggacagcattttgctgtgtctggggtgagccatagactcagattctgaaaacatccacattccatgtccagagcaccatagccacagggagtctggacgaggtgggcgcattcttgttcgtgagggatcatggcctttacgatgctgtcactcaagttgtgaaagtccattttccctgtaaatctatttttcacagaaataggaaacatctctgtccttaaaatcctcagtccaaaacaaatcaggtgattctatttgtataagattattttaccacaagagacagtaataaagatttttcacaatatgttcactctgacttgcctcctgattgggcctttgagggcttggagggtgggcagggtcccagtccctttgcttggctgtggcatttctgtttttgttgacttgggtgtcactggtttataactgaggaacagctgagagtcacctgtttcttttttaagtttttctgttgaaggttttcctcagggactaagagttaaacatttatggatggagaacatttatgggatggatgttcccaacagcatacgccccactgcc

SEQ ID NO: 30426 - DNA, 7206 bp, Mus musculus
tccagagtcataatttaagttatgaagcccgagcaggtacatgtctgatgtcttgaggggtctgaagctggtggtgttaacagtgtcttgtcttttactctgggaaggtgtttgatgtccggttgaatggccatgtggtggtgaaggacttggacatctttgaccgtgtcgggcacagcacggcccatgatgaaatcatcccgatgagcatcaggaaggggaagctgagtgtgcggggggaggtgtccaccttcacagggaagctatacatcgagtttgtcaaggtaacggcggctgggcctcctcctgtgggagggaggagaagatgtgctgcctgtggcctgactgtgccttcccttttctaggggtactatgacaatcccaaagtctgtgcactctacatcctggctgggacagtagacggtgagttggaattttaccttctgctccgtgacttgtgctgcagggtatgcttgcggagtgcttgcgatagataatacagctggtcattgtttgggaaatatttaaagccacatcatagggaactcccagtcaaacatacaaggacaaagtatcacatggttctggccacaaagggttaaagtcaggtctgtgttcatccctgcctgttactgtttaatcagcagtcagtctttggcaaaatcttttttttttcctcttgagatcgagtctctctagtcctggctgtcctggaactcactgtgtagaccaagctgttgtcctttactcacagagattctcctgcctcagtctccctagtgcaggcagtaaaggtgtgcacccctacaccctgcctctgggacaaagtggaaactgctctatgagttgggattagtgatgaccccttttggggttccttccccgttatctcactcagttagaattacctgaggactggcaggaaagtcacctctgctgctaagaccgatgacctgaatatgatcccaggaaccacatgatagacagagaactgatcccacaacttgtcctctgacctccaccatggcttgtgtgcatgcatgggcacacacatacgcacacatgcatgcacagtaaatgtactagaattacctgaaatatgtcttaagttccatttgtggtttgggctctagtcctttggagaaaaagacaaaaataagagtccctgtgggggggctggtgagatggctcaacagataagagcacccgactgttcttctgaaggtcctgagttcaattcccagcaaccacatggtggctcacaaccatccctaacaagatctggcgccctcttctggagtgtctgaagacagctacagtgtacttacatataataaataaataaatctttaaaaaaaaaaaaaaaaaaaaaaaaaagagtccctgtgggtttggttaggtgcagctccagtacctgagataacaggtggctccttgaccttggagttcagccttggtcatctcttgctcagggtttagattgctctgctgcagcctcccagctgatttttgcagggaaaacttggtatcctactgggttttctcctccatcttctctctgtgctgtttcccatcttgtcttgaatacatggaaagtcatatctttaatttttttagacttattttatgtgtataagtattttgtctgtatgcgtgtacttgtgcaagtgtgttagtgtgtgtgggttgtgtattcaccacatgtgtagtattctcagaactcagaagagaaactggaagtgcggttatgccatggtggctgtaagccaccagctcggtgctggggaccgagccgaggtcttccaagaggaagagcagccagtgctctcaagcgtggggccataccttctgcccgtcctcttgtcctaacaccttccctcccgcccagtgctgacatggatcttctaggaaggtgacactgtacaccaggctctacttgggttccttaggagttaggacagaggtgtggtgaggctgggaaccagagcctggtagggcagccttcagtatctggatcagaaggaagacgaagactttgaaataagttttaactgtcagatcactgtccctgcctattgtgggcctctgggagctttgaagaagtgagtcaggaaggagagagaaccttcctttggggaaggccctgtattgctttttaggtaaaacctgaatctgactactgttcctgtgtcctgctgtttaggttagagatcatttctacccctccctgtggacctggttagatgacagaggtctctctagtgtggcccatttacggctctgaatgttctcatgtaaatgctctgggtcttagtgtacttaaagggtttttctttttttctattagatgtaccaaagctgcagcctcatccaggattggaaaagaaagaagaggaggaggaggaggaggaatatgatgaggggtctaatctcaaaagacagaccaacaagaacagggtgcagtcaggcccccgcacgcctaacccctatgcctcggacaacagcagcctcatgttccctatcctggtggccttcggagtgttcattccaaccctcttctgcctctgccgcttgtgagaggacaaatggccatcctcagcagggtggagggagtgtgcgagaaaccagacactttggtttctgtaatcttcacagtgtttaggaaaagagaaaacaaatcaaacagcgcacacacacacacacacacacacacacacacacacacacacaaacacagacacacatgtgctcacacacacacggaaagagataagaaaagcagagagagtggggtcaccccaccaacacaggttgcagagtgctcagtcctgctctgcctagctggccccaccccagctctctttctctggggtacttagggagaggatccttcctctccgaggatcctcattatatacctagtaggaaggactctgaactcagagcagtcacacttccttggtttttttaggttagacattaacaaacagcaggaaaatgtcacataacctggaaagaccgcactggagttgggtgtgttctgagtttctgtccagatgtgatttcagcagtcatggtattccaagtgtgtgtgtggaggtagataagtgggacggtaaagacaaaggcgtggaagagaaagtcagcgcttccttcctgggaagcctgtcgtctgggttaatctgttgatgtatcttcattgtcatctctcatcctgatgtgtgccagttagaggactgtctggtatccaagacgactagtgtatgtcaggtcctcaaatcaccaacagcttgttactacaacaaattgttttgattttagtgcctgttgaggacttgatttcttcttgatttttctcttaatctggttcatttgaaatttctcacttcttaaccatagagctaagttattgtcaaaactgggcaggagacaggagattggagtggtctctgctggggtgtctgaccctccaccacctcaccttgttggtacctccctccctgaattcctgagccagcaactcttactggcccctccatagggtcttgctgccagggacagggatgctttccagcctgcagcaacagaacacttgaccttaaaagtctcttctggtctttggattagaaaaggcttatgttagcaacctcagagacttgagccctgctaagtgactgaccactgtttagaatgtccagaatctgatgtccatctgtccctgtgtcttctgtcctctttcagctagtttaggcttatgcctagagtcaccccaaagaactgagactggctgcagcagcccagctgtgtttctcattgatgataatagtaggctctactgccctcccctcccctatccaagtagcagttaagttccatccaaatacgtgggactcaaagactcctagtcagctgtagttctggaggctctgaatgtctaactttagcatcaaagtgtctgtctcagattcccagtaaacacctctgtaggggatgaagtttccatgtcccccatcttccttttggtcaccttcatctgtgtgtcagttaagacacagtgagggacagcccagctgcaataaaagggattttctatgtcagaagcagcaggctttgcttcagcttgagttggagccgtgtgagtctcaggccaggcccttatttctgaatgtgtttgaattttaagtttgccttatcagatatctgagctgtgcgacaagtaagtagctctggggccatgtcttgactggctcctaatggtgactccaggccagcacttggtcatttgagaactgtcttctgtgttctctgtgacttaggctagccctagggtactgaggtggcagctgcatggctgtggcctgaagttgcacttgcaaaggtcctgcttctacaggacgctgaggtacttactaccctggtctcgggaactgcctgcctagggcaacagatgtcctgactaatctggcttctggttcccggtccatccctatttacaaagctatgggccactgtcagcacattaaacaaggtgagggagagtagctgcctccgtgtcaccttgtctgcctgggtctctgaggaaggaggggtcctgctttctcacccagctcacccctttggtgactcagagtccttctcagaaggaaaccctgactcctgggccatttcctaatggtactgtaagccaagtggctcggcttctgcctctgtttccaagcccaccccttcccggagggatagggacgggtgctttcctctctagttgtatctgagcggaaggaacatctttctgtagctaataaaaactaaaagggaagaggaagcagaagggaaggagtgtggcggaggctgggatggattccctaagccaagcctgcccagctaatgagctgtttgacgttgaacttgaaagctttcccctccctctaagatgatgtaggtacttgaggtttgggttaaaggggctgggtggggcacgctttatttttatttttgtattgtgtatgtcaagaatcactccattgttcgtgttgctttttgcactgtttgttccccgctgtgttttgagctagaacaaggagttgcctgggattgggagctgtgggtggtgcaagtcagggagtgggccaggagaggcccgggttttctgtttgagctatactctgacccaggatgttagagcacactgatccagccactagagagaaaggtacaagagcagagcagaggagcaagcaaggacagctgggttgagtctgcaggtccagtgtggtttaggtcagtcaggggccagctggcctctgactgcattgctttaggtcgtattcaaactctcttaaacattgtgccaagaaacgatttgtgggattcatgtcccgaaaccattaaatctattgtttggaaagtctgcagtcctgaggagggcttgctcactggacacccacagatctggccctttgaaaggcagccttcagatgcccatcgtgtgagaggcgctgcctgttgatgaagtgtgtgaccttttctcctgctgagtgggagatcccagggtcccacacgcctcacctcggtgagtgggcagagctgagccgcactgtgtgcctgggagcaggttacaactctggtttgactttcattttgttgagaagcttctgttttaaggaatttctccttcttgtctcattcctgcctttcctgggaagggcctggccctgatctagagtcttagctaaggagctgagaaacagccacagtactcccttctcttcgcgcacagggccctctctcttagagactgctcagctttcgagtccagggaggagtcagcggggagtcagcaggttctctctcctccctgggaactggggaccaacccaccccggcagcacagtgcctttttttctcctgctctgagtcaggtgggcgtcccctctagatccaggtctgggcaggggtctgatggtccactgtgggctgtttccctatccacccccctccttgctggcctactctgacataatacaagtgtcttcttgccttgaggaaccttaatggcattgtggccaccacatgtgactcttctccgtgactctataaagacctagcagagcatgtgagcattctcaaacaagagactaactgatgctcctgctgttaaaaaggcagaactagggaggtgactttaggcctcctgctgtggcctctgaagaaggtgactcttcaggtaagactgatggaggctacaccgacaaaccgcagacacgcaggatctgctcagagattgcagaagagcgtggcctctcttatagggaagatgtaattatggatcaaagagtgctaagaaaattgcgaagaagccttactgcttacaccagagagctcagggcagctttatcttccaggtttatctaaaactatctgtgttgggcttccctgacacgggagaggggcaaggatagacgattgacatggcactgatggtcagttgcccagggaggccgcttactctggatgcagatggctgctgccgatccactctgtctttctcgggctgcttttgcgtcgttgtcctaggtggccagattgtcttgataagagcagatctggggactgatcggattggcaggaaaagaacagagtgcatctcttgggatgggcttctctcggagtgtaaaagcaaggggccaggattgtgctggcagccagggagacagtagtgcctgcggaagttggcagaggaggccttggcatgctcgcatccaggcagtcatgtgtgatgggagcacatagcatcgggagaagcagaactccatcctcacctctattttgagcttagtgctttatttcagtatgaggaaaaacaacaacaaaccgaagtgtgctttccgtcctttcagaggacaactgtcaggaaacagttgaggtgccaggtgggaggggagacttggcaaggagagatgtcgtggcaaaactaggaaaagagacattcttggctcttctctttcctggtgtgccatgatccagggaatgaaaagaaatttgaccctggattagtttctttgtcggcgctgaggaacactgctttttcacaaagttcccccgggatagaatggctgtccagtctaagctcagggcagcctcttcaaccactgttggcccagcctggcttgtgaggaaaccagccctgtccctcagtattgaacttgg

SEQ ID NO: 30427 - DNA, 2240 bp, Mus musculus
tatctggtccttctgggtccctagctgaccttaagcctcaacaatgtccaccacattcttaccccaaagcagaaaaagaccttgaatttttgtacatttatttatttaaaatgtgtgtttgccaagtgtggtggtgcacacctttaatccaagctcttggtgggcagaggcaggcatacgtgtgtgtgcatgtatatgtgtgtatatgggtgtgcatgtatatgcaaatgtgtgtgcatgcacatgtacatgggtatgggtatatgtgtgtgtacatgtgcacaagtgtgtatgtgtgtatgtatgctcaagggtgtgtgtgtgtgtgtgtgtgtgtgtgtgtgtaggccagaagatagctttcagaagttgactctctccttgtaccatctggatcccaggaatcctgatcaggtagtgaggctcagcaggaagtactttgaccaactgcacaatcttgctgagttgcaggatgggctttctttaagcatttgattggttttgctgtcttctgtctccagtttccaaggacagaggcatacaaagccaaggtcgacaaggacctgctatacctgagactggcctgcagggggcaggagtcaccagggctgaataactggatgagtggatgctgcgtttagccctttcagttcgaggcagaggaatgggacaggtttttggtgccagacactgggcggcaccttttgtgatattgttttgttagccacccataagagcccaaaggaggtgttgttagtatctaagggacaacctccagaagtccaaagtgaatcagatcatcgcaattcgtctgactcggcattctatccctggtacgtcgtctttcatatttttaaaaagacttatttttattttatgtgtatgagtgtgttttccccctgtttgtatgtgtaccacatgtgtgcctgatgccttcagagctcagaagtggtacattagatcctctggaactggagttacaaaaggttgtgagcatccccgtgggtgctgggaaccgaccccggggcctctgcaaaaacaacaagcacacacaaccactgaatcattttcccagccactctcagtgggtcttaatgccagctacaggttagagctccccagagagtccacagactctgcacttggccgccctatgcccactgcaccagggatttcagggcagggtccagctgtttctgtgtttctctttcttttctctctctctctctctccctcatttttttttttttggtgtgtgtgtgtgtgtgtgtgtgtgtgtgtgtgtgttttcaagacagggtttctctgtgtagccctggctgtcctagaacacactttgtagaccaggctggcctcgaactcagaagtccgcctgcctctgcctcccaagtgctgggattaaaggcatgcggcaccactgcccgcctgtatttctctttcttagcgttattctggactatagttaaataattgtactcctcactctctcttgcccacctgcgaggatgtaaactcccgttgttgttgttcctcttcattgtttccagagccaagcacagcacccggctcataaatgccgggcaaacgatacttccttcttccacttgaataattacttatcagcgcctattatgtaccacaggctttcctgtatgcgccgtattagccagacagggaaagtcccattttctaacggaggaaactgaagctcaggaatagaaggtgatcacaggcagagctggggctcaaccttagaccccagatccttccccattcatcagaggccattgacccagacccctggaccagcggagtgcttcctctgagttgctttgcatttccgttagcggtctgcccctccccagctctctggcatctttaccctctttcctgccctttagctgttcccacccagtctcctccttttgtgttcggggagtggcttcttccttttcccctcctccaggagtatgggccaagcaaggcatcaagaaactgcctaggcaacaccgttccctggtctgcagcgacacacagcaccagagacatagtgaactagccagcgacctcctttttagcctcctaggaggaagcctgtgccacccactgggcaaggaacccagccatcttctctaatgaaattcctgaccagacatcccaatggacaaaagtccctgggagaggaagcagtctgggcttggtgtctgcgattgcatcaggggccagggagtaggtcaacc

SEQ ID NO: 30428 - DNA, 1140 bp, Mus musculus
agaaaacaatcaatcagtcaaacagacaaaacccctgggagacacagtatatccttaaggtctctatgccccatattaccctaaaactcatattgtcctgactggttttgaattgtaggcaatcctcctgcctcagcctccccaattctgtgattcttggtgtgaagcaagcaccatacccagctggctgatgtacttaggtgccccaagaagggcagggaagaccgaccatcagagcaggggttcctgactcatggctgaggaaagctcttccacagccctctgtcatgtccacgacagactgtagacagtcctgtgaagcgctgtggtgacacttaacgttcttccttctgtcccacttggcagatgctgagggttggcaaagcaaaagcagacgggtggcccaaaactgctccaaagaaaggtgagagcggtcagacggcaagggcagatctggacaacccctctcaatacaagggttacaattttaacactgcccttttcagatgacaatagcttggttcctcccgcccctgtggacagtgatggggagagtgacaattctgaccgtgttcctgtgcccagtttccaaaattccttcagccaagctatcgaagcagccttcatgaaattggacacaccagctacttcagaccccctctctggtaagggcgggaaactcactcaactcagagctcaggcttagccacgtgtgctgccgttcctgcctgggtcagtggcaggtaccaagtgtcagcacggggcttattgtccaccctatgtgaatccttaaggtccagaagtggacttgtgaggaactcttttttattatgtgtgtgtaccatgtgcatgcttgatgttttggagctcgaagggatcaaatctcctgaagtggagctgcccgtgggtgctgggaatcagccctgggccatttcacctgggtgcccacagtactgtgcctccccttgtctaagtgcactctctgtttcccctcagaagacagaggagggaagaaaaggaagagacagaagcagaagctgctgttcagcacctcggtcgtccacaccaagtgacactattgcccaggcgccttctccatcgggtttcctctctgtgcttttgttttgctgctgtaatttt

SEQ ID NO: 30429 - DNA, 1082 bp, Mus musculus
ctgaggagacatgggaagagagtcagaagacagcaaggatgtgagtgctggctggaaggacctggctccctgcttccttccattagagtggtcggcacagcttgctctggtgaccgaggagtgaggatgtgcttcagcttctacaactttgtggccgacacacaccctaactctgaaaaaacagatgtctcaagagaagtttgtgagatagtagctcagttaggcctggctgaccttgaactgcctaccccccagaggtgaaggtacaaaggtttgcacagcatccagtctttggaggggaggatcctgacatatcttaggctactcttactgcctgggcctcctgctgtctggattactgtaaagcagagacagcctgatagtcatttgtctcccaggcccttagagcagctctgaccagctgtgtacatggacctccattgcctttgctttgcagatcccgaggtccacattcccctcgagaacctacagcagtttccggccttcaattcctatacctgtccctctgattctgctttgggtcccaccagcactgagggccatggggccctatccctgtctcctctgagcagaagtccaggctcccatgcaggtaagtagttgatatgtgatggattctactatttagagctctaatttgatttaattttaaaattttatgtgtaagagttttttgcctgtatgtacatatgtgtaccacatccatgcctggtgctctagaggtcagaagagtgtccagtctggaattggagttaatggatgctgggaaccaaactcaagtcagtctgcaagaagcatgagtgctcttagccatgggccttgaccgtcataagcagactctagtgtctgaattcacagctctaaccaacctggcacattgcagtatttaagtgaaagacttttagagttagtcctaagctacattaaattcttaggtttgcttctgacttcttagatcttgtggcttcgtaaagcctgcatcatttttctgacccatctgttctgttttctcttattcccatgtttaatgtttataatgtcctttcataatattgattgta

SEQ ID NO: 30430 - DNA, 1129 bp, Mus musculus
ataactttgaattatgtgatgatgatttacctatgtgaaattttgccattcagtaaatatgcctctattggtacaaaattgtatttattgcatgaaataaatacagaaaaagggtagaaacttaagttagcaggctttggtttccagtgttccggaccagattccctcagcagggctgtccgtctctgtgccttcccttgagcatcactgctggctctcttcatggctcccagtgtgggctgtttgttgtcttggtgtcagcaagtcctctctccctgttctgagtgtgggtctagacagtgagagatagtggtcggctttaggctgttctgttagcaggctgtctactccctgtggcctgagtttggtggatgtcttaatgcaggctgcatgtagggtctggctttctatagagcagtggcagcagcgctatccatttagttctggtgctgggtgtgtgtgtgttgggatcctttgttctcaagtagttgagcttcggttctgtttgtaggatgttcggcagcgtcataggtatctctctcacttgccactcacctgtgagttcagcatctgtgaactggctctgcagcctcctgtggtctctaaggaaaccctagagatgttctcaggtgagaaagccccattgcccttctctgctcagaacccagtgtgggaggtggggcttgagctgtatgctgagacacgcacgggatgcacccatccatctggtctgctgtctcgatggcttagctgtggtcatctagggagagttaacagtggctgatccatctttcttacaacttgaccaacccacagatgacattgagaaaaggaagcgtcagcgccaaaagaaggctcgcgaggagcgtcgccgagagcgcagaattgagatggaggagaacaagagacagggcaggtgtaagttcagagctcacggttgcttactttgccttgtgtgagtctatgtggccccttgcctgcctgtgccctgccagtggtttccattcttcctggggtaagtaagatagtgaaggtgataatgaactgttccatggtagggaagtctctaactgctgactgtctcagatagacctgacctgctcacaggagggcaggggcacattcagga

SEQ ID NO: 30431 - DNA, 1297 bp, Mus musculus
gccttagcaacacttactgaagattttggagtaagtagaattggccaaggaaggagtatctcctgtgtcctctgcatcagggattcttaagctcgagccatgagaatcgctgcttgtccttcagagtgagtctgtttgggtcttcttttttctggtggccttagattcgggaagaagctctgtcaggagtggctggaggcggaggggaggtcactggtgttgtggctgctctggaacacctggtgctgatggctcccctggccacggagtctgctttccaacccaggaaggtcagtgtgcccatcacaacgaagtgacttgtccttcagatcccactgttgtgaaggagagatggtagcttggctgtgtcctcatgactagatctgtcaccttttccaggggtggtactgaacaggagagctcgggtcaacacctggggagcacagctgcctctgctgcattgtttcatgaaacagaacatgggacttcgtgttgacctagggtttgttccagcagggtgtgctggagtatctgtctgcttttgatgatgaagctgcacaagtttgttctctggacccccctggtcctcttgccctccctttggtagaagaggaggaagcagtgtctgagccagaagcctgtgaggacgcagaggtagccgatgacagtctgggagaggggactgttggtcctgagatgagccaggaggagcccatcactaagccaggcttcacccagctcagcagctctccgtgttactacttctaccagggtgagtccccaaggaaaagggagggctgggctgcctcaggtatttgaaggagagggatggcctggcactctgaacagagccttcctgggggtcggctccctgctttccagcagcaagcaggaatggtgggcctggctgggagagagaggtccatgctggaggctggccggggcttgtgtgatagagctcttgtctttagcggaagatggacagcacatgttcctgcaccctgtcaacgtgcgctgccttgtgcgggagtacggcagcctggagcagagcccagagaagatctcagcaaccgtggtagagattgctgggtattccatgtctgaggtgaggttttttggagaaaagaagtatgtgatgttaccatgatctctttcgtgtaggcctcatcggagtgaggctgcaactgttgaggcctcaatgtgctcatttgttgtggttcctttgtttttgagtctgggtctctcttatgtagccctggctgtcctggaactcgctctgtagggcagggtggcctca

SEQ ID NO: 30432 - DNA, 1149 bp, Mus musculus
catttcctcaactgaaggtcctttctctgtgataactccagctgtgtcaagttgacacaaaaccaaccagtacaggtgtataagcaataaaggatctacctacccctctttgaggaagtcataaccaggaatcagagggacagttacccttgattaccttgccggtaggcagacaagcatggtgccagaactcacatgttaataacaaccaccagacagagacagggctgactaggaatggggaggcttttgaagcctcaacatccacgaggctacacctcctaattcttttcaaacagtccaccaaatcggggacattctcattcagactgcacgggcggaagtgttctttactgctgagcgctctctccagccatgtctgctgttaaccagtttggtgaagtgatgagatgcagagagaggcatctgactttgctggccctgagtcaggtctgagagccatgacgctgtgtgtcattgtgtttcagcgcatctgtagccatgaagtgccatcttgcccaatatgcctctatccacctactgcggccaagataacgcgctgtggacacattttctgctgggcatgcatcctgcactatctttcactcagtgagaaaacctggagcaaatgtcccatctgctacagctctgtgcataagaaggatctcaagaggtaagactgcggggtaggtgagaccctgggctgctgtctccccgctctgcttcatccagatgcctttgtctcagtgttgttgccacagagtctcgacagtatgctgtgggggacaccattaccatgcagctgatgaagagagagaagggagtgttggtggccctgcccaaatccaagtgggtgaatgtagaccatcctattaacctaggaggtgagcacgagggggggggactgacccttaatgaacagtgcatgcatcttgataatatcagaatttgcccttggctaagccagttttaacccaccggcatgagaagttgtctgaaaacaagggcagaggatgtggcacaggaccaagtggttgccgagtacacaaaaatcagtaggtgcagctctcagcactggtgacagagcaagaatacaaggaagaaaccagccatggtagtgcacacatgagatctctgcacttgggagac

SEQ ID NO: 30433 - DNA, 1145 bp, Mus musculus
cactcaccgctatgcatgctccttgtgcataagcactgaagttttcaattaattttttgagaaaaggtttttctgtgtagtcctgactgtagccaaggttggcctccaacttaaatccacctgcctgtgtgttccaatgctggggggagggggtggagctgtgggtgtggatttgacatagaggtaaaaggtttgcctagcattcctgagactccaggttcaatagtaaataccaccaataaaagaaggtggaactatggagagtttattggctgagttcctcttggtgctactaggtgactagagaaggctgtgcagggcagggctctcactgtagtgctgctgagcagggcgacgggacagtcgggatgcagatgctaggggagcgtctcctgtcctcactgccacacggcttaggtgaggttcagttctcagccatgaggaaggaagcggagctgtgccgatttctgctgtcagtgggtaaattcttcactctgaaatgctgtcattctttctaggtagcagaggctcagcgggcagagtttagccctgcccagttctctggccctaagaagatcaacctgaaccacttgttaaatttcacctttgaaccacgtggccaggcaggtcactttgaaggcagtgggcatggcggctgggggaagagaaacaagtggggacacaagcctttcaacaaggagctctttctacaggccaagtgagtaccccatagagggcaagggggaccacattgtgaggaggacacctcatctaaccagtcaggggggagcaacacaaaggaaagtgtccttctcttccccctgtcacattttctgagggagaattctcagtgcttgccgtgacttctgggaccaggagtggtgtgtggactcaggctgctgttgagtggactgcgaggaggtcatggatgcagggaggggagagatgagagaggagagtttctgactcccgtgctcatgtgctgagcctagcagaggaagaactgaggtgcaaacaaaagttttcccaggagccctcaggacaggcctccgtaggacagatgagcacgctgactccaagtactgggctgcttccctctgcagctctcacaggtgttgcttaggcttggacttttggagctgggg

SEQ ID NO: 30434 - DNA, 1228 bp, Mus musculus
attgtaggaggccagacacccacacatcttttttttaaaaaaagaaaaaaatccaagcactggcgaggaatatctgtgaattggaagccagactgttgcacacaaagagttcaggtcccgttaggactacaaaatgaaacattgtctcaaaaagaaggaacccgctagggaggcgggaaggaaaagaaacctcgaacagggaagagagaaaaaaagcattggcaggcacaagcggtccctcccctaggacccggatgtaggtaaaagactacacttcccagaatgcaccacgcccgcctggcaactatataaatagtccatccgggttcttggagatgctgtttggcgactcgtcgccattcccggagcagctcggcctcggcccagaggcgagtgtcggtcgctgtgtcggagaccccggtccccggcaccgagacagccagccctctctcctgccccgcggcgggagagcgtgtccggccggccggcggggctcgcgaccctcccgcgcctccctttcccccgcagcctctgccccgccaggcccggcccggacctccgagccccggcctcctcctcctcctcctcctcgtcctcgtcctcctcttcggtcaccgccgcctctgggccccacaaccccaccttgccgcttctccttccattttgagaagctgaggaaggaaacaaggaaaaatgtcgccatgaaggccgagaaccgctgccgccgccgacccccgccggccctgaacgccatgagcctgggtccccgccgcgcccgctccgctccgaccgccgtcgccgccgaggccccctttgatgccgcagagctcccccagcgccgccgccaccgcctccgacatggacaagaacagcggctccaacagctcctccgcctcctcgggcagcagcaaagggcaacagccgccccgctccgcctcggcggggccggccggcgagtctaaacccaagagtggtaagagccggcgggtctgccgggtcacttgggggaggagggacaaacgacccaccttccgcttgcactgacatccagtatttacggttaagccgatctgcgctgcgtggttaatttgggcccttgcattcatattcaaaacagctggctgaagtaggcgctattcttagccccattttgcagatgagggatctgagattttggaaagggttaaggtcatccaggtggcaagcacctcacagaaggcctcaagac

SEQ ID NO: 30435 - DNA, 1174 bp, Mus musculus
tccgggagccagccactcgacccggggctccgccttcagggtgtgtgggcctccgcacgcgtgccgcgcatcgcccgggcaaccgacgctgtgcgcggtgcattgtggtctgcaacaaaacgcgggggaaagatcctgagggaaccattgaatccgctagccaatcgggagaggctggcggtagcggatggccaatagcgacgcgggccgggggcggggccgcgggcgcagggcggggcctagggattaggcggcggcggctggcgtggggcagcttagatgcgccacggcttcggtagcgaccggctgtcttctgctgcttgagcggcgcccgcaccttccctaggagctcgcagcagccggctggcctctgctccacggtgagaccgggctcgggtcctccccgtcccccctacctcgggcctgcggtgcggacctcgggagctgcccctcggaagcgggtgggggcgtcgtcctcaaggggggcgccggtcgggagggcagcgagcgcggcccgcacccgacccctctccctcttccctgcgcttcgtcaccacacaggtaaccatgtgcgaccggaaggcggtgatcaaaaatgcagacatgtcggaagagatgcaacaggactcggtggagtgcgctacccaggcgttggagaagtacaacatcgagaaggatattgcggcccatatcaagaaggtgaggacccggcgccgcgtagttcctactccccgattctgcgtcctctgggcgcctggcagtttccctgtagcactcagggcggctcgggatggatagttctagaaaggacgcaagggtttcgcgttcctctggggaagaccagaccctcaacgccagaagttttttttttttttttaaacccccagctccttgggggaaagcgccacctagcaacggtttccaagatcagggagttgcgagcagttccccctgctgtagaattcctgcgccgaggatccatctgggtgttccgggaggggggggggttgcgcctgcctgcgtgggtgtttccagccgggctaggaggagatcttgccagccttctagtcgggagttagtcgacagttcagggaaagtgggtggcagtggtggtttggggggcttgggtggaggcttggtaaatggcagttttgtagaaagctggcgcaagact

SEQ ID NO: 30436 - DNA, 1860 bp, Mus musculus
gttcccttggctgcacttggcttttttcaaaactctcatgtcttgggaaaaataagttcagcaagaaatacttggtactaataagtttcctaatggataaaacctggaactaggtttggggagtgtcacattgattgtgaagcacagagtggtaaattctcagaggttgaaagcctgtgataggcggatttgtttgcttagttgggagcttttttggtctctggacagttaacttagaccagcttctcacagtggcttaccatatatacttcagtatatttctctggttctctgccccatatgctttgtgacttgggaacccttaagaattaagtgaccacagagcgtagaccaccgtaggcatagccagctctcatagggcatttagcacggctgaggttgtggtcttctcttccattctctgcctaggacttcctccatcaggcagctggcaggacctgaaagatcacatgcgagaagctggggatgtctgttatgcagacgtacagaaggacggaatggggatggttgaatatttgagaaaagaggacatggaatatgctctgcgtaaactggatgacaccaaattccgctctcacgaggtgggttcctgccttccattaagtctaattgaccagcaataatagcgggtcgtacttttttcatttgatgatgtcactctaccttaaagcctgtctagagtgaacagagctacgggggttgctctgcttatagcctccgtttgaaacggagaggacgggtacccacctccgtgtgacagtgaacgttgagggaggtgacaatgccaggcacacagtgagtgccagggctgggctttgctcgtgcctctgggtcttcactcttcccttctgtttgtttggatttcagggtgagacttcctacatccgagtgtatcctgagagaagcaccagctatggctactcacggtcgcggtctgggtccaggggccgcgactcgccataccaaagccggggctcgccacactacttctctcctttcaggccctactgagggggtgggaaggaagggtctcttcagttttttagatgagctgggctactttgtgctcagagtctacattccagattgattagagtcttaggacattttttttcttttctttccttttatttttattttattttattttttttattttaaggaactacataatttcggctagagccaccatactagcagtgacctgttaggctgcagagagaaggtgtgtctgtggttcaggaacaagctgtacatttttcaccctgactatgggacggaaatcagtgctgcatcttcatgggctgctctgctcggagatggggcccgaggggcccgttttgttcagaaatatattttaaatgtttagtaattggcgtgcagttgtctttgattgagtatgtaggtttcatctgataggtactgaccaaagagaaccatcatttgagttgtcatggaagtttgtaaggaacagaaacttcatcactctgccagagtaatggtggcgattgtaaaaaatcagcaccaaaggcagactctgttttttttattttaaaggttggtttttatttacatgtttatgccgcgtgtgtgttagtgcctacagaggccagaaagacagcatcaacccctgtggagctggaattgcaggaggtcatgggtcaccttgagttgaggtgggcaccagagcccgactcagctcaggatgaagaacaggagggtttgtttctttggtttgatgtttttctttctttccattttcttttccagagagggtttctcagaataattctggctctgtagaccaggctagccttgaactcagggatctgttggctt

SEQ ID NO: 30437 - DNA, 1100 bp, Mus musculus
ttccttggaagcaggcttgtggttttctgctagctgggtgttgtccagttgtcttcggatcaattaccaagaaactgtaaatccagtttatactagatagagttcacagtagcaaatgaccacccttgtgagtccaccatgttgacagggtgccccttccccagaatagctactctgctgtggaagaaggaatcttgtttaccatgtctggcaaggaaatattacctgtttgaaaaataagaagaacattagagttgagcctgatgtccagctggctctcctaaactaactggtcacttggatttcacggagaactggaagtaagtattggtgccgtccttcttcctaactctcaagcatcagttaacggttcagagtgaagccagatccctgctgttcagtgcaaggaacagatgcaggtaagagtgaaagacagactaaacctctgtcaggagcaaggtcctgtctgcagtgtgatccgttggtacacatgatgaagtaggaggaactactggccctgccatggcagggttgtaaggatctttagccagccaaggcagacagcatggttagcatagagttccgtcctcccgctcacagggtttattgctgactgctggcagctctgagaactcatgcacaggagacaagaagttctaaactgtgtacagtgagcctggaaatgcaagttgctatatcagggattacaaaccatggctggctggcatacttacaggtatgtttctgctggcctgtgtggcactgttaagtcttatttgaattgattgccaataaagttgaggaaatgccagacagatgtcatatacttaatttcccaagcaaataggcttgggttactctgtatggaggagccagctgtgcctgtagacaggcttccaggcacagagatgtacagtctgctgcgcacaccccttaatcctgcacttctctttcagtgtgactggaccctaaaggtgaatatgactcctggacacttgtcatttacaatgccaccacttgcgtgcagtttgtccttttgcattcagatagtacttgtctccagcaagaatgtctgagccactctgggtatcacatacctg

SEQ ID NO: 30438 - DNA, 1245 bp, Mus musculus
tgagctgccagccgtggatgggtgatagtcacgtgcagaacaacagatgctcttacctgctgagccatccccttcctcggggagctaccttgcgcttgcttgtcttaccatctacttcgaaggagagatggctcagtggtgttagagcactggctgcttctccaggggtcctgagttcaattcccagcaaccacatggcagctcataaccatctgtaatgggatctgaatccttcttttgtgaagacagagtacttatacataattacagaaataaattaaagttacattaaaaaaaataagaaaaagctctgggaaagttgacatttttatgtcagtaaatctatgccagtaaaggcacatttccattttgattttatgtattacctctttcgattctgagcattttctggaaataactaattgacatcttcgctccgcagcccttcccctggggagacggtaaccataccctcttccacaaccctcatgtgaacccacttccgaccggctatgaagatgagtaaagagaacctggcctcccccaggcaacaaagggaccacagcactggttttggacccttactctgtgtggaccacgaaaaccctttggatgctaagctcgtgtctcctttcctcagatggcgaccattactctgatcttccatcccttctgcttgtaagaggagatgccttaaataaataacttaaactcagatggtccgtgagctggacggtacgattttattctcagacactgacattgctttgctgttttgcagtggttcagatctggtttagctgaccgaataccgtttctagctggctccctgctggtttcttgtgcttagcatgggtagagagctaaatgactaagagcagagagaggtagagttaccattgggatgggctccctgacagacagtggatgatcaatagaattgccgctgattaccatctgtaacacatgcgtgacaacttcaaagactgggctgcattgcaggtttcaggtcagtccaggctgcacagaccctgaacaaagtacatgagctttagtcagctcttctcgtcacagcagctcctgttgcaatctacaaaaggagctgagttcttacctttaggaaaagaatttctcaggcagacagcgatggtgcgtgctttaatcccagcacttaggcagaggcaggcagagctccaagatcaaggacagcatggtctacacagcgaattccaggccagccagggc

SEQ ID NO: 30439 - DNA, 1145 bp, Mus musculus
tgcggctcaaacttttgttgaggctgctcccggagcggcgggaacccaacctgagcggtcccctactccagcccggccccggcccttgccttgccgaggccccggtgggcgccaggaaggctctgcgggacccccctccccaatccccggcgagggcaggggtgggggggccggccgcggagagtgcgcgcgggcagctcggcgcgggggcggcggggccgcgccggggtcaccaggggcaaaggacgggggaggagggggaagggctccgggcctgggctggtccgaaggcgagtgtgtggttacagaagggctgcgcgaatacttcggccagttcggggaggtgaaagagtgtctggtgatgcgggaccccctgaccaaaagatccaggtgagtcccggagacctctcctgccaccgcgctcgcccctcccgccgaggccactcgctgtccttgtaaccatctgcctctccctcactaccggcgcaggggtttcggcttcgtcactttcatggaccaggcgggggtggataaagtgctggcgcaatcgcggcacgagctcgactccaaaacagtgagtgaccctcggggtttcgggggtcctttgggagagggaggctgccggaggagagcgatccgggaactctctctcgtggggacagttgcatggagtttgcagagtgagaaagctgtcatgccctgaaagtttgtcagtggagttagggacagagggaggaaaggaaaaaaaaaaatctcaggcctgggataagatgccacacgccccacctccagtgttggtgagggacgcagcaactactactctttctctgtgagtactaatcttggtacttctggctttggggtggagccgggcccctatcctacccccagattgaatgagtcagggctacagttacccacggtggcttctctgaaatctaactactatttgactctgtgacacccccttttccattccagaccaatggcaaagcatcacagagccctcccgctcccccccccccttctccttcccggactttggtcagtgagctccttgcttttgtagaagacacgaaccttctttatccttacagggtatttatgaacagggagctagcttgcaaggaaattggaaatagggg

SEQ ID NO: 30440 - DNA, 1153 bp, Mus musculus
ccatgcgctcctggggtaattaggaccatgtggtcttcctgaaacagggctgggggccacggggaggctgcccgaggttggttggcttgggaggaaggttgatgaggaaactgttggtgttcctttcggtgacacccccgtggtatctttggtgtctcccagaagaagtggtgggatctttcatgctaggcagtgagtctaggcccttggcatgcctcccctgcccccatccttgtaaggttccttagggaaccttccatacgcagaccccagggagggaggcacactagagccagccagagtgtggggcacacagctgcccgtggcaggcctagaggcaggagtccaaggaggagctgggaagggggccttggagaagctggggccaccgagagcttgtcagctgccatcctggcaggaggggaccccaccccccacccccgccacagcccctgctgatgagggggaggccacaggactcagatgcccacttgctccttccttcccctgacagatggtcactcggacgaagaagatcttcgtgggggggctgtctgtgaacaccacggtggaagatgtgaaacactatttcgagcagttcggaaaggtaggtctttcactgtgggtgttcctgggaaagccccagagtatatagatcaggaggaaagagcaggcccagggggtgggtggcaggcagtcagatcaccccacaggtgaggtcagaccaagtcacagtttggggatctggacccatctgtggggccccagactctgggcctcttcaatagagtctctcattacctttctacctttcctctctatttttctcctgctcttcactctccccggggaggaggcacttctgtagccagttcaatccagcgctcccctccccttgccctcttgggagcttgcacctgtccagaccacaggcagctgcaccttccttccaccaacccccccttcctggagaggatgataagaaagcaataaataagaatccttattgcagttgggtaccccccttaagcaggtggggagctggggatggctgctgattcccccaggtattggaaaacaccccagagtctgccccagctcctgagaggtcactagctctcagctcttgggtgtgtcaagatttaatttctgg

SEQ ID NO: 30441 - DNA, 2029 bp, Mus musculus
tctccctggtcgcttttatttatttttggattagccagttgccctacccccacaccagatctgccctctcctccggtctgccccatccctccctgctgccccctttagggcaccccccccccagaaaggcatagctggagggcgggcagagggggcctgctgcagactgaggccccaacccggtttttttgtttgatttttttaattctggcttttccctctttttgctctttacttttttttttttaagaaactgtttttaaactatttctaggtttgtgaatgtgaagccccaggccgcagggggccaggggccaggtgccccccacaccagctgagtgtctgtgggtgtgggttcctggccttctccctcccaaccctggagaggagggcagggctgcggggtaggccaggccgagcccctggagccaccccgtcctgtatcatatgtaaatactgtgaggtgaagccctaccccacccttccctaagacccccttggggtgacagcatttgtctgaccccacagggcaaaagtccctcccccgtccccttctccctgtctctgacccttcttcctcagacaccgttactgtaaggttgcagacctcagctctggccacaggcaggcccatactctcaggccctccccaagttcaaggccttgggcggactcttcccccaagaaaccccctggttaggggagcaaggggccaggggagaggagggcttgcctagagccactgctgggaaggaattggctctccaaaggcccctcctggcccccgcctagatgggaccttcatggtttctgctctgagccccccaacccccacccaggagtgggcatcgggaagcgcttcagcaaggagtagataccaggaaagcaaagggcttctcagggaacccccacatcctcactgaagtttcccaccaggatgatcccgtgaccagagcccttggtaacccccaccccccaccctggagacccttttttttgggggggagacgggggctcagggtgtgaacatgaggtgagacctggcatggcagggctgagtcgtgcctgctgtcagcccctctctgtccttcccgaggctgaggggggcctcaagctcccttccccagcagagccccacccacccacccaccccgccttcaaagccccctttggagagttaactgtccgtgtgaggcgctcactcaaccaataagccccaagaactcaaagcaataatcttcgttactgagatgcgcggctgttagtgtttgttgttggtttttgttttttgggttttttttttttttttggttttttttcggtttttgtttttaataattcctaataaaagagaagctgcatttttattggattttatctttaatttttctacacatctgaggggagcctcaggagactttggcttcctttcttccccccaccccctattccctggaccctctcactccactggacctaactgtgggttcgtggacctggatttacatttctgattcgtttgaggaaaaaaaaatttttttcttttgaagatgttacatggtgttttgaagccagcaagttccaccctcggtgtctttttccctccgcatctgtaacttctttttccaggttttattttgttttaaattcctaataaattatttgaaaataacttgcctttattcatgtgtgtacgtgagtgcaggcacacacacaatattacaaaaatagtgtttataactcatagggccaggtgtggtgtgtgcctgtaatcccagcaatcagggccagagcaaaagaatcaaactccaacctagcagggctccatagtgaaaccctgtctcaaaccaacaggaaaaagccagcaagtggttggccaccacagtcccagaatttggggctgagactggaagctccctgcaaattcgaggtagatctgggccatgtagttccaaaccagccagagctacacaggtcccgactcccactccaaacaaaagccccaaccataaaacattctggggtaagg

SEQ ID NO: 30442 - DNA, 1112 bp, Mus musculus
tggtagatagaaccattcaatgacaccgcccccacgcaaacccaagcattccagacacaaaggcaggagtcatctccaccctgccttcctccccgacttcttacggtgtctaacaggatagttgccccaggtcccttgaagctaggctaaggagccgtgcgaggaggcaggagtatcagaagctcagggtcaggcttcaggttaagatcataccgctgtggcagagcaccaagttccattcccagcattcacgtcggtggctcagaacccctgtaactgactccctcttctggtctgtgtggcgtctgcactctcacatgcacacacaagggagctagtgagatagatcgcgcttaagagcgctggctgtgctgaggttttcatctttgcccgtctattgtaatgcaaagtgcgagcccccaatacctctgaccctgccccaacttatttctgattggtaaataaagatgcagacagccaatagctgggcagaagagacatacgtggggtttaggtgtttaggtttcccactcttggggtcagagaagaaggagaggagaagaggaaggagaggccatctttggttaggaaaaagggaaaacgtcaccacgtgggctgaccaattggagataagagcagtccagatgaaatatagtaagtaataactcggggttatcgataggaaggtagattctaatagcccagagggtaggcagctgcccagcaactatgctgcttgaagcttattgttgtgtgtgttccggagtctaaatggtctaaggtggggtagaaaccttgggcctggggctggcgagatggctcagcgggtaagagcaccaactgcactcccgaacgaactgagttcgaatcccagcaaccacatggtggctcacaaccacccataataagatctgatgttggtgtctgaagacagcaacagtggacttattataatataataaataaatctttgggccagagcaagcgaggccgaccagagcgagcagaggtcctaaaattcaattcccaacaaccacatgaaggctcacaaccatctgtacagctacagtgtactcatatacataaaaataagtaaataaatatctaaaaga

SEQ ID NO: 30443 - DNA, 2001 bp, Mus musculus
aaagtgggccagggagctcagagtttaatgccgaccgagctctattttgggaagatcaggttcttacaatgaatgtgactgtcgtcaacgacgctgacatcatccttaagatagttaacactacctttgatgctattctagactttatatgcgtattttcttgtgtctaaagtcataaacaagaaagcctcgttggaaaaagtggttaacgttaagcccaactttacaccttgacgcgggcggttgcctccgctcctttcccccgccccccccccccccacccgcaggctcggagaccagtctattagcatgttcggtcccataatgctttgcttcatttccgctgcttaaatcttaaataaaaccagcacgcctctccgttctatcacatagagaatgccaagagaatgtccttgctgctctcatttccagggtagcgataatggagggttttcccgtttgctcgaaaccccctttttgaaatagggtcctcgtctgctaggaacgttgcgctggggcgggagttctttagctttgcgcagtggcagtatcgtagccaatgaggtttatccgaggcgcgattattgctaattgaaaacttttcccaataccccgccgtgacgacttgcaatatagtcggcattggcaatttttgacagtctctacggagactgaataattgtggtttaaaaaaagcatgctactttttagagattgttatagaatcctagtttacttttgttaagataatttcatttttcagcttttcctaccgtcttcctatgtgttagttttctatttccttgacaaggtttcctttttctcctgctatactgagaagtctgttatccctggctgcagcaatcctgtctccgcctccggtctcctcaaacttgtatcagtgactggcccaacactcagcaaatcctcctgtctccgcctccggagtgctaggtttacagacctctaaaccaccaccccgaggtcagcctctgcttcggaccgtcacgacacatgtcctttcatcccttctggcttaccctccttctcccgctgcggttgagcctccacccaggccatcgcgatgacgttgactcgatttgcataagagtccccagcatcccaagcgactgccgcgtagtttgcaaaacacggatgttcgggctcgagataacccactggcaagaacgtgtccacgcagataaccgagatggaaccgccgggctccgctcccgtcacgtggaggtcgcgcgtggactgaagctcaccgtgactgaaatgggagtcgtcagccctgggaggctgagcgagcacgcttactcgtcagctttgcgcagtggcagtatcgtagccaatgaggtttatccgaggcgcgattattgctaattgaaaacttttcccaataccccgccatgacgacttgaaatatagtcggcattggcaatttttgacagtctctacggagactgaatattcatgtttaaacattagacttgcattctactttatagttttctgttttatcctgtatttatttaatttcaagtttgcttattctctgcataggctgtaaacattatagcaactgacaaacttgtattacgtctctctgattttccaaatttccttgcggtattgtttagtgtagatgcgcacacacaataaggaaataattttttttttttatctgaaagaacttcacgaacaccagtaccttttgaaattagggtaaaacgaacattgattctggtgatttacattacaactggctttcagaaaccctgaatacttgaagctctgggccggaagcctgagttttttttaaaaaaccttgacagtgcctggctatgtagccctgcttgatccgcctgcctctgcctcccaagtgctgaattaaaggtgtgtttcaccttgagcagcttttttgtttgtttgggttatttttttaagagataaaccggtgagttagctcagtggatagaagtgctcgctatgcaagcc

SEQ ID NO: 30444 - DNA, 1651 bp, Mus musculus
cagccagtgccgccacgcactgctcgcttggggccaatccaccaatggaaactggaacctcaccccctcagcaggcacaggcgcaggacaggactccgggtcggtcctgcctgtctctcgtccctaccacctgctaaaggggcctcctcccccttccgtggctctcctgggctctgtgcacttcatcttccccagaggtggaagctgctgcccagttgtcccgtggatgtccctaagagccagcacctcacactggagcctttgacagtcacctttccacagtgtggtcattgggagggcagagagggtcagctaggggctctttttatccttctccaaacccctactgtattggggacaccgggccccactagacaatgccagcataaagtcacccatgggccatcaaaggcactttgggtgccaccacccagtctcccagagtctgggtgactgccccgtttgtaccggccccggggtctctgagaaagcctcctccagcaataaccttttatatagacacgtgcttcatctctggggacggcgtgaggtgggagtgtcacccgcccacgcctcaacactgtaccaaatttgatagatttctacactgaggttcaacttcgtatggctcaagttgcttttatgtatctccacaagatgattttgaagagatttaaagaactcccccttttgtactctggtctgtccttgccgctgggtcagcccgtggcattggttttggtatggactttgctttgtatgagggggaaatactttgtatctttatgttatttcttagcacaatgagctgggagcggcccttgacgacttctgaaacctcgcagctcccgggactgtttttaaactgctgtattttcaaacccttccctcactgcccaggccaacgggctcttcattaagaactactctaagaatgtccagccctttggacctggagttttgaacctcacgtgtcctgttcccaaggcaggcaaaggggaaagacatatttgggggtctgcttcctgcctaagtaagccatctggaaccagcctctgctccctgtgaaattttttttggcgacaaggagaaacccctgaattttctcagcctcctcattgcttctctggggctcgctcttcttccttctcaggaaagccggtgtctgattttgaccaggaagatggtaaaggatctctggtctccactccactgggcgcatctctccctccctcaaacttcctgtcagctgaccggggctaaggctgttccctttcacaggtggggtttgtgttggggggctggggaagggggtctgagaatgccccaagctggaacaggggagcctggtaggagttggggcagagggacaagatccctattagagtaacgaaaagtcccagagctcccagtccaaaggatgagatgggagcagccagcttggaaatggctggggaaaaaggcgtctggaaaagggattccagacaattccataggctggggacctacaccttacatcagcttcccagtagaggaccagcgtgatggggtcccagacaaggatccccagtcaaggtcagctctggcagtggctgcagacaccggcacttccacccacaggccttactgctctgtttacagtgacctgctc

SEQ ID NO: 30445 - DNA, 3806 bp, Mus musculus
tttccgagacagagacaaagatttttgggtctggtagtaccttttatatttcacaacctaagatcccccgacctctctataatttgttttctgtgctttttaagtctgtctcttccctgatcagagtcactttggtcacccaggcacgccttatttaaaaagtaaagcttaagatttacttgaggcaagtcttccccctatagctctggctggcctcggattagcaattaagccttacctgtctttacaggtgtggcaccacacccagctaaaagttaatttttggctgtgacagtaattttgtgatactcgtaaccagcaaggaagctggatcagataaagacagacgttgggctcgggtggctggctcctagcgagaagtgtcacacctagggtgaagcaatggggaggtagaggtagcagggtttcgggttttgctgggtattttttgtttgttttcctctcaatgtagtttttcctggcttccttcatagcaacttttggatgattatccaaaatgcttcattgtgggagcagacaacgtgggctccaagcagatgcagcagatccgcatgtcgctccgagggaaggccgtggtgctgatgggcaagaacaccatgatgcgcaaggctatcaggggccacctggagaacaacccagctctggagaaactgctgcctcacatccgggggaacgtgggcttcgtgttcaccaaggaggacctcactgagattcgggatatgctgttggccaataaggtaaggggctgggacgatgaatgaggatttggccatttcggggctttcaccgatggagaggcatttcaccgtcgactacctctgttctgtttaggtgccagctgctgctcgggctggtgccatcgccccgtgtgaggtcactgtgccagctcagaacactggtctaggacccgagaagacctccttcttccaggctttgggcatcaccacgaaaatctccagaggcaccattgaaattctggtgagtagatggcctgcagtggtcggtcctttgggctgggcctcctgtgtgtccagatgataactgtcctgctgttctcttcctcagagtgatgtgcagctgataaagactggagacaaggtgggagccagcgaggccacactgctgaacatgctgaacatctcccccttctccttcgggctgatcatccagcaggtgtttgacaacggcagcatttataaccctgaagtgctcgacatcacagagcaggccctgcactctcgctttctggaggtatgtctgcccagctccttcctcccatgctgagtgtgacaacagattcgtgctggcatcttcagttgttccatcttctcatctgcagaaaatagagttgggcaggaggtcatgtgctgggactctaaaggttgttagcctgtgatagcaaaacactgcctgtgggggctgtgtctaatcccagcggaggcaggcaccctcttgtgagtttgaggacagctaggtctcaaacaaaatagaacattgctggtcggtgagattttgagtattgagtcaaggagagatgaatacaatttaatgctaacaatttaaattgttattactctatctttttaaagactgtcccacaccaggcttttgccattaaattgaccttttttgttttttgatttgttttgttttgttttgaggcagggtttctttgtatagccctggctgtcctgggctttgtagactaggctggccttgaactcagaaatcctgcttttgcctcccaagtgctgggtttaaaggtgtgcaccaccactgcccagcttaaggaaaattgtttccttgagtgaataacttactgaaattagacatgcatctatagatttagcattttaatcttaacatttttttgagttatttatatagtttatatttctaactccaaccatgcccacccccactcataattcaagattgggaaaaggtttcattactggtaaatcacatctggaaatggattaatattctaatagtgctcagtaactaggctaacagagtagattttcagaagtcactgtaaggaatattgaacagccaggtctggaggaagggtgagcacaaactgatggctcttggctctgcccaggcttgagactgaactgaggggagctaaaatgtcattcttgtctgcatacagggtgtccgcaacgtggccagtgtgtgtctgcagatcgggtacccaactgttgcctcggtgccacactccatcatcaatgggtacaagcgcgtcctggcattgtctgtggagactgagtacaccttcccacttactgaaaaggtaaggctgtcctttcaggaccacagaggcctgacgggttggcaagtggcagtctgctgagttagtgtattcatgctatgtcacacagtaggtaccttgtgagacaagacagggtttcatgtagccaaagctggtctttttttttttttaagttttattatttatatgagtacactgttgctgtcttcagacactccagaaaggagtatcaaatcccattactggaggttgggagcttagattttcagaattcccagtcactgcttttaaccactgagccatctctccagccccaaagctgatcttaagctgtagttgggtgaccttgaatccaggttggggcttgttactagtaccagtgcttccccactaagccagcaccttaccaactaagctgttaaaccaagctccatgtcctgtttggtattgggtgaaaactgggtggcctttcattcaggctagagtctgccctgagctagtcagatcctttgttaataaaagtggggggaaatgcatattagtggaggcatgcatgctctcattttaaaagactagacccctagagctgggcccaagtgtccagccagcaggctatgctcagaaagaacccctggtgggtaatctcactggaaagctgccacaggacagtcagttcttagcaggaagagtgtaggtggtagaactatgatcatgctgactgccttttctccctcaaggtcaaggccttcctggctgatccatctgcatttgcggctgctgcccctgcagctgctgccaccactgctgcccctgcggctgctgcagcccctgccaaagctgaagcaaaggaagagtcggaggaatcagatgaggatatgggattcggtctcttcgactaatcccgccaaagcaaccaagtcagcctgcttaatttgagaaagatggaaataaaggcttacttctcttaaaactccggtctggatttatttagtttgttcacttaagcaggatgaaaaagcaaaaccgctactgtttactttgtgttggcatctttgtttctaaaattaaagctcctagtgtttttgtgggctttgtttgttttttgagacagtctcttgacttggtgccatagctagtctgggacaaagattttccaggtgtgaattaaaggtgtatgtcatcaagccccaagcctggcctttatattcctatggtagtccatgttggatatatatcatatgtatacataatatatatgtatactaagctcaatggttaagagacctatgagccataccaaatctatatggtttggtatctgggtctgctttctgtatatcactggatgtccaagccattgttcataggtagccttactgctccaaggcagagtgatgcaggtccagagccctgttgcttaaggctgaggcaggggtagaaggctgggtttgagctaggcgtggtttaaggactgaagtctgagagggcctgagatggtgatactgag

SEQ ID NO: 30446 - DNA, 1150 bp, Mus musculus
caggagacactagaagcctggatcatttgagagctctaggtgccaggcgtccatgattgtccctccgccccatgtacctgccctccacaaccagtcccttgggtctctaggtgggctggctttccaggcacatctcatagcctgtggactcctgggcagaaatcggggcattgggttcagtccagctgggattcccactaatagcaggagaggctcaggggccctgcacagggctttaagccctggggacatgtttgttctctctctacaggtgcttcccttggaggctcttgtgacggacgctggggaggtaacggagatgggcaagacctatgtgcctcctcgagttctgcaggaagctctgtgtgtcatctctggggtgccagggctcaagggcgacatccccagcactgagcagctggctcaggagatgctaatcatctcccaccacccgtccttaggtcggtggctgtggaggaggtggggaggtggggaggtagcaccaggcagaaggcttcaagaagcccctcttcttcagtggcagtacagtctggactctggccagcacttcttacaaggatgaagattgaccctgacgccttcatcaccaggcacctggatcagatcatccccaggatcacgacacagagtcccctgaaccaggtaatgggccagggcttcgggattccctttccagggtacaagacgtgagggctcaaagaagcaggaggaggaaaggtacagtgtagcctgccctctagacagagacagatgagtactgctcggggcatagaagggagctcagggccccatggcaggtggtgtctgaggaggtgagtccctgggatgctgttgtcaggtcagctggggcccttaggacaggagaggtactgtctgtctgtcccccttcatgagacttgtctgatctcccagtcactctctctgctttccagtgtgtgagccacattttcttttctttttttttttttttttctcgagacagggtttctctgtatagccttggctgtcctggaactcactttgtagaccaggctggcctcgaactcagaaatcctcctgcctctgcctcccgagtgctgggattaaaggcatgtgccaccacgcccggctgtgagccacattttcaaat

SEQ ID NO: 30447 - DNA, 1984 bp, Mus musculus
cacaggaggcgacactcctgggctttgtcaggaacacctcagagtcttttggggggggggggttggttcaagacagggtttctctgtgtagccctggctgacctggaactcactctgtagaccaggctggcctcgaactcagaatccgcctgcctctgtctctcaagtgctgggattaaaggcatgcgccaccacgcccggctcacacctcagagtcttatgtgttagatttggaattagtgtttggctggtgtatattcagaaatgtttactgtttcctagtgtctcacaacccctacattgacttagggtgtggccccatgtagggctgggaacctcagtttaaggagctatggtttcgacccgaaacagcactatagggttcttgttgatggttgcactgtagagcgggtgtgtcgtaatgactgtggaactagctcactgctcctcaggtgctttgtttgacactggagcagtgagattgggctcagctgtccctgatgtgacgacggctgctcccgcaggtccaggagtctgtggccagctgcctgccacctctcgtgcctgctgtcaaggaggatgctgggggcatgatccagcggctcatgcagcagctgttggagtcggacaagtatgcggagcgcaaaggggcggcatacgggctggcgggcctggtcaagggcctgggcatcctctccctgaagcagcaggagatgatggccgcgctgactgatgctatccaggacaagaagaacttccgaaggcgagagggtgggtcccctgagcccggggctgacggcacaggaagtgggtgcccatgcacgcacgcacgcacgcacgcacgcacgcacgcacacagcagagaaagggagggcaggtgggactcctcccagccctgtccatggtggggctgacctgcacttcgccctttttctgtctggcactgcttgggctgaaccccaggcttcagctattccacgcaggctgctctgctgccgagctgcgccccagcctttcttatttccgtgtttcaggctaaggagtccctaagttaccaagcacagcctacaacttggtgatcctcctgcctcaggttccagagtgcagggatataaacttgttcccctacctgctttatgacttctaacacagcagagagaggcttgcctagtggtactagaaagtgttggaaactcccctgcctcctcctctgtcgccctctgccacatccctgcccaaggactgagacaggcggctgcacttaagtctgtccatgactacggtcgcctgaggaggtcccaggagcctggtggccttagcgttctcagccctcctgtcatcctctccccaggagcgctgtttgccttcgagatgctctgtaccatgctggggaagctcttcgagccttatgtggtccacgtgctgccccatctgttgctgtgctttggggatgggaaccagtacgtgcgcgaggtaagtctgggggcagaatggactgttcccaggcaggcttggtcagggaggggtctaagatgggttccagcccctgctgccagaggcctgtcggtgcctacctgggttaccgctatgaatttctctctggttccctgatgcattgaggattttatttgtgtgtgcatgtgtgctatgtgtatgcctgtgtgagcacataaggagattccaggagctagaagaggttgtcagatgccctctatcccctttcagctgggctggaaactggcaaaccccagctaacccttcatatgggcacacacatgatgtcctggcttattacgtggtcctagtgtccaagcttccgtcctcatgattgctaaatgagttgcttctctgtgtagccctggctgtcctgtagaacaggctggccttgaactctgagatctgcctgcctctgaagtcctgggattaaatgccatcagtgtctggcccagacacgtgctcttaactgctgagccatctctctagt

SEQ ID NO: 30448 - DNA, 1126 bp, Mus musculus
ttttcctattttaagagctattgcaagctggacacagaggcatgtgtctttaatctcagcactctgggttcaaggccagcctggtctacagagtaatttctaggccagccagagctatgtagtgagaccctgtctttaaaaaaagctattgcagtaagtagccctccctctctctctgtatgttggtgttctgactcccaagtttgtgacagggtcagatctgtctgagtcaacgccttgtgttgttacaggacttggctccttacctgcccagtgtgacacctggcctgaaagcttcactcttggaccctgtccctgaggtgagtgtgggcatagcccagtgtctggaaaataccttcctggaaagtgcccccaagtcacgtgtctgtctctcagtcgaagaggagaaggccaggggctccttcctgcttccctgctcctcactgagctgcgtctcctctccctgtctgtccttgcgtatatgacaggtgcgcaccgtgtctgcaaaggctcttggggccatggtgaagggcatgggggagtcgtgctttgaagatttgctgccatggctgatggagactctgacgtacgagcagagctccgtggatcgctcaggcgctgcccaaggtgagaccagaacaagcccagaggccgaatagggaacccccgaggggctttcgggtcccatggctgattccatccttgcccttcagggttggctgaggtaatggccggcttaggagtggagaagttggaaaaactgatgccagagatcgtggccacagccagcaaagtggacatcgcaccccacgtccgcgacggctacatcatgatgttcaactacctgcccatcacctttggggacaagtttaccccttatgtggggcccatcatcccttgtatcctcaaggtaggtaccagtgaccgtgcccaggagggagggagagggaggatgctgctgtcctcccgagctagcttggggccagctgccaggcatccccgcagaggcagcccgggttgaccgccctctctctgcgtgtctaggctctggctgatgagaacgagttcgttcgtgacaccgccctgcgtgccggccagcgggtcatctcgatgtacgctgagacag

SEQ ID NO: 30449 - DNA, 1168 bp, Mus musculus
acacctgcagtaaggcccatggcccattgagagcgcaggtgcttctgtgaagtgtgtttgaagatgcacagttagtgagcacggaccagctggggcggtgggaaggcaaaagcagctgttccagctgggtctgccttaggtgcacggccccgtgaggagcaggacgtggcctagggaaagccagggccaggccaccatagctggagggatccattggggaggagccgcgctgtgtgagatgagctggcagatgagctggcgtgctgggtgaagagaggcagggtcagtggtgcagaagacgtgcctgggctggactgataattcaccttggcctgtccccttcagaccacttccggttcctggccttggtaagcatactgtgtatttacctttaaagaagaattggtataaaggctcagagacaaaattaatcgttctccttaagtcatttgttacaaatgagttcttttgagggagagcagtgggtaagtgtcagtgagcggggcgggggctggctcgctctctgagctgaagagcttcatgttcatgcgtgaggctgacctagtctttcttgtttatgtaagtatttatgacttattttggggacgaggattgtgtgggctaacctctaacttgtggtcctcctccctcagcatggccccagtgctgggccaccgtgcctggtctctaccacactgccttaaagatagggctgtggttttgtttttaaatcatgtataagtgataatgtctgtgtgtgagaagtcaggggaacgtgttgggtcccctggagctgggcaccaaacaagtgaagtgagtcagggctctcagcactgagccacctttcagcctattttgttttgttcactttggtttggtttagacaggacctgtcgcaggctggccttgaactcatggcagtcagccctcctgctctagcccccacacactgtgcgcagtggcaatggtagctttcttttcactatgatttcagtgtcacctgagaaggtggcagctcaggtgaggcctgggtgtgcagagaccaggcgagctgccgcctccctccctccctctctgctgacagatcgcagcgaggacgctgggcgacctcgtccgcaagctcggggagaagatccttcctgagatcatccccatcctggaagaagga

SEQ ID NO: 30450 - DNA, 1192 bp, Mus musculus
gccaactgtcaggctgtgatcctctcagtggaggatgacactgggcaccggatcatcatcgaggatctgttggaagccacgcgcagccctgaagtgggcatgaggcaggcggcggccatcatcctgaacatgtactgctcccgctccaaggccgactacagcagccaccttcgcagcctggtctcgggcttgatccgcctcttcaatgactccagccctgtggttctggaggagagctgggacgctctcaatgccatcaccaaggtgagggctgctgaccagagctgccccacggttgcctggtctgttctcctaggtccaggcatccggtggtgggatgacaggtttgggccaccgtggggggcctaagattgcaggtatttgtaaacatgactcagagggaagctactgctgccattactcggcctcagtactggtgacttgtggccggcctttcttgccctttttgcccatgtcagggaggaagggctgggcctcactggtgctttccccaaccctcacagaagctggacgctggtaaccagctggccctgatcgaagaactccacaaggaaatccgcttcataggcaacgaatgcaaaggggagcacgtgccaggcttctgtcttccaaagagggtgagtggagcctggggcccaggatgcgggccctcagctccaggcgtgcagctgctgccagtgcatctggcctgctcatgtgccggaactggggtaccttcacagtgtgctgctctgtggcgcccccctgtggaccgggctcactgtgcccttggtttaaactctgatgcagtctcagccagagccagtgagtgctacagaggtggcagctgtgcaagtctcctgtcatcagcttgttgggccctttgccctccagtcaggtcacaccctcttggcagtgactctggcccagcctcgtcatgaactccgtggagttggagaggggatggctgctgggaagtgtgctggcctggggtatttgagatgagactctccactctgcttctcctgacagggagtaacctccatccttccagtgctgcgggaaggggtcctcactggcagtcctgagcagaaggaagaagcagccaagggcttgggcttggtgatccgcctgacctcagctgatgccctgaggccctctgtggtcagcatcactggccctctgattcgca

SEQ ID NO: 30451 - DNA, 2274 bp, Mus musculus
gagtgccaagaaggtgttggacgagcccgcccttccccacggtgccctcttccctgccgaggcgcatggacctggtgaggacgctgccagctgagtggactgattaaccagtttgtacatagtgtatattgcattaaccagctgcacaccctcagcctgctctggcttttggctccttcctgccaacctgctgcaacagaccctccccagccctccgtcccagctcgacggcagcttccggaggagccaacctcgtgtcctagccgagtctttggccattcatccctggcccatggagtgcactccacatggctcctaccctacagctgctctgggagctgggaacctggctccacacaggccctgccctctgctggccgctaggccttcagttccttccacagaggaactcagtcctgcccttttggacaacaggtttctcattctgccttctagatgcctctgctacagacccaggagagccatggcttctcacttacccaacatgtttcagttcccgcagaaaggtagtgggacatctgtaaagagacggagctcgcaaggaggagcattttaacaaatacagccaatgaagccaaatcaaatgaactaagttcctcacgattatttccttgagatctgattggctcaatagcaaaagatatgactgtcccacatcgggctcagtatttttagaaaaggtgtatggcttctgttgagtgcagggctaggcgctctcccttccatgggaaaggctggctttgcaccctcatacctgtgtgctcgagggcctcccactggagaaagaaagtctgtaatgtagcaccaggcgcctgtgccagagccaggggttgctgggctctgggaaggcacctcaagctgggaccgactggtggtttttgcattactgacagatgtgtttttagtatgaaggtggtaggaagattttctagccactgggaagaagcggcagtggggtgggggcagccagtattcacctagccacccactagggtgatctgcatttggttactcctcccttccccacacttggtcccccttcccctgaaggatcacgtaactcagaagaactgatttggacacataatgtgttttagattttctttcctaggcgatttccaggcacagtcctgactggacaatcatcacagaatactgcagattttccatgttaacactgtggatgggttttcaatcaataaaactggggctttcttctcacctgtctctccacttgtccaaattgtcaaaagctgtggttctgtgtttctgagcatcaggctgggtttggggaagacacttcagggtcaagcattaggcgactccacatggttccggtgagctgggagttgaggcagagactgtctgcaggcctgccttggctgacccagggcctgttgttctgggcaagtgacatgcttctgaacacatgggaagccaggatgggagtgtttgccaattcaagcaataaaagggtgatctcggagcatcagcccaagttggatgccttcatggcttctggcaccagcctgttaaggcctgggtggtgggtgattttggtgacaacagtgtgcctgtcccgcagtgttacatgcatgagtggggtggggtgggggtaagggtggggataagggtgggagaatcagggctacactggtaccctggtgggcccgatgtgaaactcctgtcaaacaaccaacttttaaatggtttgctaggactatttctgtattgaaagtttctaattatgctttttaaaaaaaaaatactaaaaataaaggttcaagctgccaaatttcctcctagggtctgtctgctctccctcccctgtgctctgggtacccgactcttgctcttggtccagcgcttgtcctcaggtgctgcgcagcttgcccatggagggccctgggacactgtcaggggccaagtctgttctctgtgaaccagtggttcagggtggcgcttcccgtgggcccagagcacgtgtgggaagacgccaggggctgttcgtttcacctgcacacaccagaaggatgcagcttgtgcctgcagtgagctcttcaggctgggctgaagtgtctgccaggctggaggatgtgggccgacactgtcacttttacaagtcgcccttctggggctggtcctggctacaccaacagccagtggtggctttgacacatcctaaggcacattcacagcaaacagccctccacatacccaggaactgaggcacaaggtctgtagaaattcatt

SEQ ID NO: 30452 - DNA, 1140 bp, Mus musculus
caaacatcatgaccaagaagcaagttagggaggaaagggcttatttagcttacacttccacactgctgttcatcaccaaggaagtcaggactggaactcaagcaggtcaggaagcaggagctgatgcagaggccatggagggatgttctttactggcttgcttcccctggcttgctcagcctgctctcttatagaaccaagactaccagcccagagatggcatcacccacaaggggcctttcccccttgatcactaattgagaaaatgccttacagttggacctcatggaggcatttcctcaactgaagctcctttctctgtgataactccagctgtgtcaagttgacacaaaactagccagtacaccccaccaacaaggactttcccagtttttaatgtcaagacgccactgatgggagaccctggactggagcatcctgctgcagcaacagtgggtgccatatttgtgtcagcagcaggagagggctggagctgccaaggttggagctgggggacagccatcttacttcttggatatctgtgggcgtgaaagttttggtttttcataaacatttatgagtaaaaagcctcagccaggttcagtggcacatgcctttaatcccagcacccaggaaggtgatgaggcagccattgagttcaaggccagccaaggctacataccatgtatgcaagaaaaaaatatgataaaactttcaggtgttggaactcggggaccgagatgaagaggaccacaaagaatgcagcctctccatgctcatggatgcatgtggttcaggggagaagcattgaaaatcaagattgctggggtttgggagcagatcggggggtggggtttgggatggggtacgggaacagggacacaccttcttgccttctgctgaaaggtgtcccaatggatatcacctgacagaaaccctccaaatgcagaccagcagagaagtgcagtcatgactctcttgcaaactggaaatgttcctcttttgagtatttctggcctaatgtagttgctcacggattgctgaacacctagccaagggagagtgaggaagagtcgatctatggtggaaaaatctggttcagttgctgaccagaggtggagggagcgcatctctaagtgt

SEQ ID NO: 30453 - DNA, 1165 bp, Mus musculus
tggtgactgtctttttgaagaactgtatgctcctgggcgaagaagcaatggtatttccatcacagctcttggcgaattagcggtaaccaccccccaggccaccaggtggcctagggcccaccccacatccccaacccctcttgacgagtgactgcccccacgcaaccccaccctacccccccaggtcccttttaacccgtgcgtgtgtttatttcagatggagcaggaaatgacccggttacatcgcagagtgtcagaggtggaggctgtgcttagtcagaaggaggtggagctgaaggcctctgagactcagagatccctcctggagcaggaccttgctacctacatcacagaatgcagtgtgagcctcccccaaagcccccttctctcggaggcggcactttcccgtcgtgtgtgtctcatcctgttccatgacagctccatgaggcacgtcacggcccgatggcagagtagagagacaccgagtggaaaggcagagttagcgtgaactaggtgcgaggcggagtcgggctggaaccggcactcagcagacagccagcaccgactgccgagctccgccaatcccagagacaaggatcactgaagccttccgcagagggtctctagtctaggctgtgtcagctttgaggactaaactccccaattcgtgtcagaaaacataatttggatccatccggaataaaatttttttattcccttagaagcagtgtagcccaggagactcggcctctgagatccaagctctgtcattatttccattgcaactccattcttttttttttttttttttttcctttccttcacaagagtagactgtctccttcattgtcttgtggacgttttcattcaggtgttctcgactgtgcccaatgaaacagtcataagaggtggaatcacacatttataaagttttttttcctcacgagggagaggaaatctatagaatgtggctgattaaggataactgctatgtttgccttccagacttggctgcctttcagtggtgggtgaagtttacagctgtgtatttcagctgtctctctcagtgccacggaagcccggggggcggggaggaaactgatggatcataggtgtctaggaggcgggtcaggaggccggtacccaactggactctgaaatgaca

SEQ ID NO: 30454 - DNA, 1149 bp, Mus musculus
ggccgtggcagtggtggtgtcctatgggctgtgtcaaggtctgtctcagtttaagtagatgtcgataccagtcggtcccctctccttgacctgcgttctcctccatgcctaattcttcctgctattaactggatctcacttgagcttggcctatccatttagttcttggttgactggctcttgccatattttctagatagacctcaaggtagagagaaaggagacatctccctgcccctgtgtgggctttaactaatgagttggcaagggagcctgggtttggcatcaggtcagatagctgcgcgttggttcccgttatcatgaaatgtgacccgtcacactacagccttccaaaccaccagttcaagacacatgtccttgccgacagtgagcttttctgatgcgttccccccccacccccattacgcccccaccccacaggtcatcaccgacctggaggagcagctgaaccagctcaccgaggacaacgccgagctcaacaaccaaaacttctacctgtccaaacaactcgatgaggcttccggggccaatgacgagattgtgcagctgcggagtgaggtggaccatctccgccgtgagatcacggagcgggagatgcagctcaccagccagaagcaagtaagagggcaggccgggccctggggttcctggaggacccttaggatttagaagggtctcggagggagggggttctgtctggggggagttccaggaccgggctggctcctacaaaggggctcctggtcagttccagttcatagccaagggttcaatttttaaaaacggcttataaaagtgggcactggggcgggtgtggtggtgcacacctttaatcccagcactcaggaggcagaggcaggtggatttctgagttcaaggccagcctggtctacaaagtgagttccaggacagccagggctatacagagaaaccctgtctcgaaaaacaagcagacaaaaaaaaaaaacaaacaaaaaaagagtgggcactgggactagagatgattgagaagttaaagagctcttactgcttttccagagggtgtgagttcagttcccggccaccctcattgggtagctcaccacagtctgtgacctccagttccaagggattcaacagtatctactg

SEQ ID NO: 30455 - DNA, 1370 bp, Mus musculus
agaaggatttcagcaaaccacactcctccgtccctccgtttccctcctgccttccagttccctgctgacttcaaggacgactgtgtgctcacacaaaacccagcacggttctaccccactgaaactgtgacttcccagatgagcctctccctagggctggacctaaggccaggacattggagagaagccgcagctcaaagctcccagccccttgaggctggcgagttccccttaggtgcagtgcggctcaccccggctccgccctctttagagcccagaattcctggcaaccggatagaaccaaccaactagaggctttacagttggcaagctaactataggccttatctttgcctttaatctcccacaaggcctctcctgctttggattctcctcgactcttaggcgtgcctccaccacgaaggcacaccctaggtaggctgaaaggtagacctgtccccaccaccgcagcaggtgaccgtgtctgtgttttcagcccacacgtccgtccacagtccacgtcgcttcccagattacaacctggcctaaatgcagactccttcctgctctgtctctgacctaagtgctttcttgtttgagacgcctgtgaccctccacatcccgtgccctgctgttgtgttttctgtgttgcttggagtctttgggggtcatgttccctatccccccccctgcccccaccgccacccccacccccagggcagatctgactggctgtttgctgaagttttttgtctcttggtccacaagtatttggaatggtcactgataactggtcttcagtcttggcatctcacttaggacctccacgagaaacgggttccttgagccctgacaagtgtatattgcgtgtctcatctgtgaagtgcttcctgctacatagagctagctcaacagactgtacatatttacaagaaactttatattcgtaaaaaaaaaaaaaaggaaattgaattggtttctacttttttattgtaaaaggtgcatttttcaatacttttgttttcaacggtggtagccgcggacagccgtctccgccggagtggggaactcttctgtgtgaccaccgggacgccagcaggaaataatcgtaacccgaaatcgcagtcaaaagcttctattagcatcaataagattctaggtctccaaaaattacaggcttttcttcattacctttttttattaagaacgaggagaacacatgggcacacatgggcaattccagatccacctgagagggatggctctgttgttgaacaataatgaaataaagcagtggtctcaaaaaaaaaaaaaaaaaaaaaaaaaaaaaaacaatacgttcactcccttctcccttggcatcttttctt

SEQ ID NO: 30456 - DNA, 1179 bp, Mus musculus
cccctgactctggtccttttctccctcttaggatggagtgatggtgctcagtgcaacacaccggtacaagaaaaagtatgtcaccaccctcctctacaagccgatatgagggaatgagaggcagccatggaccacagggatggcaggcggtgctgggctctccgtgtgcatgcacatcctcactcactctgggacatctcacccaccctagtcctccttgaaggtctgtccaggcatagccaaaaatagggatggcacggccgcctgcagccccagcatcgcagtgcacgaggctttgtgctctacgcatcatcccctctgctggccagagatgtctacagccagacccgaacctggggagcagggacagaagccacacagaagtcctcatcatcgtttgcctccgtgaggccgctggcctgtccctggtgaggcctggctggggaggaaagcagtgttgggtcttgcctgtccttctgaatcaaagcagtagattgtagatcctatggaaattcagtgtctgatttccggatgcagctttgcaatcgtttcccgacactgtgtgcactaagacctctttaaccagagtggctggctggccactcctacgtaaggcaataagtcaccaggatgagactagagatcatgtgactacactcagcaataatcactctcaagacagacttcaaaccccactgccatttctccattaagccagatgatcctgaggaccgaccactgcagaaagtcggctacaccttatttcagttgcaatgttggccacattaccatggcaacctggtcgaagcacccaccctccttttagttccagcatgtgctcctcagctggggacctgcatctctagtgagcagagagtatcacggtggttgctgttgcttgttccaaaagaagagctcggaaccctacagcagactgctgggtttccagcaggggagcaggaatgaacctatcttatactccatctggtttccatggtgacatcacagctgtgcccattgggacaaggtcctgtcacctgtcagcagaggcaggcacagtatttggttaagcctgagttttgggtaccttttgttactgttttcaaaaccctgacttgctcttatcttgatgtacaagtttcaataaagctttgtaaaaattactggagtaacttttga

SEQ ID NO: 30457 - DNA, 1125 bp, Mus musculus
cctggaattaaaggtgtccactaccatccctggcagggtagagtagtttttatcctagcagcacacgaaaaagacagagtggtagaaggccactcaatgttcacctctggcctatgtgtatgtacacacacacacacacacacacacacacacaggcacgcacacacgcataaacacatgcacaaacacatgctcacacatgcacaaatgcacacacacatgcaggcatgcatgtgcacacacaaacatatgcacacacatctatacacacaaccttatacaagcaaaacataaatgtaatttaaatttaaaaagagtggaagaatcctttcgagcctctgtctccttgtttgcagaacagcaaaaagccagtgcgtgggggccgtgggggccgtggaggctgtggggaccgtgggggctgtggagctggaaccagataatccattccacactgtgtagaagggagcaacctatcagtcagtggtgcgtctgtgagtctgtctgtctgtcctcagggctccgttctctcctctcacttctcattttatcagaaggtatcctgatgtcaacctctgccttccacatgtgcccatgcacagcatgaatgtacacgtgtgcacacatacatgccatttctttatgtgcatcgcagttaaccattcatctgtccctgaatctatactctacctgttcattcatccatccacccattcattcattcattcatccatccacccattcatgcatgcattcattcatccacccactcattcatctgcccattcattcattcattcattcattcatctatccacccatccagttatccatctctctacgcatccacttatccacccacccatctgcctatactactacctatttatccatctctttatccattcatttattcatctgtatgtactcaggaatgtcatatgccaatataaataattacattacgcaggcaaaacacatggcactaggttgtcgaatttacaaaagctcacaaatgatagcttgttctcctaagatctgattgccgcacccaaatgccacaccttgaattcttccttgggaagatgtcaaacatccaggttagatttattatccagggctttcggg

SEQ ID NO: 30458 - DNA, 1195 bp, Mus musculus
cacggcatggagcagtgagatcagctgaagacacttctaacaatatgactgtctggagagggtggtcccaggtggccctcccctcccccaccaggctccctacctccgctcactgtccaatgtggactcttgttttctctcccagactcttgtcaccattccccttccccgaaagccctggataataaatctaacctggatgtttgacatcttcccaaggaagaattcaaggtgtggcatttgggtgcggcaatcagatcttaggagaacaagctatcatttgtgagcttttgtaaattcgacaacctagtgccatgtgttttgcctgcgtaatgtaattatttatattggcatatgacattcctgagtacatacagatgaataaatgaatggataaagagatggataaataggtagtagtataggcagatgggtgggtggataagtggatgcgtagagagatggataactggatgggtggatagatgaatgaatgaatgaatgaatgaatgggcagatgaatgagtgggtggatgaatgaatgcatgcatgaatgggtggatggatgaatgaatgaatgaatgggtggatggatgaatgaacaggtagagtatagattcagggacagatgaatggttaactgcgatgcacataaagaaatggcatgtatgtgtgcacacgtgtacattcatgctgtgcatgggcacatgtggaaggcagaggttgacatcaggataccttctgataaaatgagaagtgagaggagagaacggagccctgaggacagacagacagactcacagacgcaccactgactgataggttgctcccttctacacagtgtggaatggattatctggttccagctccacagcccccacggtccccacagcctccacggcccccacggcccccacgcactggctttttgctgttctgcaaacaaggagacagaggctcgaaaggattcttccactctttttaaatttaaattacatttatgttttgcttgtataaggttgtgtgtatagatgtgtgtgcatatgtttgtgtgtgcacatgcatgcctgcatgtgtgtgtgcatttgtgcatgtgtgagcatgtgtttgtgcatgtgtttatgcgtgtgtgcgtgcctgtgtgtgtgtgtgtgtgtgtgtgtgtgtgtacatacacataggccagaggtgaaca

SEQ ID NO: 30459 - DNA, 1186 bp, Mus musculus
gaaagccaaaagccctgtggtcctgaaagacaccacggaacaccaaggcctcctattggttagcctgcagccaggcttcagaagggcggctgcttagacactgtgcagaagggtggagaggggctccctcctccagttggattttaaacattgcctaatttgattactcaagggaaaagcaagcagaatcgactcaaatgagcttctctcttaattattcagaactctctattgtgtaatcaaatataaagtcttacaaaaggcttggcggcacatcccacttctcaccccaggccggcccccattctggagtctgtgtcttatgtcatggttgtgaacttctagacatccaaccggtcctgcctcaggggcaaaagagtccctctccttattggtgacagccagcgctactcacaagaagccagctttaagttaagttcatccaaccattcttgtcccctgtgtccgaatactttgatccacagccatcatgcgggcagactctgacaagcctgggcactgtgggtgccatcccccaacccctgccatcaaagtcactctgatcacctcatctcctcaaatccctgctctgttcaggctgagagccagccaagtacatcacaggtctcacgcacccgaaactatcctgcagagaaaatgaggtttaaaaaaaatggatgtacggataatgaaatttatgaacaaataggaatatagatgggtgggggtatgaagggtaagtgtgggagagcggaagaatggatggggtgtggttgggtggagtggatggataatggatggataggtggatggatggatggatggatggatggatggatggatggatgggtgggtgggtgggtgggtggaaagataggtagacaaacagtaaatggatggatggatagataagatagataatgaaagaatagagggatggaaattttgataagccaattgattgattgtactggtagtcagatcgcacagtgagattccccacttgtgaaccaatgaagacccagggtcccataaccattaaattcaaaatctaaaggctctaaaaattcagctttttcataactcatttggctacaaaataagacccgaaaccaaaatgaaccaaactgaaacttgatgtggaataccaattttagagtcttttttcctttcactgagtgtaaat

SEQ ID NO: 30460 - DNA, 1220 bp, Mus musculus
agctttagctatatgaaaaacaatcagtggtaagaccttctgttttgctctcccaggctccctgcagaagtggatccagccactgtatttgcctcgctttctccagagggcctgctcatcatcgaggctccccaggtccctccgtactcaccctttggagagagcagcttcaacaacgagcttcctcaagacaaccaggaagtcacctgttcctaagacgtcagccttggtccttcttcgctcccatccccagccccagggactctctgatttgagggtacactactttagcagcactcagatttaaggcaactcagatgttgggggatgggagggagaaccgaacgaccgtccctggatgatgtagtaatagatttctccacagggtgacgcaatgggtcagccttgcttggttgcgttaggtcaaaggattgggaggtttttcttcatcttatctgggtgaagacgtctcgcagtctacagttgcaaaacaagcaaatggggactgaagatttcatgttaaatttttaccttgcagttaatgcaagagttgcttttctctggggaccttcccatcacccagatccctgctctggaccctccttctacgtggcttggttgatgggactcattggctcacctcagtgtgtttctaaactctttgtctagaagaggttatgggcaggtcttatatccccatatgggatttatccttcaccacacaacacagtgccttttttttgcagcatgaccccatggctctcaaaccatcaccaccaagaactctgggagcccctcagttaattctctggctaaggtccccctttattgtgtcccctgtgtccaagtcacatttttacagagagctgtcttggagcagctccgcaaggaaccaagcaaaggccagacagcctgcacgcaggctagtggcattgtgtgtgtgtttgaggggtggggaggatgtgtgtgtctttgttgtgtgaattgtgctgttgtttagagggaaaataacggtgaataataatgatgataataaaggagctgatgttcttagcatgttgtgcttcatttagcgagaaactaaatgttctaccactaaggtatacaccatcaagatgctacgacttcaagtaatgaaacctgcgtgagtagtgggctaggcggtataaatgctttcagccaactccaccagacatttaaatgtgcctgcagagttgttt

SEQ ID NO: 30461 - DNA, 1836 bp, Mus musculus
ctgcaaaccttgccttaggccatttaatttctcaagccatggaaagctagggaggagaggtactgtgagtggagcacctgaagtgccccccacaggactgttgtgggtgaagtagctcatagaacacccccactggggctgaaggttaagtgagggaatttccttggggcaagggaaatatttttaaattgctttgaaaaactcttgctccagattgcatatattttgggggttgaaaaataccatcaccaagtccagagtcctgatggctgaggcagaagtggagctggcgctattagaggtgtgggtgctccacagcggccctccacacgacacggccacacccacgccgtgcggagtccgtatcactcaccctctctggtcttgtccccatagatctgggtgaggaagaccagcgacagcaccaagatgcggatctacgtgggccagctgcagcgtgggctcttcgtgatccgccggcggtcagcggcttgactttctacgagcttcctcctcccttgaccccttctctggagtggtttttatttttgttttgttttcttcttaatagaaaattcttaacttaccgggactagctccttggcctgggacatggggagcactgtggagtcttcagggcgctcacatggccgccacctccatctctgtgccgctctctcctgcctcggcctcttccagaactcagtcaccagagagactcttgctttcggagtagaggggttcacccaccttccttgaattcctctcttgtctcgttttgtttatacttgatccttttttcagacctcctttgagtttgaagggaagctcgttttaacaattatctttaggcctttgaagagcagcaggtatgctttcccgcctaatctgctgggcagattgtgtgcctgcctgccgagttgggcccggaagcatggggcagggttctcctggctccactttcttggagaaataaatgatatagaacatctatctgccttgggcttctactccaatgactgcgtgagtgtcttcaccctggacactgcagccaacggatggggctgggggtgggggagaggggtggcatgtccctaacatgctaagtcactgctctgagcagtttccagcgaacacgattcatttaggtatgcccgtccttgttcagggtggaagaagtgggaattccagaggtctccgtctgtaactcctctggctcccagtggctacaaggatctcatcacgtgccctactgtgatgtgggttctcccttccccatagctgcggtggcaaggtgggtgcctcgctcttgcagctggacccactgcagtactggaccgctcaatatcgaagaacctccagcctcccccgaggtttgtcccacgttagtgacaaggagagctctgtcatgctgcagctgccaagtctgcgtgctgcttgagccccagcgaagccacctgccatggccctcttgctccctgggcctcttattggagaaatgactggtgtggctgagcaggagattccttctgctctagccgccacaggccacgagagaagaagcggatccgagcgactgtcaccatctcggggcaatcagtaggctgtccacaccttgttttgctgtgggtgtggggagccacaggaagtcgtgtgcctccacggaagactgtacagaatcactttgtttatggccgctctcccattggattcttaagaaaacaggataaacaatgtttattcactaagttgccacgtggtctgtttcttctctgccttctactgtcctccaccccacagtcaccacaggtactgcgggatccccacactgtaagc

SEQ ID NO: 30462 - DNA, 1178 bp, Mus musculus
tcccactacagcggtggttctcagccatcctcaggctgcaaccctatcacacagttccttgtggcggccccaaccataatattattctagtacatcataactgtaattttgctcctgttaggaatcgtcatgtaaatatctgatatacaggatatctgatgcgcctcccctgtggggtttgtgacccatggtggagaaccactgctctgtcccactgctctgtcgtaaggacccagtaaagtggagggacacctttctgactagagcagactcaaaccatgccaggttgacccacataggaaagatggtgtaagagcatttatagcactgtggggttttccaagaaaacttattttgggggtgaagaggaggcagggctcactctccaggggagtggccatatcatacagcaaaaagcaacccatccaagaactgttctaaaagaaagaaaaggagaaggaagcaatcggtggctccatcagggagactgggaagggcaagaagctagggaaggaggctgggaaatcccagaagggtcaaaagaagagacaggcgggaggatccctgggcagcgagcttgctggacattgaattgaaatcgaaccaaggagaagtgtcgaaccaaggagtagtagtccctgtgaaactcagaaacgccacgtcctttttaaaggaaaaaaaaaatgattgtaacttgtggacagctcttttggggatcgggacgaagcgaaactcggggcttaaaaactttgtgtgtgcatgtgtctgtccgactctctccctttttgaatgatcctttaaaaaaaaaaaaacgcttagcttctcagctggagggagtcccagcaccctggggtcattcacaaagtttgaagatgtgtgtgtgtgtgtgtgtgtgtgtgtgagagagagagagagagagagagaaagagagagagagagggggggttggtatataggaatgacaattgacaatacatgaacaacctacctcatgagtgtgtaaaggagctgagaaaatgagatggttttgaggatggcagtgccccctgccccaggtcagcaacatctggaggcttggaagccacagtgtcccggggcgccctctgctttgccgtgcgtgggaagcctctggtccacgcacacacggtgacctggagctctgcccccccccgcccccc

SEQ ID NO: 30463 - DNA, 1489 bp, Mus musculus
tccaagaagtggggttacaggtgtgcaccactacactgatttatgctgtgctgtgagggaaaaccaggctgaagatttgtgaatgttaggcaagagcggtcccaagcggagcgcacccctattcccacccccacctgcacccccaccctgactgactggctggctggtacttgcctcccctgcaggtctccaccgctatgtctggctggtgtacgagcaggaacagccgctgagctgcgacgagcccattctcagcaacaagtctggagacaatcgcggcaagttcaaggtggagaccttccgcaagaagtataacctgggagccccggtggcgggcacgtgctaccaagccgagtgggatgactatgtgcccaagctgtacgagcagctgtcagggaagtaggggtgctgcacaggggcccccacagccttgttaagttgtgtaaagcatgctcttccccccgcccccttgctaccctctcattgggagttcttagctgtgctaggatagaggtttagggtgtcttccctcttgctgccagccgtcacgattctggatagtcccatcccaggttctgtttgattgagtttaggttccgtctggggaggggtctaatgttctgatggagtcattctgttgttgatataaaaaaagcaactctgaaaaaggaagcactccgccaggatcaggtctagaggagagctggagctggtggtgtctgtgagtggttgaacaaggaaactgtccagaaccgggcacagtggggtctttaagggccctgtcccccaactgagacaactcaagactcccatcttagctgagccctgactgtccagatcaggtggctgcgtaggtatcaagtgtctaaagaacagtgctgctgtggagagagaccctcttaagccccttgcttctcagtggggtaggcaaaagtcacctgagctgccgagtgtgttgatcctccttgtcaagtacaaataaaaaggcattgcattcagacctgcgggtatttccttcctgtgtctggctttgggcagggtgaaagccctctgaggtaagctggctgtgatctgctggccacagggaggtgctgtcgtttcttcctccagaggtctgtagtgcaggagagcagtgctcacaaaggagtcaggtggggtggtgcaggcctttgggccagcacttgggaggcagaggcaggtggatttgtgagtttttggccagcctggtctacatagggcgatcctgtctcaaaacaacaacagccgggcgtggtggcgcacgcctttaatctcagcacttgggaggcagtggcaggtggatttctaagttcgaggccagcctggtctacaaagtgagttccaggacagccaggactattcagagaaaccctgtcttgaaaaaccaaaaaccaaaaaaaccccaaacaaacaacaacaacaaaagccaggctcccaggctttaggaaggcctggaaatggtggattgggc

SEQ ID NO: 30464 - DNA, 1439 bp, Mus musculus
ggtcctgtcctcactgaagcacttatgcaggaaagccctccgaagtttcctgacaacgtatcaagtcctagcactgccaatccccaagaagatgaaagagttcctcacatacaggactttctagcagtgccggctcccccacctcctgcagcagcagcagtacaagggactggctaggatggagtcaggcagctcacactggaccagtgtggaccttccttcctcccatggcatgtgcaagtaggtctgcgtgaccccacttctgtggtgccggccttacctcgtcttcatccgtggtgagcagccttcgtcagtctagttgtgttgaagccaagtgcagttgtggatgttgctggggtaataaaggcaagcgggctccagagcctctctggtggcggccaagccacactcccttaactgggaagtacctgccacgtagggcatttctgctgcctatttccagccagcggctgcatggtttgaagttcctccgttgtggtcagaggaactctggtgtttggttccctgctcagctgcgcgtggactgggctgagctcctcaccatacactagtgccggcttttgtttcctgtaaacagtggttgcatgtgtaggaagtaacaagcgagtattcagatcatacgaggaggcgttcctcggtgcatgacggtcagatggccatttatcagcatatttatttgtattttctcagcagatagtaaggtacaactgtgttttctcaattgtctcgaagaaccagagttcttaagtggcccagttgtggagccaagtctaagtcgtgtggagtcagtgctgacatcactggcttgtgctgtctgtcacatgtgtttgtctctgctgcttgacctcatgggatgtaccctccagttcaactgcccaaaacagacagccccttccaagcaccgttctttgacagcggtagcagctacctattcaagacgcctcacacaaaatctgccttagaaagttaatatattttaaattattttaaaagaaactcaacatcttattctttggcctttcttaattgatgctttatggaggcagtgttaacattgtacagtgtatgcatagaggagtctcctctatttgaagaacaatgcaaaatgaggctttcattgaagggagaaaagagaaaaaaagaaaaaaaaaacctgtctctgttctttttttctctctctcattaagaagcaaaacaaaacgtttaaaccaaacataaaaggagtgcagtagctgggcagtgatggcgcacgcctttaatcccagcacttgggaggcagaggcaggcggatttctgggtttgaggccagcctggtctacagagtgagttccaggacaaccagggctacagagaaaccctgtctcaggggaaaaattttttttaaaatggaaagcaggacactggtggcaactcttcca

SEQ ID NO: 30465 - DNA, 1522 bp, Mus musculus
tagagggccgagtgcaactcagaacctgctggtgctgggtttctaatccggcctcggcagcttcaaccaagagaatgttggggagaagaacgttggaggacacagacggcagtgctaaccagggtgggtctgtccgctccagtgcctccatggcaggccatagcagctcccacattctcacccttataggcagggcctgggtgctttatactcaacttgggtttgttattcccaggtacagactttctgttggcaccagtgagaagatacagctgagctccctcatcgccgcttttcaagtcaccagagacctgatagttgcagaggcctagaagctctgaggcctggcccctgggtgactggaggacagaggacatgctgccctgggccactggataaacccagtcacagaagtctctctgcaggcatttaggtactgctctctgtggctgtttggagcagggatggacagggcaactttaatccataatgatcgacactgcttgtctttataggggaaactaccctgtcccgtggtgagggctgcttcaaagtctttactatcagtcactgggatgacaaattggctgcagctgagttgcgtcctgtcttccaactctaaatgggtgctagtaggtttctaatcaaatattttattacaaaatttcaaaatcagtcttttgcccaaagtgctgacatgcctataacctcaggacccaggaggctgaggcagaattgccaggcagctgcaggtcagcctagtgagacagactctgtctcaggaacaatgcagtggcctttcccacttttagaaggcttgccagcaggttccaaattctattgtgaaaataggaaagaaactacaacagtttgccttcagactgcacacctcacttgttggggggaatggggcactgcagacgttcctgccgcactgctgggctgtgtttttaccaagtccttcacaggaagaataaagcgtgtgttcagagtttaaccgtgctgggctgtctacctgcatgtctgtgtcacactgtgtcacagggaactccttagagactattccttctaggccttcagactgttgttaccttgggaccagacttcccttgggccggatgaggggcactggagggcacccggtgcaccatgggtaaaatgcatctcagggaggtgctttcagtgtgtgctgtcaaagggagaaactgactttcttgtccatggagagcttgctcccaagtttcaagctgagtgaaggcagcatcccagccatgtggaagagttgccaccagtgtcctgctttccattttaaaaaaaatttttcccctgagacagggtttctctgtagccctggttgtcctggaactcactctgtagaccaggctggcctcaaacccagaaatccgcctgcctctgcctcccaagtgctgggattaaaggcgtgcgccatcactgcccagctactgcactccttttatgtttggtttaaacgttttgttttgcttcttaatgagagagagaa

SEQ ID NO: 30466 - DNA, 1144 bp, Mus musculus
tgctgtagtgttcacagcagagggcagcccttccagtgcacagagttcaagattccttcccactgtgcttggcctgtgccttgtcactgcggcagggcagctgctgacagcccctgggccctcctcctgcagagtaccaatatggcctttgggaaggtgacagaggagactgtctacacctgcaccggacacccactcaagacggacattgccaatatactggactggatgctcaatcaggacttcaccactgcctacaaaagtatccttttgggcaactgctgctaggtttagggctcagggtggccagaagcccaggctgcagccagcacctatacctcccaggtgacaggtgtcatccccaggcagagtgcccttctcctcctcaatggctgtccggagcttccccgttcacagtctaagcggactcactgccttgttgtgcagtgagatgagaagctacaggcggctgtgttaccctctgagctgtctgctctgccaaggcggggctatcccttttagaaaagcatgttgaggatcacatggggcgagttagaatggggcctgctgctactgtcctgggatgaagagcccaactgccaggtcgccactaggggctggtgtggaagcctccctgcagcaggttctggaatgcttcccctccccttagctgctcctccccagacatcatggagctgaagactctgaagggcttggcgctgcatgacatcctgacagaggttcacttgtttgtacacagaggtaactatgtggagccgggaggaggcacagctttgggatagctacagagtgtgacatctttgcctcagagcagaaacgggaagacagtgactgacccttaatcttgagcagttctgaatggctctgtccaaaatctttgtaatatctgtaactgatagggttagtggaaatgagcccgtggaggctgtactgtacatttcattctcattacaagcttcccacaccagggattgaacccagggccttgcgcatgggagacatgtggtctaccactgggctgtctccactgagcttatttctggggtccgtacccaggactgatgcatcctagacattcagcagactccagcctctaagtcacattctaagatgcatcccacaa

SEQ ID NO: 30467 - DNA, 1098 bp, Mus musculus
cagctccctcagctcctggctagaaggctggagatcagttggatatcctctctcctttttgaaaacgcccctaagtagtttatccaaaaaaaaaaaaaaaaaacgaagcaaggtggccatctggggtgagtcgatactgccctctgctggttgtttctagttcaagcccacagccagcaacaagcaacaaagtgtcttagaataggactggttttgtttacctcacctatgaggttggcagtagctcccaacccatttcacaagaggaggtttgaccattacgctctcagctattcctgcagccatggtccccaagaagtttagcctatgggagaagagagggtttccctacatatccccagagaaatcaggtgactttttcccggagatgggggtgggggatgtttaggtcccactatgatgcaagcagccatgacccacattctgttgctgcctcgtttatgcagaaggtctgattccagatcgtacctaagcaagacaatgctccaagactgtaccaagccaagctctgataagcttccatcttccatggctggtagactgaactgtcccagaatcactagcttgaggtagaggaggggagggcagagtcacggattcttaagctaagtgggcaagacctggtaccgggtctgtggtagagagtaaagaccaagggagtagagagatcccagccctgggaggagaaggaagttgggtcaggcctcggtacaaagggaaaacactgaattggccccaaaacacaggagcaagcgtgtggatttccattgcagagcccctgtttcaggatgcaagagttttccagcccaaggcaaaatggaagattgctgacccaaccacaaacccatccctgcggagtctctctctctctctctctctctctctctctctctctctctctctctctctctctctctctctctctctctcacacacacacacacactcacacacacacacacacacacacacatacacacacagcctttcactggaagccatgggcttccaggttaagttcagccaagggacccaatgcagacatccttcgtggacagggttcagccttgggaggcc

SEQ ID NO: 30468 - DNA, 1495 bp, Mus musculus
tctgttttctatttacaagtctgacatcttaatccccactgccaaaatgctccgaaatctaaaacgtgttgagcaccaacaggataccacaagtaaaaactttagttagttcatctacaaaagtattcaaaagaatacatagactggacacgaagctcaaaggtagagttcgcctagcatgcatacgaagcctggatcccatatcccagcagggcaaaccaattgcctcaggctatctgtgtaaggtgtctatgtgaaacctaaatgaatttcatgattagaggtgctcccacctgccaaataatcccgccacaaatatgcaaatattgcaaaatcaaaaataattctgaaattattctgaaacacttcttgtcacaagaatttcagcaaagtacagtcaacctatcagagagacaagggtgatgccccggtgagtgtgtctcagctgtgtttatgaatttgtttggttcacacatatctgagtggtatggataactgggcatctctaacccagggcaatcagtaagaactaataacctgtgtctcctagacgagtcaggatgggaactgacctctaggagattctagtcaggagcccactaacctgggccgtcatgtttagagctgaaggagtcttcatagcccaggctgtcctgggtattgcaggatgctgattgaacagcacctgtgacctttcctgctccatgccactagcaacctcctgccatgtgtggcagtcacaaaggtcatcagaatggagtgagtgctccctgggaaggcaggcaggaccttcaaccattggaccaagaagtcattgcttatgggtctcaggggccatcaaactgtctacctgatgctgtggtttctgcttagagatctggaggagggcagcggagcctgcctcggttcagtgatggtttttcttacctgcttcaagccgagatctgaaagctttgtggaagatgatcaagcaaagctcccaagccaaagggtagcagagggtggctacgtggtttttaggtagatgttcccaggtgccctctcttgagctgggtctgaggttatccctgtccccatgccccctctgtgccccgagctctgtctccccactcttgctgttgtgttgtccttgtgaatgtatggctgacccactccaggccaagcagcttaacagcaggcttgctgttaagtcccaagtccgtcatggggtcaggttacacccagaggtgttttcactgtggggttccagggaggctggggagaatgggcagagcccagggttccatctcaccacctataagttgtcagaaactcggatgcccctccacccacctctggcatctctatgctgctaatctctgccacgtgtcccgtgtgctccagtgcccgtgcccgtcaccgcccctccacgccctccgtgaggttgtccaggctgtgttctctcgcatgcttctcttctatataaccctcatcttctcattttatgggattcaac

SEQ ID NO: 30469 - DNA, 1154 bp, Mus musculus
agtgggtgctacctggtcctcagacaagcagtcccataagtaaaactacccactgggccaatggcacatctgtcctgtgttgctgtagtgagcggagctttagggggccgcctgccagccttgcccacccgcctgcctgccgcatgtgtatcctcacaccacaccgctcgctccaaatgagcgctccctcttccattgcccttcaccagccccaggatgatgggatgaggcagttactagaagggcaggaagcttgaagctcttgcagctgaaaaggttcctgcccagcctgtgcctcaccaggcagaaccagtcagaggcgggtccagacttacatttggaaacttaactcctcagagcttctgcccgcggttgggggattttacacctgctcattcaaaggtgagaaccgcccgccccacgaggactcacacccttgcaccccagtactaagcagcctcggagcatggtgggagtctccattgctgggtttctgcttcgatttcctttttcctgtagagaaacgtcaaagctgagaaagatggcttccctccctgacctgactgtaaataatgtacttagactgtttttaaatgtgtttcttcacgaaggcttcgtttggctgagggagcctatatcactcgtgtaagttggtatttgggcactttatatttttctaaaaatgtgttttggatcctgtactctaataaatcataagtttctttttaaaaatttttccaaaagttttctccattttcaaaaaccctgttataaaaagtagaactttcacaatgttaaaatactaaatatttggttatagcaacttctcttctaatgaatgccaagggtcttttttttttcttttcttttctttttctttttcttttgtacaacaattaataaacgaacttgccgagagaaaccatgccagtgacctgcccgctttcattcagtagcaagagaggaggaagcagggtttctctcctgaacaaggtggaaggaaaaaaaagaaatagccgaccttagctttcctttaacatttgacaattgtcttgctgagtgcagactttctgggccctgggaacggctggaagtgtccgggctgtcggttgaggatgcctttttgtctcccaaaggagaacagcacatccaag

SEQ ID NO: 30470 - DNA, 1200 bp, Mus musculus
gttgataattatagggccaccttacctgtaggagctgttctgtcctgtacatgtgctatgaaggagacagccatccttcctgcagagggaaagggtcattgcacagggatagggtcagtctccaagcctagccggtggtgtctcttcctgacaaacgcagccatagctcacccactctgccttcagagtgtcatggacaaatccacacatagtggccaggagacccagtcagagctcttcagaatccccacagaccaggcacctaacacacctgcacagaggccaccaggtctcaggagacaaagttcctctcccagggaataccagctcaaaaaacaagtgggctggcaaactccacattgggtctgccgagagcaagaaaaaagaggggggtgggggagctccatggggtggatcccaggctggcagcaggaaggtgctggaaggcctgagagggtgtgcagtgccctccccgagccctggtggtctcctcctgtgtgctgggatggagtctagtgggtttgtggcatgatctcagatcttggcattgaggcctctccccatgcacaagtgcccaggggagctcacctccctcttgctgggctggcgccccctgctggcctggtcttgctgtgtcctcactcgagcattcccagtcctaagctgtccactggagacatttctgtcagagaaattggctgtgcggtcagctcctttctgggcttcgcagccatgaaaggccactgaagagcagaggtgactagagtagtttcaagcatacatgcccttctagcccccaatccctgccccctacccccacagagcatctgtcctcgctggctcctgccactgcacctgctcccagggtgggggacaggctggctccctgtgctgcctctgaagccagaagacaccaggacacagccctgggagccaggggtggtcacacatctgcagcttgccttttgccttaagcggccacttctgctctgttattaaaggttctacactgatgagcgtgtgtgctgctcctgtaaggactcgtttgaagtcttcctctgccctgtgtagtctggtttatttcccccggctgggggtgcaggggcacaacatgacatgtgcacacagactaggctgtccatgcaggcgacatgctgctcctgaagctcagacagcagttcccatggcagagtctagggt

SEQ ID NO: 30471 - DNA, 1193 bp, Mus musculus
tttaacttctgaactgtgcttatgggaagtgtactttgcaccctgaagccagtgtggtagcctctatgtagccctgtgatggctccctgtctccactcacccctgaccctggtccacaatcactgtcacagttgggcagttcttgtccccgtggtccatctgcacctgcgtgtgagcaggtagagatctgcacgtcgtcccatggtccactgtcaacttgtcctgtggtggcctcatgtggtgcagttaattacgacatcccaccccatccagtcattcacatccatggagtctcatttccctgtcagcctaatgatcactccttaactgggcattcctcctccctcgggctgctgaagacttcttgcgtgctcccatgtttaaagtggcatcctcccatatgtatgctttactctgatcagtgttcactagcactaacccagggcgtcaccaggacctccattcagtgtgatgcccctgcctccacgcttcccactgttggccatgccgtctcataaagttcgtggtcagggtcggtgtcttcattctggaagatggatggttgtttgtgagcaggagcgtagtattcacgtcctcactgcccctgcactgtgaatgaaggcggcagcctcaccccttccacagccgcccagctctgtctaaaaggtcggtgattctgcacggcaggggtgatagtggtctgtggtagaaggctgcccaggcttctgaaacagaagctctgggcctgtcttgtgctgctgatgcagcctgtggctggtagcctgacttcaccaggcaggcaggcaggcaggcaggcaggcaggcaggctctcagttttccttagcttagcagtcactgaaggtatggtgggtccaacggtagctggaatgtgaggctatagtcatgctgcatctgcagtcaggagagagggatacatgcaagagccagactccttccctggccactcacccagcagcagtgttgaattttggacactgaactaaaaaaaagaaaaagaaaaaggaagaaaagaaaaaagaaacaaagacaagcagaaaacctggacagatctcaagacgccgggacccgggaggtgataaacagagggaagaaagggagttcgggacttaataaaacaccgtctgtagaaaggaagttagctctccttagctctggccgctgctccccaagg

SEQ ID NO: 30472 - DNA, 1099 bp, Mus musculus
tgggggagaaggtgctgttggagtgtggctcagtgtgagccgccatgtcatggtgtctgcagtatgcttccctcagctcctgtaagcttttcagctaagcccagatcagaagccagtgacttgttgcttctgttccttaaaacaggtgtgtgtgctagtgttcagttgagctgtgtggtgaaagctggctagctgactgctgcccatccgtctgtctcttgcttttgcccaggaactctttgctttccccctcttggtcttttgtcacttgattggccgtgtccctctactttcagtggcctgcaactgcccaagccattggctgcaaagcattttctggggacaaagggaagtgcactcctcaatggtggcacagtggaaagtggataatgtcccctgacgtctgggactgacaccctgtgtttcttccccctcagatcctggtgtacagcctggaagcagagcgctgcctctcgaagctgggcaatgcacttggagactttacctgtgtcaacatccgggatagccctcccaacctcatggtcagcggcaacatggacaggaggtaggtcagggctgaagtgccatcaacttggccctgagctgtgagtgcctcgtgcttccgccttgcccgcaggcccagccccatcctctgcacttggagcagcctcacattaggtaatggttggacctgctgcgcatccactcggctgctgaagcaccccaggaccattccctctgcaggcagttggtggctggtccagagagatgacttggaatatcttctgtcccctgctgcaggatttgtttggcactgaaaagctcactttccaacattaaaaacaataacctaagggacgggctgtgttcatcacaatagggctgtctgccaaaagaggccaagactgtatttcagagtgctgtgtgtccccctggtgacaggaaagagacttgatgggaacagattccagtttgtatttcgctgattagtggccttctctttaacacgttggctgagggagtcagtttccccggcacacaggcccgtgccagcctttctcactgcaggattaaagtgtttgaaagacccttccggtcc

SEQ ID NO: 30473 - DNA, 1148 bp, Mus musculus
ggctacctggggaaccggtccctggccagctctgctgggcgtgaccagtagagtgggcgtgaccaggaaagtgcacacctcctcagtctgctgtcaaaaggctcttttctccactttaaatctatgccttatatttttctaaataacccagtttaaaaaaaaaaatgcaaccgagaactcagtgctgaggcctcctgcttttatctgccagaactgaactcagcaaagaaaaataaagagccgagcttgtctggcagggaagtagcagccagcaggccgtgcccctccctcacccaaccagaattacgtagagggtcccagaatgatctggaagccaccctctgcttgtatttcgtccatttcctagcaaagaaatgagtccttgcacgcctcacatttccagagaagatgtgtgccatggtaggacttggtggtgtcagcctctttaaagacacactgtccagatcacagtggggacatgctgaccctggagagacccagtgcaagggtgaggggtgggagaaaaacctcttcttttctgttttgtttttgagcctggcttggcctgttagctaatgatagctccctggaggatttgaactccaaacacaggggggggtttggcatctctggtgattttcatttcaatgaagctgtgttactgagagagccaagcagccctgaccctccttgatgggacttttcagccaagtcctctgtaaatactctcctgtagtaatggaaaccacgtatttatcaaatccgggtcttggcacgcacacagttcattttagtgcgcttctccattgccccgggtttgatggggttgtttttaaaaaatgcctgtgttttgttttgttttgttttgtttttctatgagatctgacttcttgacggacatttgtattaggatattgaagcatgctggctgtgtctttattgtctcactgtctctgccatggtgttacttggactgcatgaggtaatgggacgacagcctttctgttggtggtgttattgaaaaaaaagaagaaaaaaagagaaaaaaaaaaaaaaccaacttccacagtgtgtgaagcgctggcatgatcactccctttatcctgctttccctggctgccaagacgcattgattttgactcgcttct

SEQ ID NO: 30474 - DNA, 1194 bp, Mus musculus
cctgcctcactctcttgagtgctaggaatctgggtgcaaaccaccacacctgggctgagcgtccacttgtcattatagcccgcataagaggctaggggtgtaatgtggtagagcgcgtgcccacatcaaatcaatcaatcaattatccccatctaatatatacagtgcatgtagcttgggcctgccagatctgacttctactcctcctctcttctcaccatactttctccctcccccctcccttcgtagaccagcttccttggggactttgcattctccttctcaagtccttcacatttcctgtcccctctgcctgtggcagccaccccactgttcccatgactgtttccatcccaggtactggcaggtaggcagagagacagacacacagggagactcatctctctccttcctaactgtggccagccacttgcagctcctgtagccatctcttcctgccacaatggaccacatcttccaactgtgagcaaataaacccttcttgccttaaggctgttcttctcaggtctttggtcacagcactgtctaaggtggccactgcatacgagtagctggcaggggtcgtctgcttgacgctctgatggagaaacataaaagagttgtcataagaactctgcaaggccccttgtcaagggaagccacaccacagggcagatgccacccaggccttgaatcatcatcaaagctggacttcagtcctggttcctcatttagttcagggaacctcggctactcacccagtgctcagctttctgctctctgtgctggtcacatgtatcccgttatatgctgaagacagagtcaggtgtctgtcatgctgccacagtggaccagggtgagccagagcatggtgaggttggctctgccagtctgactgctctgagggacccatcattaggttgcctgctgtctccctgagggccagggaggagaaagccactgccaccaccagcagctactgctaagtggggctacttagcaatgcctctaaagctaagtgtcctcttgtgtccccaagccggcccctaaaataacagcctgcagtgtatatctcagaacttttcatgtattcagtcctaacccatactacatctgcatgagggtgtatatgcattttttagttttaatttttttaaagttatacttatttagtgtgtgtatgcacgtacaccg

SEQ ID NO: 30475 - DNA, 1099 bp, Mus musculus
gtgtactgtgtaagaacagtggtctggaacctgtgaacagcatcctgacctcctcacagcagcttaggcgtccatgaacttggataaactcgtctttctggctttggcttctcattgtccatatcaatgagagtgactgctaacacaagtattggtcccacatcctgcctttgaccttcgggacatcccagcactgaggtaaacatgaccagagccctatctcttaactgctcactgtggactttattcttcacaggggagggtaggtaccagccattgggacccaggttgtactcaaagcgacttttctgaagcatccagagatagagcaaagctggacagatgttctcttcatcttctctgattttcttgggtaccgtttgcttgtcatgcctgcacctgtggagattgctgttgtggtccgatcgtaagttctgggacgcacagagctgtgtgagtgcagattcccttcacacagcgctgaggtgctcagtggcctgcagccgagatgcccagagcatgtcagatttcccaagcaggacctctctagacatctctcagcatgtgctgctgtctcttacgaggtagaaaccctgaacacaagcttccagaattaaattgaaccctttagttcctggtctcaaaggatacccacagctgtgatgggaagttctgccacactttgtttaaatgtatactttatattattcattcataaataaaaatggaatcccgctacatgctgttttacagtgccgggtttctggctggttgactttatccggttagagccaactcctcccagagcttatgttcagatggccctgcctggcgaagtgacacccaggagaggttacagccctttgtaatggctctttctcttccactgattttacccaatggggaaagaagtctttttgtttatcacagataggtccaggcattttccaaggccagagctgagctgcatccagcatctctggggactggctgcattgtccccgaaatgctgacaaatcaagggtagtccatatctcttgggcatattgttgattctgcaaaaaatcaggagagcagatataaaagaaaaaaaggcccg

SEQ ID NO: 30476 - DNA, 1168 bp, Mus musculus
gtcgccaccgccgccctcgggcctcccgcgcgggcctcgcgcccctggtgcccgggagccgccgccgccgccgcccggcccggcccgctccgacatgccccgctctggcggccgggctcgcggaggaccatgaccgccgcggcgaactgggtagcgaacggggcgagcctggaggattgtcactccaacctcttctcgctggtgagtggcggggcgggggggagcccgggttggggggcgcgacctccccgccgcgcaactttctcctcccggagccctggcggcgtcggcgagcgcggcgcccggcgtggacgtgcgtggggaagtcggggcgctgcggacgccggggcgcgctcggagcgcccacctccgtggcaatcacaccccctcccctccccttccccccttattttctttttttttcttttttctcctccttccccgaaatgtggaaggcttttctgccttgtgcagccgccggcgcgggtgagctgcaggctcgtcctctctctctctctctctcccgatcggatcggctgctctcccactcgccggcgtctgccttctgattttttctttctctcttcctctgtttctccgtttttttcccttttttttccttttaatatttccacaatgacacctgcgatttcgcccgaaaacagttgatggaaggcgatggtgtcagggaaaaggactctggcagccggagctcgctcgcgccgttgtaaacacggacagccgcccgcctctcggggtttactacgccggagagcgggagagccattgctcggagcccacggaaggtggaggaagctgctgctcctcgctctcctccgctgcctttaaaaactgttttctctgctttaacaaggaacacacacacacacacacacacacacacacgagcaacaagctgggcggtttgataacatcgcttttatctgccttcgcctctcctctctcccgctctcgcctctgataattgacaacttttgctttggaagtgcatcgcctgccttaatctcgaaccatttagggtgtcaattgttcttctggaagcctggcaccgggcgacggcggctcgattcgtcgaaattaaaaatgtatagagctccagcaactctttcctggcggtggcagtgacatttggtggtaaatgccatct

SEQ ID NO: 30477 - DNA, 1383 bp, Mus musculus
ttacttgttttatttatttataaaagtatttaaaagtttttttagtatgtacaagagttttacttgcatgtatgtgtgttaaccaggtctgtcctgtgcccatagacatgaagaagaaggcactggcttctggggtcagagttaagaggggttgtgagccactgtgtgatgctgggaatccaactgtggtcccctccaagagcgctggtgctcttagctgctgactgatcaatctctttgcccttatttggttttaaaataagtgtaatttgtgaactgaacagcaagtaataattgaagataatatttaaaaatatgggtacctaataaatggtcaggagaataaaagtttttcagcagcacataatgattgcgagcttgtttcattttggtatttaatatgatgtttgtcccgacagccttctgatgtgtgctcttcctttgaagagaccttgtggtgtgaagtttaatacaaatgcctattttatcagctttcccttcctataggaatttgcttttagtggtctgtaagtaaaaggaaaaatcaaaactattgcaaattttttgtcgttttccaggctgaactcacaggaatcaaatggcgtaggtacaattttggagggcacggggactgtggacccataatttcagccccagcccaagatgatccaatcctgttaagtttcatccgctgtctgcaagccaacctgctgtgtgtatggcgtcgtgatgtcaagccagattgcaaagagctctggatattctggtggggagatgaacccaacctagtgggagtaatacatcatgaactgcagggtaaggattttgtttttctttaaaaaatatttgcatatgttttttgaacaattgtaaattttggaatttatatttaggagttgcttaaaacagatcccaagcaggcagtggacagtgtgtttgtcagaagaatagcctcactcccccacctccgccccccacatttctctttccttaaactctcttgttcttccttagtcatgctgaaaattagaaccttgtaagatcaccttaagtccattcttttatcatttacagacagagtcaacatatagccttaaacttgaagcactccttctggctcagcctcttgccaactggggtacaggggttcaccaccctgtccttctggcctctgaaatcattactgttagagtactgtgtacccagtgggcagtgtctgggaggagacaaggctctgaccctgcttttttgttttgtttttgtttttgttttgtgttttggctttttcgagacagggtttctctatatatccctggctgtcctgtaactcactttgtagaccaggctggccttgaactcagaaatccgcctgtctctgcctcc

SEQ ID NO: 30478 - DNA, 1145 bp, Mus musculus
tcagaaggaagagagccagcagcccagttaggagagtggaaacagagagcttcagaactgggctctaaacacatgaagagttttcctttcttagccacaagaagcccagcttaaacctacagggaacacagcagcagcagcagcagcagcagcagcagcaggtgctgaggaaggtgtaagggctggatcactggtgtgtaggtgcagggcctataaaacgctgcgctcaccccattacgagctgttgagttcctaagagtaaatgtttatctgcagtgcagtccagcagctgtaatgtggtcttttatcccagaatgatgaaagcctccacctcagtgtgcagtagcagaataagggcagccaccagtgaattgtgatggtcttcagcaggccaaagcaaaaccaagtgtgtgtccttccagtgggaggcagggttttaaaacaggaatacactctccatatgcacacacagtaggttatataaattatcttcaggagtttgggaggaataaaaagtgagtcccaaaagcttcatgctgtgggatccatttatgggacattcttgaaatgacaaaatgcagacacagggaagagaccattgtcagcgttaggaggacacaggaaggaagttggtatggtgtggtactgagcgcatgcacgctacaccagagccgctgctcctgctatggcattggccccattctgcaagtagcagagaggacctggatctgtcacttttgtgcatgtgcgcgtgaaccagtgattttctagataattaataaacgtgaatgaccaccttttactaggttgaggatcatttttctatttcacttcttggcatcaagaggttttgtttttgttttttgtttgtttttgtttttttctgtataaacttgaaactcagatctgtatctgttccttgacttgttgaaatttgagaatcttggaacactgtagcttttaactctagtttagcaactcctctcccctcttacctttctcaagattttgctgtgtagaccaggatggccctgaatttatttcttcctatcccagcctcctgaatgctggggttccggggtctgtggcaggcctgcctcttgttgctgtttttatctgctccggagccgctctcacacacaggg

SEQ ID NO: 30479 - DNA, 1099 bp, Mus musculus
tcattgctcatgagggaattgctttctttccagatgttttgaggcttatcttgcatgcttagacataagcaaagcttactgtgggcagcagaagtctgacttactaaggctggaattccctgagggtgtggggtgctgtggtttgagctgtggttggcgggtaattgtggaggtctgcttgggacatggatgcccttactttgtggacagttgaaacgcaccctcaacttagctttccctttatatgtgtgctttctgagagtttggataaaatttacctaattataaaaatgtagtaacagctagttctgagagcattctgttaattctttgaaattttcatccagtgtgtgtgattgtctctactgatggattgcactgctgatggcctgtgagaaggtagctcatcataggttatgtgcagagggtggctctcctcaggctgcaggcatggagatcctcagtttctgtcttcacagaaccactgagaagatgggtgcccgctctgcccacgtgcccttgcctttgaagcagatgggccccttaatgttctggtgtcccacctcttcctcaccgatgcctgtcagtctccttctgggtccatttccttgtctacacttagttctttggtctttgtcctcttcctcttaatccatacattttcatcttgagccattttttctatgactctaactgaactttaaggctatctaatgctttccattcctttcagaatcctccaaagtcagctttccttgttgtcttccctccttgctaattcactacaggcattcattcaccctccctccctccctccctccctccctccctcccctttctaaatcttctaactgcactctcactgtgtggacacagaggccctgtaccgtgggctgtcattcaacttgtgttccttgatttccgtgatgctgtccccaagttcctccaatgtctttgccttattgcttttatttttggcagggtctcatgtagtctcgtctcagacttggtggctgaggatggccttgacctcctggtctcctttttcctaagggctaggtacatgtgtgtgccacactcagcaatagaatgatcttgg

SEQ ID NO: 30480 - DNA, 1099 bp, Mus musculus
aatctatgagataaacattttcattttctgtttcctatttaatgaaaataggatatttgtcattatagagaatgatcccaggaaatcatctgggatgcatatatggccaaagcgtctctgtcccagtgtcataatgcccagcagtttgttggggctgtagcctgctatatacactgcagtttgccagcatgcctttcttagtgttagtggctatgaggaaacgcaggagccaatgctgtcccctgactgaagcattcttagatattgagtgttgaaaaggagctgccgagaacatttccagacctgctgagcagagggaaatgtccaaggaacaactgctatgaagttcaagctgtgtgtggcaaggggtttgagctaagtagcttttgctttgttttgttttttgacagggtcttatatattccagcatggccttggctttgaattcccgaacctccagcctccatgtcccgagtgctggcattgcaggggtgcccagccatgcctaggttggtggtactgggaattgaaggagtaggccagcacttgcccactctgcttcgtccccagccttctcacttgtggtttgtcagaatcagaaagggagaccaatacttgatgactgagaaacaactgttgactgatgagaaagaaaatgcgctttaaaatgctttaaaagcctcaatatagttgattgaaaaaaatcagccttcaaagattatcttcagtctgtggatctaattagctgggtgtaagtgataagcgataaatccgaagtctcgcattgtgatttagaaattgattagctgatagagcacaggcacagggaaggggactgagttctgagagtgcagaggggcagcagtgaggttgccactaacactgttagctgccatttatgtgtgtgcaggcatcagggtacatcattacatgttcattgctctctgccttcacagtgctcaggagccttgcaaacagagaggctagagcgggctaacctggaggtcatactgtatggggaactgggtatagcaactggaaaagttcagctgagatagataaataggtgggtaggtaaattagattttagatttttgag

SEQ ID NO: 30481 - DNA, 1188 bp, Mus musculus
tgtagctcctgtaggcagcaatcacacccttacatgatgtggaggaagcaagccaccctactggccacaggcagtgcagacgtgtagagcctgggaaggagaaggtcagtcctgacgcgatgcgtagggcagccagaggcagcagcaggtgagcgccagagaagtaagatcaggtgtcttggacaaactaaagctagagtgggaagctgagacaggagtggaagaacactgtcagtcaggggctgaccacctaaacggcgctggtcacctgcctccctccctcatggccacggtcaccttgggctattcctgacaaggctcacatggctgtagccatgattgctgtagccagtgcactgattattttattcctggaaatgatgaatgcttccttctggctttttcaactctgctgtagatttacttttgcagttatgttgttcgtaaggtggcttcctgttgctctgtcagaaggattcatagtatctatttttctgaaggccatgcataaaagtttacaaaagattgaaattccagtcagcaagacaaaggagttcccatacaaacgctcatcattagatctgtgactgtacattttgacctttgccgatagaatttcttcatgtcctctcccccctctccctccccctccccttttctctcctcagaaagatttctctgtgtctcttgccatgtagcttaggcagtcctgggactcagggatgaaagggtgtgccaccatacctgggtttagaatactttttcatcaaagaagcaatgggaagatagtacattaagaaatatttgtgtctacagcatttaatagatctgacacttctatgtttaaggcatcattgatctgagccaattgtctttgaaaatagacttcttcatgaagacattaaacacactccttttagtagccaactcccttcactgactttggttgttgtaaacctggttaagaagtttaggcagacttccttgggattctccataggtctagttttcttatagcagttaggtgatccccgtcaggagtgagacagtgctgagttcccacgaggggagacttctgtgtactcattctgaccctcagaattgagatctaataggtctcattgggaagaagaagcagcacatcacataatctcgggtggggcagcctgaggccatgtgactaggaag

SEQ ID NO: 30482 - DNA, 1197 bp, Mus musculus
gttggagtcaccatatggtagctgggaattgaactcaggacctctggaagagcagtctttgctcttaacccctgagccatctctccagaccagtggttttacatgttattgttactgataagttacactctgaagactatggtagctaggactatttggttatttctctgtgcttcagactcaatattatatttatctggcatagaacagaagatgcttagtttggacataatcctgcctcgtaagttgccaagtacaacaagccctttttttttttttttttttttttgtattaaaaagtgctctcagtgttttacactcagtgttttacactcagtgttttacaatgtggcttttctgcttggaacagaaaagcaaagcctttgctgcgtctggagtcgacaaagatccgcgttttcaccctcacctgactgactcatccgttggattagttagtaactcagcctgtaccttctgcccatgagctaaatgaacatgtggccattcctgggcatcacagggcgttccagccacatggacaccacgtggacaccagaacccaagagtgctcaagccactggccagacctgtaaccagcctgctgttctgtgtacttgattatctctgtgtgactgcgggtccctaacaccatgctgggctggctatactgcatgctcagcacagacacacccccaccccagtactttcagtttgcaggcgattgactgatggcgtgcaggtatgctcatgccttttctggcctcagccgtgtagtcatcctaacataggcatttgaaaggcacttgtcgttgtatagacaaatatgtttcccttgtctacagttagactttacctttcttttttttgagtctagagcatgttatcaagatttttaaaaaattggctgtcagccaaattttaaagctttcttttcaggaacaaaagaatttgagtttttctgtatttcttgatagcaatggctgagtgtgtggaacatgctgctaaaacattttacttcatgtggagaagtgttatttttgtaacctcagtcagcttagactaacacaacatccaggaactgcagctatgtagcagaaggatagagcatcttcttggcactggaagggactttaaatgctggatcaggccaagcatctacttgtcttggactcagttttaaaaattctgttgtggggc

SEQ ID NO: 30483 - DNA, 1208 bp, Mus musculus
gttggtccatggcatagattacttcaaaggaaatataaatgttcagcgtttataaaattataagtccaggaaacaatttaatactctagcaagagttaatttttttagcactatctggattctttaaaaaagtctcatctagatagacttccagtcaaacaacctttgtatacttttcagatacttttgggaattgcctagatattactttatggtatctttgttactttttaatagaagttgctcagaattaatctttgagacttgggaagttgtcctaagagtatcagaagtgacttgccctttgaaggctggagaggccggtgggcctgcatggccccctgagccccctgaaccctgttttctctgctggcattcctgccttcccctgaggacagcatttactaccccctttctgttccctgtgaggctgaggtgaaacctttgaattagctcattaaccttgcatagaaaaatgtgtcaacgtttctttttatttggatgtcctttttactggttcttttttttttcttttttcttgtttcttttcagttgtggaagaaggactctgggaaaatggcctttcctatgaatgtaggacgctgctcttcaaagcaatccacaatctgttagaaaggtaagaaaggggcgcccagagtccccgtgggctttagacacggggtcatctgcaatgtgagagctatgcttttatatttccttttgttttatatttccagagaagcttaggcagcccagagacccctgcatcccctcctggagaagcttaggcagcacagagaaccctgcatcccctcccagtctgaacatgcttcttattcagtctttagtttcaatgtccattttttactctttgaaaatgaaggagccattcctaaggtcaagacgaccctctccagtaagcacaggaccacagaagtgacaaaacaatctcctgtaacccttgctgacattgagatgctgtgggtttgacagttatgtttctcgcaccgagttgaggagctaatccatgacagtgcatgataattcatcgtttagttacacagctcttcagatctgggagagtcctttctctgtaacgttcttgcagatgctgcccttgatgatgagtggggccttagcttggctcctcagtttgaggcagtctcttgtgattctattaagcttattctttttaataggaatggcac

SEQ ID NO: 30484 - DNA, 1179 bp, Mus musculus
cctcatatcccacactttgggttgctgttcatgtgttttgtttggctgaatttattacacagtcagaggatggatttggtaccaaggatgtcactacaccaggtcattccacgccggtgcctgatgggaaaaatgccatgtctattttcagttctgctactaaaacaggtgtgtacattgttactccctcacttggactgttgctaaagtaaaatgcaaagggaattcctctcaagttcagattatgttcctagtgctatagcagtaatttgatcacaactttaatagtttttttttggattgtttttggttcatttcaaagctgataagcatatctggaaataattgtgtctaaatttaagtaggacatagggaattcccagcagaccttgtccactgaggtccagtccatgtccttccctgtctccctccctcagctaggagcctgctcaccctgtccttgcctcctctctcacagatgtccggcaggacagcgctgctggcagagccggctctgggagccttacccaggtgacagatttggcaccttccctgcacgacttagacaacatctttgataactctgatgaagacgagcttggggtgagtctgctgtagtggcacccgtgagacccaccatgtttggtttcttgtaggttcctcttagttggcttcactgaactcgggactctccttctaggaactacatggtttcaaaaggctcttgtttggaacctctgagtgccttttactagtgctgttctgtgttgtacattattattctccatagttgtaaatattaaaatcctccacatttattttaataaaccctcctaatattatggaaatacattttccttagaggaggtttttcttgaccttctaaccgagcggcaagtttgtggtcacagtgctgtgctgggaagtggagtgtagacgcaggattgcagggggagggggaattagaagtcttcggaagctacctgagctaagaaccaggaagttcatgcgctcatccttttgtcatctctgtcccttgggcaaacatttgcactcgctgtctctagggatactacagcggaataagacacattcttttcaaagaacttagttcatttattttattttattttttcattttcttaatcttcctttccatctattttacataaacttttc

SEQ ID NO: 30485 - DNA, 1204 bp, Mus musculus
aatcttgctgttaagatgcacttttaattttgtttttagcagttgcagacttgcaaaggatgttccccacccctccgtcattggaacagcaccctgcattttctcctgtgatgaactataaagatggagtaagttcagagacagtgactgcactgggcatgatggagagtcccgtggtcagcatggtccccacacacctcacggagtttaggatggaagtggaagatggcttaggaagccccaagccagaggagataaaggtaataaccagtttgggcttccccagggctggggtgcttttcagtgggccacacacacgagtgcataaggaccattgaaactggagcttgtcagtagaagtcactccatcaacagctttggcatcagatttttctttttacttattagagagaactattgaattacagtcggttctgtgcctgggttttatgaagcaccgagccaccgtggctggctctagtttgccagcattaagccaaccccatttcattgtcacaggacttttcctatgtgcacaaagtgccgcagttccagcctttcgtgggatcctccatgtttgctccactgaagacgctgccgagccattgcctgctgcctctgaagacacctgacgcctgtctgttccggccctcatgggcggtccctcctaagatggaacagctgcccatgccccctgcagcctcttctattagagacggctacaagtatgtgtgggactctacctaccccttaccatatgtgatagcacctcactgttttctcagactcgtcccggggccacagtggctcagtctctgagaccacttgctcgcttagtttccttttgaccatgttgtcttgtgcgggtctgtgtgtttatttttaaatgtttcttctgtgtgtgtgtgtgtgtgtgtgtgtgtgtgtgtgtgtgtatgtatgtgtgtgtgtttgtgcgcacttgcatgtttgtatacaaattaagattagagagctgtgtgtgattctaagctggtgtttgccatagaatctacacttgattgaagttgttgatgtttgtgggtagtgggaggagctttgatttgtaaggtaatggtttcagtgtgggactttacaattaggtaaagcagtaacaggttgaggtgtggttggggaaagtaaaggtagacatggctggtaacttggttgtctcgacctgccggag

SEQ ID NO: 30486 - DNA, 1544 bp, Mus musculus
ttttttctttgtttttgaagagaaaattgcagatattcagtgcagggctatggggtggggtgtgcagggagcttctgtacactcccccccccccaaagctactttgtatctgttgcagtaacgtgcctagtgtcgggagccttgcagacccagactatctgaacacaccacagatgaacacacctgtgacactcaacagcgccgcccctgccagcaacagtggagctggagttctcccatctccagctacccctcggttctctgtccccacaccacgaacccccaggactccaagaactcccagaggtgggggcactgctagtggccaagggtctgtgaaatatgacagcacagatcaggggtcaccagcttccaccccctctaccacaaggccccttaactctgtggagcctgccaccatgcagccaattcctgaggcccacagtctctatgtcaccctcattctgtcagattctgtgatgaatgtcttcaaggacaggaactttgacagctgttgcatttgtgcctgcaacatgaacatcaaaggggcagatgtcgggctgtacatccccgattcctccaaggaggaccagtaccgctgcacctgtgggtttagtgcgatcgtgaaccgtaaacttggctacaactcggggctcttcctcgaagatgagctggatatttttggcaagaattctgacatcggccaagctgcagaaagacgcctgatgatgtgccagtcctccggccagtccaccttgcttcctcaggtggagggtgcccggaaagccccagagccccccgtaagcctcctcctcctccttcagaatcagcacacgcagcccttcgcttctctcagcttcctggattacatctcctccgccaatcgccatgcactcccctgtgtgagctggacttatgaccgtgtgcaggcagataacaatgattactggacagagtgcttcaacgcattggaacaggggaggcaatatgtggataatcccacaggcgggaaagtggacgaggctctggtgagaagtgccaccgtacattgttggccgcacagcaacggtaggtgtcccagagtacagacttcagtagaagttatcttgctgtacatggtggccaaggaaccagaagtgagtgagggctgggctgtctcttctgccttgagtgggctgtgtcctctgtcttgggaattgggctgccttctgcttaagcttttgaggacaagtaactgccccctgagactttgccattccatcccatcacaaacaagtggtgcttgtggcagcttgtggccaagtgtgtaaaactggtggtcagtgttctgcctatagggatccagtcatcctatggtgtgcagttgccatggtatcccttcccttctggaaactggccacccatgtcctgagtgttgtctccttctggtttctcaatgtgctccatatcagtgaccacatatgactttgctgtggttacaggggcacattccaggggtttgagctattttaaattgtcaatcagcccatagtctagctgagcag

SEQ ID NO: 30487 - DNA, 1320 bp, Mus musculus
gaacatccatgtgcactgtatgtgactgtggatgatccatgtgcactgtatgtgactggatgcatgttcgtggtgcactgtcaaaactgtgggcatatgcacagctaaaggatccagttctcagtgacatcagaaaaggaggcttgttaaaagtgatttcttttctgtttcttcctgtaagccaaatgtagaattgactagctgttctatgtgcactcagctgtttgtgtaggagtttgtattcatatatggtggcagtatttaaggtgtccaggggacactgctagggtcactaagatgatttttgtcttccttcagcaccttatttagccactctgcagctcgacagtggcctgctgatgccacctaagcaccagagcccaccagcagaagcacagggacaagccacgcctgggaatgctgggtctttaccttcgaattcaggctcaggagcacctccagctggcagtgcattcaatcccacctccagcagctctgcaaaccccacaacaagtagttcatctgcctcctctgggccgccaggctcctcagctgcctctgctccaggcatcactcagatgaacactacctcttcttcaggattcggtggtggtgttggagggcagaaccccagtgcggggggcagctctacagatcgaaccccagggaatgtggcttgtggagacactgagcctgggcagagctgcacccagtcctcacaggatggacaagacaggtgtgtttgtgtctcacaaccaagttaagcttccacttggtcacacagtggggcttctgcttggtcacacagtagggcttctgcttggttatacccctttactctacctcacacacactttctttcagaattcagtcaaatgcttctctgtccttgctaataagaagtgacaagtggcgctccgagggcctgttaagagagagtcaatcagcgtgcttatgactgagttcattaagtggtagtgtttgttataaaacctttgtgtgcactgttaataaaggatcagagaaaacgcccatttcagactaacacagatacaagtactctgtttaaacacactcgagtccagacatgcttgcagtattgggaatttggggatatttgcatagccagcatcctttgcctgaaaatgagaaacccaagaccctgagttgtgagtgtcacatagcaacttttggcttttgtactgctgtctgtctcctgtctcatctgtgaaatgttgagcctgatgtgtgacacgtggctgatgcattggatcatagcccggggactggtgggctctgtgattgatttgttccatagag

SEQ ID NO: 30488 - DNA, 3126 bp, Mus musculus
caatatgatcagtatattctcattttggcatctagccaacatgaaacagttttcattcagtggcttcctgatcctggaggccctgaggtggccatgctggtgtgcagggacgcagggtgggccacgtgggccccacacaccccaagcctgtggcccagaagctgacctctgtgctctccctggcaggtttgtgctggagcagtacaacgccctatcctggctcacgtgcaatccagccacccaggaccgcacttcctgccttcccgtccacttcgtggtgctcacgcagctgtacaatgccatcatgaacatgctctaaccgggaagggaagcgcttgccctctgcctcagctcctcctgcagccttggccagggagcctgctccactctgcaaatgcccggccttttttagagcactccctataccccgcactgtgacgccttctgagcaggctcatgctcctcctgcagtgttcattgccacagtgacttcttgacgtgtctcacgaggacctggaaatttccataagcagtgacttgagccaatgtgtgatatgtgcagcctgcagtccccgggaagtggcggctgttggtggctgaagaggcaaggagaagagacaccgtccttttgcacaagagcctgctctcagcctctgtttagtaccaggctgtccagccctctgaatgcaatcctctagccaatggtggatgcctgggggtctcccatacttcataacctgggatgtgtcacaactaagagccagctccaggacaggatctagtgctggggcctctgcctcccccgcctgtcaggagggttttagttgatggcacacctgtgtagacacaggaggtctggggacagctgcattctgtttatttatttttcattttgttgtaagtttttttgcgactttgttttttctaatcttgaggaccaggtacagtagctgaagcccactgagacccaccgtaggattctctgagtacatacctctgtcctagaagccaagaaaggagtgagaagaagcggggaggccacctagtggtagactcggtcagacagtctgtggctgcagcctgtgtaggttgcacccctatatgaagatggtcaggctcagccccgagctggaggcaaggaccttcatcacttctctatacagtcacatggaaataccttttctagagaattcttacagaaagccaggtctctcctttcattagatcaaaagggactcgtgtacatatcacaaccaaagtgtttgctcacgaaaccagttacaaacacagtgaattttttctggaccataggaatattgtttcaaagaaatagtgcaactcaaccgttacatcagtacttgaagctgagcctctatgtgggactttaaaaaaaaaaaaaaaagcctttttaaagcattcgcagctgattgaagtattcttgactccctgtcccagaccttagggttgactttgaaaccctgtttctagcccttatgtcgtatgtttctgtctgtgggtggtgggtgtagaccggcttcccagagcctcctgacaggcccggcactgagcccggctcccgtgggagagtcatgcaaactaagttcttccaagagactttcatgtcctggttattaacaaagaaaaggaaaaaaatgtaataattgatatggttttgtaaaagtatttttcttgagataatctaacgtttaaaacattatattaacatgtggtggggatgtgaaagcagagaaataacttgtacatgggtgactgttctctgtctcaccaactgggggggttgctttccaatgtatagcttaaaaaatctgatatatcaaaccgtttgtatctaacgtgtacagtgtaaaattgacttaaaatatcgcagtgctattttttcttatcagcgaggaaatcctcaaggccttttgaagagcgtaagatgacggagatgtaaacttgtataaagtcacctcggggaggacgggctgtaaactagatatttgtaatctttaccacttgggattgcttcctctcagagttcaccagaactttgaatttctctctctctctctcttttttaaatgggctgtttttactgcaggggcttttcttccctagaaacccaactctacgcagaaaaagtgaaaaggaaaaaaaaaacacaaaaaaaaccagaaaaaaaagctataaaaagttttaaaagaaggcagcaaagggtagtttccatctggtgtcttttatttaagttttttaagttaagaaaagctggtgacatatttatacgtttttgtgcaaaaaataaatgaatggcaatagatttaaagaaatcttattatgtacttctgtgtgcaaaagtctgtataatatttcccctaaatatgcattattttacctgtgagttttttacagaattaatctgaaatgtacaagccctggatttgctacagagtgagaagttattttattttattttttttttattttttattttgagaaaactgcagaaatcagaactcctaccatggtttgaaaagggaggcgggaggggaggcgggagggctggtccggcatgcctgtatgtatctctcaagagccttttttttaaaatgtaaaagctgtacatttttgggaagttctgattttctttttctttttttttttctttttgtttccttttaccttcaagcattttgcagtgcgcttcttttatatctagcagacaattggaaagaaatacaaaacctatgtgacgttcatttaagaaccacagcccagtgctggttcaatacactaaagactttgataaaagagaatcaatggcaaaggtctccattttaaatgtcattcatatataccttgtggatgagagctatatacttttacacacttttttagaggaataaattattgaattactgaaacctcgagtggctcttttcccctcccaccccctctctgtactgagatcaccccgctccagtctgcacatgcgtcacagacggatctactgctctggcctatagagtgcacgtggggattgcatcacccaccaccccagtggctgttccagcattcccaggtcgggtcccagatgccaccagcaccaagagcctcttaggtgct

SEQ ID NO: 30489 - DNA, 1789 bp, Mus musculus
caggctgcgttacagcccctattccatccccgtcccagtgccggatagcagcagtttgctggccacagctttaccatcaatggcttccgccgcggggcccctagacggcaaagcggccgccctggcagccagcccagcctcggtggctgtggactcggggtcggaactgaacagccgctcgtccacgctgtcctctggctcagtgtccttgtcacccaaactctgctccgagaaggaggcggctaccagcgaactgcagagtatccagcggctggtcagtggcttggaagccaagccagacaggtcttgcagcgggtccccttaaaaacaagaaaaacaaaatcgccccctcccccaaggtctctccattccagtttggtcaaatctgccagtgcactttgttagatgtaaaataaaccacgggccttccacatggggtgacccccgccctgtccctttcagttttgtctgggagggagcactaaagcctttccagagactatgctagataccacaggccctgccaccatgggctgtgtaaccaggctgctgttgctttgaaacgcgggactgagggggcgggaggagtggtggcaaacaggcttttgtgtctagagcgacttttgtgcaggctggtatggaagtcggggctgaagaacaaggtagccaggccagccaggagcgcgggtctttgagagacttcaccggaatctttcccccttcgtgtgtttagtggaaacatcccccctcctaaacaaactaacaaaaccaatatggaggtggggggagatgaagtcctgtggaactgtctatgaagactgaaactcaccaattgctgagtactttcgttggggcagagagaagaggggccttaccttgccccatctatattaaaggaatcctgtctttttttgtttgtttgtttttaaatattgtgatgttttaagagccgatgctggcttcttttttgcatgttacagttttctgggtttattttgcccccccccccttttatggaaaaacaacggaagtcccattatcctcaaccttgctcaaggcggcaaccaggaggaagtggggtaaaaggggcagctatgggcatgaaaccaaccgagttgatttttatctgagcgcttgtagagggcttcgtgtgcctgttggaccattagttcttttaactgtatatgcaataacaaggttttaaaagataataataaagaggaaacacgactattggacaaagtatttatgtaattatttgatatctcttgtaaataggtggaatatgactgctcagaaagttaaactttaatttattgaattgtacatagctggatgtaaataggagcgtgtctgtcaggttttattcttgttttgccttttgggtcttatttccaggtcaggagatggctaatccacactagcaagcctaggcatctttattcacatctccatgctttcaagtagagctggctgcaaagtttttttttttttttctgatggagggggtgggatcgggagtactcctaactattttcaccaaaattggggaggtaatggcccttccgggctccacttgaaattccctaaactcttgacacccccagaggggttgagattgttgtgtgagtagggggggggggggaacggccttgcggaggccaccatagaaccgtcctaatttttcatagactctggcatcttactaacccatgtgaggttttcattgttcatctttatggtgttttggattggtgtactgagagggacttggttcaaacgaccatga

SEQ ID NO: 30490 - DNA, 1147 bp, Mus musculus
tgatgccccttctagatggcgagaaggtgggaagcctgcagctctgagctcacatatgtgggcagggcatatgtgtatggctcagagtgctcagcccaaggtctgagctcgggtctgtgactccacagctacttaggaacaccgtctaagtgtggtcgccaggcctctgttccaggcacaggctgagcatgacagactcatttccatgggtgtttttggggtggacatcactatcccaggcctggccccacacatggtgagctcccctcatatctgagacacacagaccggagccagtggagaaagtgatttcacaatggggctggggctctgtaaagaggaaagcaatagagactagctgagtcctctgtaacagggaccctggggaatgcttgtgctgtgacctcatagggatccaggagatgaagaatgagcaggcgcagcatgtgcaaaggtcctgtggcaggctctggtttggcagatttggcagtcagcaaagaggccggagcagttggtgtgagctaagcagagagaagccagggatgaggcgtgagcagctgacaagcccagtggggaaggggcaggagcaggtcggggaccagcaaggaggtcacttggtcagttggtgaccagtgatagtatcccaacctgtggatgaggtcatgggcacatgtacttcagaacagcccagtgctgggttcaggagtgtgtgcatgcacgtgtaccatgtatatgtgtatgcggatgcaggagtgtatgcttcatgcctgtgcgctgtgcttggtctcattaaacatggttgtcttaggcttccagtgctgtggagagacaccatgaccatgccaactcatataaaggaaaacattttattggggctgccttagaggtttagtccgttaccattaccatcatgatgggaaatgtagcagtgtgcaggcagacatgctgttagagaaggagctatgagttctagagagttctacatcttgatactgaggtagcaggaagctgagccacattgggcatagtttatgcatatgaaacctcaaagcccaccccagcagtgacatacttcttcccacaaggccacacctcctaacagtgccatgccctgtggggccatgggggccattttctttcaaaccac

SEQ ID NO: 30491 - DNA, 1696 bp, Mus musculus
tgggaggcaggtgagcggcatccatgggaggctggactgcccagagccgtgtttgttctcttcccgggctcatcccccgtttgctcgctccttgcgctcaccccacacacctctgcctcccccactcactgctgaaccctctcggggtcttttctcctctctgccatctgccacagaacccccgaagaaaaagcggtctgcagtgttggatgggatcctggagcagctggaagatgaggacaacagtgacggcgagcaggctctccagctgtgagctggcactgccagggtgcatggctccagggccccggggctggatagtgcgatacaggaagtctccatgggtcaggaccaaaggagtcaaaagctcgcggcaagtatgggatgtgagaacaactttgctgcagactctgcaccagtgctgagcagctgctgacctggcacctgcttgtgagatggttccatgaggagctcaggcctggcatcctcctgtggcatggctggccagactctgggatgagtgacagggtgcacagccactgtagagctcagccctggccagccaggctcctgcagccctgtctccccctcaacaggactgctggccagtagacagagctggggactctacctcatcatcggggccccttccttgtccctgtgatgcagccaggttctgagccctgctgtcaggttcacaggctgaactgcgccagcaccactgacggactctacagctcaagcggaggccctgggagtcgcacggaggcctcacccgcaccagaggcttcaaaggcgagtctttggctgggtaccctagcacagcctctctccatggactcggacacaccgtcaaccagaggaggacatggcactagtcagggaggaaggccagagcccttcaaccactgtccagccccagcactacctctcaagcaagaagcttaagacctgtgtcattttgagtggctgttcagtgcaggtgactggcatggctgcctcggccagccatgccaacttcactcatccaaccaggaagacgtggggagacactactaccacctcagagctgttgtcaccgagggctgaagaggcaccagacaggactctgagcaccaggctttccaactttatgtgagagtcttggcctatgaactttttgccttccagatttgcctggatcccacaccaggttcccaaagatggggccacgccctctcaggggtgctgagaactaagcaataaacggcagagcctagaattgcccctccctctaccctgatgtcactctgtcactctgatgacaccctgcaccatggtgatgcacagaggggtggagatgatgcttgccacacacccgtactggaccatggggatcgctgtgggtcattagaaaccgacccactcactcagggtgcacccacccatcatcacacctcagccaggatggcccagggcagaaagttgtagtctgatgccagcgtagactccccagagcaggctccacacctgtgccacttggcatgggacccaagacctgtgctccaccaggttggcctctaaaccctagagcccagcaggtgacttctgagtcccccagcctcctgagcacaggtccccagtacccatgccagctaggcaaggtcactgtgcactcgtaatctcagatcttatggggacaaacaggtccttggat

SEQ ID NO: 30492 - DNA, 2605 bp, Mus musculus
ccatcccttccttcccatccaggtacaatgatttcctccatgaccctctgtcattgtgtgaagcctgcaacccaaagcctaatgcggagaatgccatctctgcccgctctgacctcaaccccgccaatggctcctacccatttcaggccctgcatcagcgcgcccatggtggcattgatgtgaaggtcggccacctaagccagttgtcacatgccccggggaaggatggatgggacaggtgcagggtcagaggtcagacctgggctgaagctgggtcagtttaaggggatatcactttggggtcagcttcagaatggtgttttgaagaaaagtcgtggtgagagttgggccctaccagctgagtgtgtgctctctgacccccccaggtgaccagctttaccctggccaagtacatgagcatgctggcggccagtggccccacgtgggaccagtgtcctccgttccagtggagcaaatcgccattccacagcatgctgcacatgggccagcccgacctctggatgttctcacccatcagggtgccatgggactgagagagagtccgcctccgcctagctgccttcattttgtgtggccagtgggtcatacacctgccgtccacccctcgggcttctgtcttcactagactctggtcctagcggcttccttcgcaaggacacaacccagtgggctcagagttgcctctgtctctgagccctctgccccttcatggctcatcctccctgtccctgtcaccagcaggctggggcttatgcttggctgtgggcctggtgggatccggggcacacattctcctagtgctggtccctcagcatatgtgtgaactgacaggggacattatggttgtcactgctggcctgtgggcccatcgcctcaggaggcagccctgtgcccttctgggcagctcttctaagtgcaggagcttgagaacaaaaccaaagtttctggctgcttgtagctggagggccttgagtcttctttcagcaggaggaatggaccgtcaccccacacttctacccctactcccagccaagcctgcccctggcctcctggtaggtgtctctggctgtgtgctccggtcagcgaagcccaggctgtgcttctgttaaacaagccttgtggggcggcaccacaccctgtctgtccatggctgtctccttccatctgtcctttctctagtccacgtacctactgttcacctgcatcaccagccccctgcccgtccatcccctctcctgtccaccctaccgtcttttcactcagtcagcggtccacacacctacccgtccacttgcctgccttttcatctgaacgtcctcacctctcacccacccatccacctgcccgtccgtcagtctgtccacccagaactgcacatcccttttcattttggttttgctctgtaactcagtgtggccttgaacttgaatgccttgtagtccacagtcatcctctggttattgtatctgctggccgccttcaccctcacatgctgggtttccatgtacaggccgccgtgccttgattctgcttttcatcagcccactcatctctctgtccatttatccctgttagtccttctgctcagcatctgtctcaagtgctgtattctgggtcctagcctggcccaacctgctgaccactaagaccctaaatcctagacccagagacccacatgaaaccaagtcccctgtgtggggcccagagagctcacagcctgtgaaccagaggccctaagatgtgtgggtagctttacccgagccagtccgggcctgccatgtgttctgagtttcgttggtagtcaggggttggtttcctgtcaggttcactccaccttccctgctctgcagatgcctgcacggggttggttttccagacaccagggtggggccgctggtgtctcaggatggccttgtcctgtccctaaggacttcatattagcatgtggtggccttgcctgtgcatctcccagctgctttgcgaccccaccctagatccctgtgtggcttagctctggtcctctctcctgacttacggatgtgtgggttccaccagtcaatccactgggagacccaagaccccagaggggagcaccacttctctgagagccagggacgatgtggctgggtgtagagggagactgaacaaggcaaggaagctaacgcctgtctgcccggcactcagaagatgaggcaggaggatctccagtttgagaccagcctgggctgcacatagaccctcatgtcaagaacaaacaaagctcaaaagatctttgctctataaatatatatttattttttatttacaatggaaaagtgcacattataaacacaggtaaaggagggtggggccattgtcaagtgtatcccaccccactagggggtgccggtgacccctctgagggaggccagggcagcagcagatatcactcgggcagcccgttcaggcccagctgcaccttgagtgcctgcagctgcgccaggcttatgttgctgccgccacacacgatgacaaccagcgaggccagtggggtttgcagccggccttcatcctgcagcctgcacaccacgcggctgtacacagc

SEQ ID NO: 30493 - DNA, 1146 bp, Mus musculus
gaagcaagaggatggtcactagctcaagggcagcctgggctacctcatgaattcccaggctagcctgactcaacaaacaactaaaaatcactgggattatagcccagtggtagagtgcttgcctagcatatataagtcgctggggtccatctttgatgtcccacccaaaaaaggagaaaaaaaaaattccgaaagtctgagttcctagttcttgcaagtgaatatttctcatacagtctggctcgttccctaagcttcttgcagacctgatgtccgggtgaggggcagatctcggagtcacctatgggttgtgggtgtggtgctccagaacaggaagcacgtgatgcaggcccaggagggctacggaatggaatggggtttctaaatgggtggatagggacttggcttagctgggaaaggtctctgggcccctcctcctgaggccatgcatatgctaaaatcccctcctcttaccctaccctgcaggcactagagcagccagcccgtgagcagagagggctctggtcaggcctcaaggggcccatggcaagcagatggctggctctgctctgggctcctgtcttcctctgtgtggctctgatactggagacggcgtctgggaccggagacccatccacaaaagcccatggacacatccagttttcagctggaagtgtcaaccagactgccatggcggatgtgagtacctggtcggggcaggaaggcgagtcgggttgggggcgtgtctgttgtagtcccagctaatcattacaaccctgggatctacaggaatcctcagataaagttagagatttcagagaactgtgagctgtgtggccagtaacagtgtgtggggaggctgtgcgtttccgcagtggtcggtggtctgtgacaaacttattctgtgaaccagtcatcttggagccaggctttaaaggaaaggaggaaagcctctttgacgggacagacatgtgggggaaaggctaggaacaagtgcaaaggcctggtggcaggttctagcttagtgtgttcccgaacagcgaggaggctggaagggctgatcagtatgtataaggtttaaccgggtgggtggaaaggtgatgttggcctgattataaaaggctttgtggggctggtgagatggct

SEQ ID NO: 30494 - DNA, 1151 bp, Mus musculus
tcctaggagcgtgagaacagaacgcagccattgtcatcaaagactaccgtgagggggtggggttgggcagaggggtgaacagtggcttgcctggccctggaatcccacatgtgagcttgggaagtgaaggcaggtgtgatctctgagttcgaggccagcctggtctacttagcaagttccaggacagccagggctacacagtagagccaaaaaagaaggggcctagaagagaggagggatggtggaagctacggagtgtctgtttgtctgtcctggtcccagcagactctgccccatgtggacccttcaatgtggtcttagtttccttagcagactcgtgcccgatgtttgaagctcccaaccctgtgcctggagtattcggccattgcggaggtttttctctctatgaatgctccttataagggacgttccttgctacgcaaactgcagagatgagatcgactcagggtctcctgatttctgtagagcaagagatagaccaaaagtactcacggagagaaaagggaacacttctctaaggctgtgtgtgcttcaaaatagagggctggagggatggctcagcggttaagagcactgactgctcttctagaggtcctgagttcaaatcccagcaaccacgtggtgactcacaaccatctgtaatgggatctggtgccctcttctggtgtgtctgaagacagcaactatgtactcatacataaaataaatctttttttttgaaagaaagaaagaaagaaagaaagaaagaaagaaagaaagaaagaaagagagaaagaaagaaagaaagaaagagaaagagagagagagaagaaagaaagaaaggaaggaaggaaggaagaaagaaagaaagaaagaaagaaagaaagaagaaagaaagaaagagaaagagagagagagaagaaagaaaggaagaaagaaagaaagaaagaaagaaagaaagaaagaaagaaagaaagaagaaaggaagaaagaaagacggtagtaatggaacaggaagagggagatggtgggaggggctagggacaggagatgtgtgtgtgtgtgtgtgtgtgtgtgtgtgtgtgtgtgtgtgtgtgttggttttttgagacagggtttctctgtgtagtgctggctgttctggaactcac

SEQ ID NO: 30495 - DNA, 1197 bp, Mus musculus
tggacgctgatagagacagtaccacgtggcagaccccatagctgtgtaccaaggacccaacactcccttcatggtgcacatggcccagaaggctcccagggtggggactaaacaactcctgttctccccacagctggagccagacggattactggtgtgggtgctggccagtgccctgggcctcagcttgatcttctccctggtctccgtgccgcttcagtgtttccagctcagcaaggcttacggcctctgcctcctcctcttctacatctgtttccttgttgtggtcctgctcacagagtttggggtgattcacctgaagaaggcgtgactgaagctgcttggcctagaggtgtgggggcgattctgctagcctcctgagggggaggtgtggggagggggaccctctgtggtccccgtggatctcctgagaagatagtcactggcagagctctgcatgggtgagaaggtcctgactgccggcacctaacagccttagtgtggggatctggaggctggctttgctggggacaatcccgggtaggaatgatgggatctaaatgacaccggaggctctggggggagggcagcctttcagtcagcccccatgcctgctgggctctgggcagccctgcagttccctctctggctcttccactctctgtggggtcctgcgtacctacagggtggcctgaaaacagactccacacgtggaaacaagactgggtttctcagcttccgtgtcaagtcagccagaggaaagaggtcgagttgacagcagcaggcactgcccttcctagttggtggctgccatgttggactgtggatctaaacacttctagagctttgtggtccaaactctggctctcccgtctgcaaaacaggagccagcctgggctctgtgcctacctcaaggggagctgggggttggggggactgaccctccccagggaggtcttacaagtagtgtgaccagtcttttgtttgtttgtttggttggttgttttttggagacagggtttctctgtgtagccctggctgtcctggaactcactctgtagaccaggctggccttgaactcagaaatctgcctgcctttgcctcccaagtgctgggactaaaggtgtgtgccaccactgtccagcttgtgaccagccttttaaaagtgccactcactccctgactgccttcagctgt

SEQ ID NO: 30496 - DNA, 1146 bp, Mus musculus
gtaggcctggctctgcctctgctgctcccctcccccccaagcagaggttcttccgctctccctcccttccccccccacctgtgtgtccctcacactggctgggagagctggagagttggcaagcgagcgaaccaccctcagcagcgcccgcctcttccctaggagtggtacgaggagcatgcccgggaacaggagcagcagaagctcaggggcagcgtgcccggccctgcagcccagcagccccctggcagtcgccagcgctcccagactgtcacctagctgggtttcgtcaagccagcctcttctatgcaataacaccatagtattatgtactaggacgtatgggaaccatgtgtgtatgtagacacactcatatatatgcacatatttacacagagacagaaaagagactatagccagggtccgttccagccacctcgctctgtcttcctgagctccagaaataaccagcttaggctggaggcccaggcctggcggagctctcgtcctaccatggaaaactctggaagccctctgctcaagaagccccttaaataggctatctcgtctcagcaatgccggctttccccggggagggatggggggagcttgaccgcctccctactgcggcctccagcttcgtccctacctgaaccccagccaacacaggtgtctgtgtctggtatgaggatcaaaaccactaggaagaaaccccacaccctgcaggatgacatctatcaatgacaaaagtgttagaaggttcccttgagggagacagaagagcttactctctcaggctcccagtcctttcttgttgctggaaccctaccacaactcccccacccccacccccgggaacccccacccccacccccggcaggatccctccatgcaggagaaagccaaccagaggccctgggaatttgacttgctcaggggagttcatttgaactggtgctgaaggcagcccccctcaccaaccacactttcacactgcctcctccaagattctcataagctaggtgggtaggggtggcgagtcaggtcaggtgacttgtgggagttcttttgaggccaccatagtatatggtggcagagcgatggagccctgctgtgttgtccacaaggggctgaaggtgggcaggg

SEQ ID NO: 30497 - DNA, 1131 bp, Mus musculus
ggaggccaccagagggcagcaatagcgcgcccatgagcctgggtggggcttttcccacacgctgacatcagaagacactggtgaactgtcaatgccgttgtgagggtgcagaccctgtcagcacacccaagttggttttggcctgtcttgctttctgttccagtcatctgcagtaactcctagtggacctggatttttgggggggtgaatttccagtttgtgccatgcctgacacctaagtataaagctagcgtgttagcagggtggcgtgcccttggccttctctgtacattcacacctgtgtgacccgcagttagatgcttgcatctggagagtgccagcagcctggaaggctgggggaggggctgcctagccactgtctcgccccagtaggcacacctgggcactgttgagggcacgggtgcctgagtctcatttacccggcatgttaacggcgccttcctcccccgagcgtcggagactaaaatagtaacttggagagagcggttggtgttcacaggcttcctgtgtctcaggctcgttcctcaatggtacattaaccacgtagtcctgtgaggcacagagagactgagtaattggcccatggtcacacaggatccagcagccttgcagagctaggaagttaggtaggagctgctttgatgctgacgcagggagcagtgttcagacccagagtgcccgagcctgggcccagcctccagcccttgctccttcctgcaagcttcccccaccctcaccgcctttcctctgcacagttgctgatgggccagggtgtgagttgcgcccacatctatagtgccttggaccagacggcccgcaagatcaacttggccaagttcacacacaacaaatgttccaccctcatcgtgactgacctggccgcccggggcctggacatcccactgctggacaacgtcatcaactacagcttccctgccaagggcaagctcttcctgcaccgagtgggtgaggcgcctagctgcactgggggccttgggggcgggcggggggaggggtgctgtaccgtgctggcagctgggaatttggggaaactgaggccttaagtaatgtcccttgggtgggttctgacaggcagcctcagctcccaga

SEQ ID NO: 30498 - DNA, 1247 bp, Mus musculus
cttccttaacgaggctttcagctaccagaagtggaagcagaagcagaaaattgatgaccgggactccgaggaagaagggccatccaaccagcgaggccctgggccccgcagaggtggaaagcgaggtcgtagtcaaggtgggcagggcaggtggtatggtgtgaacaggaagaaagccaggcatggtgaggcacagggatgagcacgggcccaaggctgagctccccccaaatccctgtgttgacaggcacatcccagccccgagcttccagtgtacccgcaggccgcatgcgctcggaactcaagaccaaggagcaaatcctcaagcagcgccggcaagctcagaagcagcgcttcctgcagcgagggggcctgaagcagctttcagcacgcaaccgacgccgagcccaggagctgcgccagggcgcctttggccggggtgctccctccaggaagggcaagatgaggaaaaggatgtgaggagccagacgcagccctggggcttcctggtagccccgggtgtggacgtcagggactatgtccatgtgctgttggaagatccttccacaggcgctgctctgtgaggagtagtgccatatggccacagagcaacagctgcttttgactgggacattgggtgacctctgaaaggatgcataggagtctagctatgcaaagcaggcagacccaagtcctgaccctgcaagtcacagcggcttctggttccacaccttcaggattcagagatcagggccgtgtggatgcctctgacccagcattgagttttaatgtaataaactttactgcctctagtagaccaggagtgtggcttcctcaggatgtttttggaaggtgtctcagctgttgttgaggctgagagcaggtggccatgcctgcgtgtccctcctggtcactgagatgaggaaaatgagtcacccaaggcagctcaggactgctgcggggcagagaaaggctgtggtggcattgcccttcttcacatggaagagagaaagcagcctgcgccaaccctcgtgtcttcattctgctggtggctttttccacctcttgcttgaggtcctgggtgtgtgtgtgtgaagcatcctccagtagccagaccccagtgcaggtcaggcacacattggggactaccccgttgggcccgaagagcagatggtaccaataatcccctgccgctcagatccactgtacatagcaagtgcacatcctggagtgcactgggctccatc

SEQ ID NO: 30499 - DNA, 1311 bp, Mus musculus
cagaagcgctaaggggatctggctggtggctgtggggggggtgatgggagtccaccaggccagctggctccaacctgtggcttccggcaagagcagcagagataggaccaccagcaagggcgacttccctatggaaaacgatggcgctttgcccttcacaccacacacaaacgcacacgtgtcctgttgcacgcacgcactcacgcacgtacaccacgtgcctctccacttctcccagcttggggagaaagagacagaaaggcccccatgacatgtcctgtggaaatacctgtgtctccattacatctgtataggctcgtccctttcccaggacttgagtcaagcacgggatagtgggggggactctgtaaggcttcaaggggtcgctctgcccctgggcctcaaccccttaacccacgtcagcgctgccacctgcccactgagcactgcaaagccaatggggtagaaaccccaggttattaagtagcttttcgcaggccactggggacgaggctatcttaactttgtgcttgtgtctatctttcccgggaccctgacttcttcttcttcctgtgtccatctcttgacctctgtctatcccaggcaaagacatcgtccttgcctctgtaccggcttctcccccactaaaccgctccggacatttgagacccacttctggcttcaggagcgaggggaggaggccttgttcaggctatacacgcatcaagctgagcaggcagcaaagcgttaaacttctccctgcttgaaagtgggcggtgggcggctgatcgtctcaggccaaccagaggcccgttgcccaggcaactcaccagctccgcctctgaggattggctgctgggatggaagtcagccaagctttaaagggacgccagcaattgctcttttggaaaaaaaaaaaaaatctaccagtcccactgtgggtggagaaataaatggtctttctccttgtcaggcctttttctgccaagagagggtgctgggtgactgtgctcctctggaacaccgggaagacaatagcaaacggaggaccacggtggggcgggggtgggggtggggtggggtgggggagcagtgcatgggtcttgtaactgcccagtcatgcagcatcaagagaagtagacaggattctcttgcgtgcagccctccaggagaatgaggaagacctgggagacaccatatcagctcaccgaggccaccctaccctggagcaaggagcaggggaagaggctctggcagctcaagtggacccaagcctgtgggagatgccccagttccaggcgacccttgctg

SEQ ID NO: 30500 - DNA, 1150 bp, Mus musculus
tgtgaaggatataattttagtgggggagaaaatgaatacttgatttaatcttgttgaagcgctggtaattaattggagcataatgtaaaatatgctaattggaacgcaatgtaaaatatgctaattggatcatattgtaaaataagttaaatgtcatataaaattagcttagttttcaactaacccatcttctcactcccacttgcaaggccctttctcttctgtgggctcggtctagtccctgcctcctcaaccatgtctgtctatctctccgtctttgtctgtatgttcctctcatgtgtttcattagggttgctcactggagcatgggcaccttaccagagtctgcatccctgaagaaaatccctctccctcccacatcggccatgaactgcatataaatcctcctgaaggtatgagacccttccacagcaggatgacaatgggctccaaggtcccatgtgggtatagcacaactgctgtgagtttatgtgtgcaactgataagcctggctccgagattacctcttcactccctgccttctctagatcttcaattctttgtgcccctttgtctctgatgttgcctgagtcttggaaggtgttatgtagacaccccatttcttcgtctcctctttttatatattgttttggcttttgggggaagtcccttggagttccatatgaattttaggatatgtttgtgcacttctgcgagagaactcactgggattgtgagaggacctctatctgtgtgctgacaggtcatttttagcaggatggagtcttccacccatgagctgcatggatctctgcggggacccttcagcatctgcagctttctggatgctgtgacaaaataccagtctggccgagaggtggtggtgcacacctttgatcccagcactcaggaggcagatgcatgtggatctctatgagttcaaggccagcctggtctacagagtgagtttcaggacagccagggctacacagagaaaccaaaacaaaaaaacaaaacaatcccccgccccccccccccatgtaccaggcatgtctaggaggaggaggaggaagaagagaggagagaggggaagaggaggaggaggaaggaggaagaggaggaagaggaggagggggaagaggaggagggg

SEQ ID NO: 30501 - DNA, 1129 bp, Mus musculus
aacaatatctacctctcttaatgtcccaggacaaactaagctgcatttctcccttccctgagaagccaaagcttccctgattgagcttagctgctcacaggagaggggttacaggcctttgaagctgccacactagaagatctgcacccagctagatgggtgcagatggcttccctggggctgcataaagagaacccctcccctcatctttcctcctgtatcctctagcccctctcagagatcctgtgcaatcagggcagaatagcatgcagctggttgaaaccacttgctaaataactcaggtgagggtcccataaccttcccagcccacctcccttccaagagtgaagataacagtcaacaagcccagctgtgatgttcattgataagcaggctctggtggactcctaaagatggtgccagtgtggctcagtgaatagccctgcataacattttacacacaccaaatgctggttgatatctcttgctggctgcccagggagccttcaccccagggctttaactgcacagagacatgaggtctaagcccttcgcatccccaagtaaggctgagccttttttctgcctgtgcttgctctgatgcattgaggatcatgcctggccactgtgcaacttttaagcagagccgtgcaacatcccagggagttgacttctatgtaaacaccttcatccatttctgatgtatgctttgaggtggctcaggctgggctagcccagcccagacagaaatcctaggcatgtgattagaggatcagaacccttctggcccttcttcaggggagagatggggctgaaggtggggttcaaatctcatgccgagtgatggaacccgacatccctaggtgctaaggccccaccaaattctctggataaggaagttccaggaatctttactgataaacatcccaatgtatcaacaaggtagactctgacctccatgggacagaagatcctgggtcagtcccctccctggggactctgcagttggctgttcatttatatgcttcataataaatggtttctttgtgtagccctgactgtcctggaactcactctgtagactaggctggcttcgaactcagaaatctgccggcctctgcctcccaag

SEQ ID NO: 30502 - DNA, 1826 bp, Mus musculus
caagttcatagaggattacctccttcccgacaccacctttggtgctgatgtcaaatcagccgtcaatgtcgtgtgtgatttcctgaaggagagatgcttccaaggtgctgcccacccagtgagggtctccaaggtggtgaaggtgagccctcctctgcctgagctgactgaatggggtgggaggggaatctcagaagccagacagccctgatccctcctcttcaattctgagcacagctggcgatgggttctccccccaggccccatgtctgtattgtagaaggagactcagctacagtttatgttccccagtcccaggctacgaccatttcagagtcatagaaactgaagcccagaacagtaaagcagtttgctggagagtggcaggtcaaaggatccaacctttgcactgctgtgtgacatagggtaaattaactaccttctccatgtccagtattcccagtccacaccccaagatggcaaggtcacatagactaagtcaaatgtgacatggaggacagaacagcactcacatgctgcatggctggattgaaggaccctctctgggctcgatttgcatttcatgacaatgatacctaactcacaggctctgtgaaggagtcagaaacaaagttttttcttttctgccttgttgtgtttagttgattgtatttttatatttttagttgtgagtgggggctctgtatgcattagtgcaggttaggtcaggattgaagagagggtgtcatatcccctagagctgtagttacataggtgactctgagctggcctacttgggtgctgggaactaaactgaggtcatccgcaggaatatcaaccacttttaactactgacccacctctccatctgcagatgtgacaatttgtaatgccctctctcaacagtggctggtgctcaggtgtgttagtgatgattctcagcattttatttagggaggctcttctcagtataaattcttcttttgaaaatattcgttttctagatgttgatcacttttattacttttcagttgctctatgattctatatgctattccatagtacactgtgttatagtgtaacactattccttgctcatttcctttagatctctcccttcccccgctcccatacacacttccctcccccccccccccacacacacactgacatacacaaatatagactccacagatgaacatggatgtttgtccttctgaatctggcttatcttctgtaccaggaggagactctgagctggcctatatttcctacatagatcctgatgtcactcttcagggctaactagtattccactacacatgtggcagctttatatatccatccatccatccatccaatcatccatccttcacccttagtggtggactctagtacagcatctggactgcccagcacggctctccctgtcccttgtcattctcctccttgtctttcagggtggctcctcaggcaaaggcaccacactcaagggcaggtcagacgctgacctggtggtgttccttaacaatctcaccagctttgaggatcagttaaaccgacggggagagttcatcaaggaaattaagaaacagctgtacgaggttcagcatgagagacgttttagagtcaagtttgaggtccagagttcatggtggcccaacgcccggtctctgagcttcaagctgagcgccccccatctgcatcaggaggtggagtttgatgtgcttccagcctttgatgtcctgggtaagccagcctgccagagagcctcagctcatctttctgcatgccttcatcctcccttccagttccacctctgtgtg

SEQ ID NO: 30503 - DNA, 1161 bp, Mus musculus
agttcctattttagagtccaccttccccttaggccattgtaaatgcgtgtgtatgggtgtaactcagctatactcttagaagccaggtgtgaggtttttactctcctagggcaagggctttcacacccaagtagtggttctaactagggagttccttactagctaaccatctcatgaataatgcaatactctaaaaccacagcccatctacttcctaaaccattgtaaattcctgtatatgggtgcaacttggcttttattctaaatggtattgtagtaccagaggctattctgaatgtcactgaataggcaacactcttattgaattccaagcccatggtcttgctcaaggacgttttaggattgttggaacactggcagaaggctttagctatgtcagaattcaatcttaaaaggcacttataataggataatactgaaagagagcatgtggatccatacactagattaactcggaaatggaaaattaatgtatgggttagagagaacgccagactccaggagtaagtttccgtgaaactcttctgcctcagtgagtagcttccaagcctcttggcttgtcaagctgacttaataatttaatgaccagagtgtgtggcacatagttgacacttgcatattagagcatctgactgccatgttgtgcagcatcatgcttgctccagactggatctgacaagatccctttgccctaagcatggtgctcatccctgctcttccctagggatgtcctatggtgctgacttaccatccaccctgggcagggaagtggcagggtttgacaacagacactttggggtgccaagccctgtcttcaactttgaccttctgtcgaggtcagacactcccttctctccagtgcccaccctctcggtaagtagcatatgcccaccaagggcacgcactactctgtccaccatggtcccacagggttctgttccccaggaagcctcttcatctacactcctggtttcaacactgaaactggattcaggtcagtaattgggggagggatccactctgacagccactgccctcctcccaaatcaaccctcagggttccttcaaatggcgcatcttcatggccaacttcactagccttagatgtacgtggacacacacctttgggtgcctgtgtga

SEQ ID NO: 30504 - DNA, 1190 bp, Mus musculus
tgcaggcccatgacccagtgagggagggccccacctggcatcagactccgtgcttctgatgcctgccagccatgtttgactcctgtccaatcacagccagccttcctcaacagattcagaaggagaggaaagaacacacgcttggtgtccatctgtccacctgttggaaggttctgtctgacaaagtctgatcaacaataaaccacagcaggtgccgtcatggtgtgtgaactctgaggagtgggccatacaagaacagtgcaggtgtgtgagcgtgtgtgtgcccatgcacatgcgtgtgtgtcttcacggttcaactagatgcatttagtgagcacttactacatatgctacatgattcagatgttcagcagtggttagagcaaagcctaactgctaggctttttgatgcaagttggattgggatccttccaggtctcttcttatacatacacacaagagaggaacccttggtttcttctgcccatgaccccaagacaagattctagccctgccctatctgacacattagcggttctctggctacacatggacatggaacactgagattgtggcctgtgctctcagggtgcccttgagtggctacaacatgcaggctgggggaccatagatatgatgaaaataaaaggtacctggaatttttgacacatgtaactttgaaacagggtcattggtatcaacgatcagctttatcacatttagttaaatcacaatgattgtggcttcctttctgagacatgaattcatgatgtgatacatgcagtcctggaactcacaggaatcctcctgcctcagtctctcacttggttttggaatcaccccccccccacacacacacacacccttcctcacagagacctaatggtcccatccatcagtgttgtgaaccatctggtcatttctcagactcaaaggactcatgtgtgtactcgcctcatgcacacctgctcactagaattcaaggcattgtgaaggaccaccagctctcaaagccttctcctggcactaatacccactctctgaataactctgtgtgtgtgtgcgcgtgtgcttgtttgtgtgtcctcccagcccatgttcactcagtttttactcagtgtccctcacaaagaggagtgccagcataccgggtgtaagaagattcatgtccctgtgctgtgtcctttatc

SEQ ID NO: 30505 - DNA, 1099 bp, Mus musculus
acacacacacacactgacatacacaaatatagactccacagatgaacatggatgtttgtccttctgaatctggcttatcttctgtaccaggaggagactctgagctggcctatatttcctacatagatcctgatgtcactcttcagggctaactagtattccactacacatgtggcagctttatatatccatccacccatccatccatccatccatctatcacccttagtggtggactctagttcagcatctggactgcccagcacggctctccctgtcccttgtcattctcctccttgtctttcagggtggctcctcaggcaaaggcaccacactcaagggcaagtcagacgctgacctggtggtgttccttaacaatctcaccagctttgaggatcagttaaaccgacggggagagttcatcaaggaaattaagaaacagctgtacgaggttcagcatgagagacgttttagagtcaagtttgaggtccagagttcatggtggcccaacgcccggtctctgagcttcaagctgagcgccccccatctgcatcaggaggtggagtttgatgtgctgccagcctttgatgtcctgggtaagcctgcctgccagagagcctcagctcatctttctgcatgccttcatcctcccttccagttccacctctgtgtgtgtgcacatgtgtgttgcataggtgttcacatgtatgtgggtgtgatcctgagtcatggttaacacagctctagagtaattcatctctattttcttaaatatttttaatttaaatgcatttcatacatcaaacatattaatactgttgattattttgagaatcaaataatacataaaatttgttcaacttttatattcatatcctttcatgccctaaaatattagtgaatatttaatactatctgtaactgaggatcctatatctaatgttggatactaagttgattcaaaacatgcaaaatattccttgggagttaagcatagtaaaagagcataaattatttaaaatgggtcattaagaaatatattcaaaagcccttatatgataccactgacatagtaagagagtatttgaaaggcattata

SEQ ID NO: 30506 - DNA, 1115 bp, Mus musculus
ctcgggaaatggaaactgaaaatctacttcccatttcagctaggctgggagacccaggaagctccagacttagcatggagcacggactcaggagcatcccagcctggacgctggacaagttcatagaggattacctccttcccgacaccacctttggtgctgatgtcaaatcagccgtcaatgtcgtgtgtgatttcctgaaggagagatgcttccaaggtgctgcccacccagtgagggtctccaaggtggtgaaggtgagccctcctctgcctgagctgactgaatggggtgggaggggactctcagaagccagacagccctgatccctcctcttcaattctgatcacagctggcgatgggttcttcccccaaggacccacgtctgttttggagaaggagcctcagctacagtttgtgttccccagtcccaggctaagaccatttcagagtcagggaaactgaagcccaggatggcagagcattcttggagagtggctggtcagggttgggagccatgggggtggggcagatccaagctttgaactgctgtgtgacttagggtaactacactaccttctccatgtccagtgtgcccagtccacgccccaggatggcagggtcacatggactaagtcaaatgtgacacagaggacagaccaggacatcatatgctgcatgactggattgatggaccctctctggacttggttctgggtctgtcgcatcgcatttcatgacaatggtacctaactcacaggctctgtgaagggtgcagaagcaaagttgttttcttttctttctttttgtttttagttgattgtatttttatattttcagttgtgagtggggctctgtatgcattactgcaggttaggtcaggattgaagagagggcgtcagatcccttagagatgcagttacataggtgactctgagctggcctacttgggtgctgggaactaaactgaggtcatccgcaggaatatcaaccacttttaactactgacccacctctccatctgcagatgtgacaatttgtaatgccctctctcaacagtggctggtgctcaggtgtgttagtgatgattctcagcattttatttagggaggttc

SEQ ID NO: 30507 - DNA, 3218 bp, Mus musculus
acagatctgattttttttttctttctctctctttggggaatcatgggccccttgtaagaagaaaggatttagggagattccggcacagcctccccaaaagccagccgtctgtaacccactgttcatcttgctgctctgcacagggctcccagggccctggctggagactgcttagggtcatcatcatcacagaggctcactgtttagttccagggaccagtaggccaggctgcaggcttgcacctggtgagggccttctggctgtgctacactggacgggagagcaccaagtggggaatcacttttatggcacaagttcactgcaccctcaagacccaggtatcccttatcatctcactgtccacacagtgacattgggaggtctttgtgctccctgcagacacatgtcagggcacttttaaaacagattgacccagccaaggacagttcacttttggtggcttcttttgtttagtgaaacggtcattcagccactgaatgagagggtcaggaggtagacagtcatggctgaaagaaaggccctgggaactggtgtgtgaagtctttcttctgaagatgactccttggctgcaggtgtggacagagaagctgttctgggcaaagtgaccatgttgtctctgtactggagtattagtaagatcccggggtgagcggtatttggtcctcacttgttcctgaccaccccattcccgttcttcagtgcagcacatctgatctgggttgcatgagcccccactgtcctgtaagggtcacttgggaggttggcaacatggtcagaaccctgggtgtctgcttcagggaggtgtttccctgtctcttctcctgggtgtctgagtagccttacgagcagggtggctggacccttatgtgtcccccagggtgaaagccagaagtggccaggtcttcttcaggcgcaggcctggagtgaccatgatgacttcttccgtggctgctgtgagagaatcaggctcagcccaaggtgtgaagtcctatgctctggggccaccagtcagacagccccagcccgtggcatagaagcaagtggctgtagttagcaagagcccaggctgcttatagtatctggtgtaaactgtgtgtcggatgggaaatgtacagcaggtcttctagaagcttccgagccccgcacgtgtgctgcagcgcccacctgaggacctggtgtggtcgggttggtggtgtgtacgtgggagcccatccctgaagcaccgctggggtgggaaggcgatgcttcccgggccttggctgagtatgaagagcggcagtcctggctaggcctcctatcagttccagtcagccgtgtctgccctaaccaaacagcaggatttgctaatgttctgccgtaagtgccttctccagagatgtccctctgcccagtgttgatccttgagagcacgtttcagcgagagcttccagatgtgatgctcgtgaccaagcaaccgcacagtctccacttgattcttcttgcttccattcctgaaaggaagaattggacctgccctgcagctgccctgtctggggcctcctgctccctggcagcctgaggtagttggggagcacaggggccaccattttcttagagcatgtgcatcgatcctggccccttctccaactgaattcgattgcttcagagcacagcatggcctggtgggaatgtggagactgctgtcttctccgagagtttgtaatgagatcagttcagcattcacagccaggatcccagatcctactctctatagcacattgtcacaatgaactgtgttgggttggtggtaatgtctagactctggacttggagggcaaagtttctcaccagcacacagaggttagctgagctgctgatctctcaagctaacatttctacttgcagcttgagatcctggaacagagacctgcccttggccccctgtgttcggtacagcaagtgttttcctttggattccccccagaagccagccagctgtcattccaatagggcaacaggaatccctaggtgtcccagatctgtcagtgttatggaaggtggttgcagggtctcagctgtgtgctgtgcggtgcggtgtctgggaagatgaggtatgggaggtgtggatttgagacagcgagagtggaagttgcacaggtggctcatgagcaggtcagaggcacagggccagcatcgagcaggctgcatgtgacccgagtctcccctcactgctgagcctttaaatcagaagtataggatttttctatttggggagggggtggggtggggcattgtctagcacatggtattggtttctagaaagctatacttgagagtcgtaatgcttgtcacatgggtgtgcagccttcctgaggccccaggttgcctctgccattgcagctggtgcctttctaatggaagactggggttaggaagtggtgctgtcagcagctcagaggtgctcagtgttgtttctaggggttttggtgggagtccaagaatataagccttgtttctgggacaggactggggcagatgcgctcgggaaggaagcacaggcagaagtgtgggctcgttctacattgtcctagtttcagacgcctgtctcagggtctgtgctagcccactgctttgttgaaccctttccctttcttggaaggaagctcccgagtagagctcactgcatccccagtcactagcagctgttgctcttgtggggtgttgagggcacaggaagcagagagcagttcctgttggtgctgtagaacctggctgtgcatccaagtagttttcacaactcctcttcctaaacctcaatcatgggattaataatatacctgtttatttatgacctaattgtgactctgattaataaaagctggtgggaaaggcccatccaagaagccgatggccagactcacacttagctttcccacagcgtatgaagcatccatcaggcagagtattaaagaaatataatattttactgatagacctgtcctttaaaaggaacgtgtttttgggtgtcatcattttggtgtgaatcatgtaagggttggctgtttgctgtttaatacactttagtgtcaagagacgcactcagctgactttttgcccacgcatatcatgtagtctggatttttaagcgacattaacagaatagtttgtgtagagaaacctcaagtttccccagctgtgccatgagtgtatctgcata

SEQ ID NO: 30508 - DNA, 1148 bp, Mus musculus
acctctcctgagtgaaactacactggaaagaactagaaactcgtggaaagcagcccagcctgaagtcccaccctacacttgtgatgggtgatagtgaggccttctcctggctgctgttgcgcatccccttggaggagtaggaagtgcacgtgtggtgcgtgaaaagtgatgcgatgcctactgacaggacaggaggaacgtgagcacagagcatttccaactaccttcccttgcttgtcagtgcttccatggtagagtgttgtcatgccgtgtgggtggggaatggaagactggtttcttaacttgtcttctgcatttctagtttgttttggttttgttgtccttgttaagctgcacttctttctctttctccggttttagaatgctagaagaaaaggaagagccaggcttcctcactggcttaaagatccccgccccatgggctgctgggaagaccgtggaaacagtacaccctgtcagagacaactataagtttaaggagactgttcatatcccaggagctcgctgcctgtacctacgatttgacaccagatgttcgtcacagtacgactatgacaaagtaagcaggagccagttgtcactgctgcctcgacttagctgcttcttattttcctttgcattgctctccatgcctcacccatttctgcctcggggccctctctggagactccctcaggtagtgctttggctggtgttgactgaggaagttgaagagccttacctctgtgtctgactgcagtgctgtaggcgtgcagacattgtcactctaagcacccatgagcttgattgtagacagaggacttcctgtggctctgctgccttctgccttccctcttgacagttgtgtaggtgtgtggtggctgttgatctggaatggtctcactgccctcttctggaggcttcttatgtgtcctgtggaagaaggtggcttttagaagggttcagataggcctgagtctggcttgctttttcttcttcgctattatttcagacacctacatagattttgaggacttaacgacttaatgaccattcagaaagggcagggttttcttctgttgctgttgagttggagtcctgaggaaaggctgaggaaaggacacacagaccagcgctgcgcatgctgt

SEQ ID NO: 30509 - DNA, 1199 bp, Mus musculus
attacactacgtagatttagaggttcagaaaaaaaagacatatctggcaagaatcttttgtcttggcacacttcttttatttcttgggtcacttaattagtagcttagaactgttaagtgttcatgagctcattcttcgaatgctcttacaatatataaagtgctcagttgtttagatcgctggctgctcttccagaggacccacgctcagtttgaggcacccgtatggtggctcacaactgtctgtaactccagttcagcagacatacatacacagtgcacagataaacatggagatataaaacatgaataattatattgaaaatagattattacttggtctgttactgagatgactcatcagcttttggcctgctattctgtgttaacaaacctggtctcgaatgacatcactgtgacaggaaaagcgtcctgggtgatgattgtacatggcagcacccttaacacaaaagcttccctgatacccagaggcttcctgacccttcacaaaggctgtcagtgtggtccatccctctctgctgttcaccaggagtgaagagaagtgcctggtccgaagtggcctcgtgcagctcatggaccgactctgcagcctgagcagccagaccgagtccagctccagtgagaagcagacaaagaagcagaaggtggccaccatggcctgggctgccttccaggtgttggctaaccgctgtgtggagtgggagaaagaggaaggtgagcagccttctacttcctttccactccccatgggtgtgagggtgtgaggggaggtgtttattaaactaatcatctggtggcctttgctggctggcgagttcaggcgactctgccctgtagggatgatgctggctggtcatttccatataagtgttcttatggcgctaacagtctccatgtaaatacttctgagaaataactgtgcctttgtagtttaaagagaatattttcaaattctattttcagtgggcaatccaaagttaaaagttagctaaaggactcaagagttgagtcagtggttaagtgtacctgttgcttttacagaggccccaggttcgattcccagcacccacattttgactcactatatatgtaactccagtccaaggggacctaaaagcctcttctcctctccgtgggcaccaggcacacacatgatacacacacatacgtgcaaggga

SEQ ID NO: 30510 - DNA, 1098 bp, Mus musculus
tgcctttaatcccagcacttgggaggcagaagcaggtaaatttctgagttcgagtgagttccaggacaacccctgtctcagaaaaaacaacaacaaaaaaaaacaaaaacaaaaaaaaaacaaaaaaaccacagatatgtatattatgattcataacaatagcaactttactgttatgaagcatcagtgaaaataatgttgtggttagggtcaccacaccatgaggaactgtattaaaggtgctcagcactagggaggttgagaaccactgccttaaggcagtgatcgctctgaaggagtggggtgagccgtgaagccagggctggaccggccagctggggggatgtgcagtcacagctctcccttgcctcactggtggtccttgacccagcagttgggagaacaaggatatctacgccgcagccatccggagcctgcggctgcgtgagctacagaacatggagtgcgtgacagccgtgcgtgctggcctgggctccatcatccccctgcagttgctcaccaccctcagcccactggagatggaattgcgtacctgtggcctcccatacatcaacctggagttcctgaaggtaggcagcccttcaggtctgtctcagcactccgccctcaccacggctgcctgttctctggtccatctgcagcccctgtcccaccctgcctgggatcaggccaggcctgctcacacctgggcctttcttccccaggcccacaccatgtaccaggtggggctgatggagacagaccagcacatcgagcttttctggggggcactggagatgttcacccaggaggaactgtgcaagttcatcaagttcgcctgcaaccaggagcgcatccccttcacctgcccttgtaaggacgggggccctgacacagcccatgtgccaccgtaccccatgaagattgcccctccagatggcacagcaggtattgcccttcccagctcctgttggaggtggaacccttaggtcctcatggagatcagtgaccaagacccaggtcaggactctgctgtacaaggaggcttggtgagcactgtggccatgcagccccgatgctttgtcaacatttaaaagc

SEQ ID NO: 30511 - DNA, 1852 bp, Mus musculus
cacaaagtatcctgttctctctacagagtgtctccacagatgtgtgagagtcctcagtcctgccctcctgccctgagctggcatctctcccagaggcagcttccgcagggcccctccttccatcttgaagtggttgagccagtgctcaaacgttcaagagacacaagggaactcatgtgttaatcttcctgctttaccgtgtgttcctggccttggttttgtttttgtttttttttttttttttagaagtcccacagaggccccccctgtctcctcccatcaggcagccctatctgccacctgtctcttctgggcccctgggctgagtcatctgcggacacctcaggagcagacacccaggggctactccaggccttagctcacagacaggttgggtacggcctgatggctggagttgacagacagtggagctcaaggggtagcgctgagtgggcctctctacagctgactgcacaggaaagcacatgactcaagcctaccccactctgtgctcagagcctggccctcctcactacagtgctgtaaggagcccagggaagggttacaacccgtgtctaaagactgtctgaggtgctctgcccaatcagggctgcatcagtgacccaggcagagactgcaggggagtcctctgtgccctggctggcctgcccaacaccctttacacccaatgtgtgtgtgtgccagggctgagcttccttgcaggctcgcccactaccccagtgcatttgtgccccaaataagtctttgtccaagaacagcacatgccaactgtcggacactgtcacttgggcctccccagttgtcacagaatggcaacgctgtagctattgtatgatattgtgtacacagaagttctgaggagcgtgaggagggtacgctcctctctccacggcacctggcctgcttggaaggcgcgcaagctttagggctggcacgccagcacccatctcctccctgttacgcttaggaaatgcattgaggaccattacagaaaacaccccacccaaccccacctgaggaagtgatacaccccagctcagtgtgccagccacaccagtcactgggctgtatggaagtggtgcccagagcaagccctgctctcactgaagatggtggccgctgcttgggaccaccccagcggcctcaagaatcctgactccgttcgttctccagaaggcaggagcctctgaattttaaagtgggttttcattccagtaccttcaaatccgtggttcccctcaattctctgcccttgagaggacttgggattctgtcagctacctccccaggagggttctggaagcatctgttggcccattccttgattagatgacagctgtgagtgagatatctgctgctaactcagctgcttctcctagagagcacactgaggtccagacagatcccaaccttggccctgaacaatgtgtgctgtaaagttacttgatgtatatttattataattatttatgattgcattaacagacttcccattcagtctgatgctatttacactatgctgtgtaaaggaagctcactacaggaaaaagtcacaccaataaataaccttcatctgactgactgacctaagagtctgtggtcacctcctctgactgactgacctaagagagtgtggtcacctcctctgactgacggacctaagagagtgtggtcacctcctctgactgatggacctaagagagtgtggtcacctcctctgactgactgacctaagagtctgtggtcacctcctctgactgacggacctaagagagtgtggtcacctcctctgactgatggacctaagagtgtgtggtcacctcctctgact

SEQ ID NO: 30512 - DNA, 1107 bp, Mus musculus
ctcttcaagggccaccctctggagtcacgtgtcatctgactccaccttctttagaggacgcaggttgtctcaatgttctgagctacattgatgatgtacttgctacatctctaccgtttaactcttctaagcaatttttgacttctgctttaaaatctcatcatcattcttaactcatcagtgcttcagagatgtgtcacttgagcctcccaggcctggctgagtatacacacacacacacacacacacacacacacacacacacacccgaagcccagtatgaatcatcaataattaccaaaattcattgctagagagtagttttgtatttcggaagctgattttgtgagatagtagtgtgtattctacaagtgagtttattttcttgcaggagcagggtaatgcgatgttgtctttcctacgattggattttattctaagacatgaaaccaacctaccaccttttatatttttgattttagagaagttgacaagtgaaattcagagtcgggaaaacaaatgcatggccatgtacaagaagctgagcaagtggccggagtgcaacgccctttcccgacgcctccttctgaaaaagtgagtcggtgccattgctcgagagccatgagcctgtgaaggcttctgggcttctatactgatgctggcatgtgtcgtgagaggtctgggcatatttgagatgtttgcagtgtgatttattttgggataaggtttaatggttccttggcagtgatggctgaattgggtcttgaggatgagcaccgtatcatactggcctccaccccagcctctacttagaatttactgggaagtgtttcgttaggtttttgattattttgaaaagcctcagcgtctcacaatctctacattgccttcttgggacggggggacggggggacggggggggtggatgtacacggagggcatgattagaaattcagttgcagtcacggttcctcaggcagctttgttacatcgtgggtttaatcctgtgtgcatcatctgatctgattttagctcagatgactggcagttctatctgacttatttcgattctgtctttcgactgattgaggaagcctggacgccgcc

SEQ ID NO: 30513 - DNA, 1538 bp, Mus musculus
tggctttctcacatctgcttgcccttacttgctggctccctggggctataacactgccaccccaaagccctgctgggacagatgcaagcccagccctctgagcatgtgaggcaggtgcacatgctctcttgctaagccacacttctggcccttgagttttcttttgtgtctttgagatacggtctgtgtagctagctctggctgtcttggaactctatagactggcctggtttagaactcagggagatctatcagcctagcctcttcctctggtgttggcagtccttgactttttttgctcagtctcctgctgcttcctgcaggaggggctgcagcgtgacatacgcggccactgttcgcctgttgctgctgctgtccataatagcatactgccgtttcttaagatcagtctgacttgtgcttcctcccagctccttagaaggggaagtacactgctctgcagaagatgctgtgaagtttatagaggacaggataacagaggcatcacaaagctctcgacatgtccgaggcccacacctagctaagctggagctcatcaggcgcttgcggagccaaggctgtaatgacgaatacaagctgggtaagaaaccttaggtggtggtgagccctgagaagctgagaccacccccaaatcttgagtgcaggcctcattatcaatatgcttaatatgcttattacctgaacatagctgccaaagatggttgatttacaacatccatctgctgaccgtggtcggcttggctttttatattcctgtctgtttagtccattgggtccttgctgacctagtttaacgagaaatttccagtctcaccatttttaaatttctcagacagtgtgaatgttctctgcttttgcttttttaagaatggatctcactcagtagcggaagcagccttggaactccgcctttctggtgtgagctccctcacgtagctttactttttaggaggtgggagggtggcctggaggtgccctgtaactgaggagaactttaatctgcctctccctcccgaatgccggaattgcaggtgtgcccaccacacctaacccgtacttttttcttttattgtaatttttattttattttttgagatggtgcgctgtggttaaagttgtatgccactgttcctggcttcagacaaagttaaattaaataaaacagatccttttcgatcaagtgtgtcactctagacattgcctcagtctgtgggtaattgagtgccctcctctttaaggtgaccctgaagagttaatgttccagtatttcaagaagttcggggataagccatgctgcttcacagacctgaaggtgttcgttgacctcttgcctgccgcccagtgcacacaagtacgtggctggcccttggttctgctcgtgcctgaagtgtctgcttgcatgctagttcgggggtggggggtggggggcagtacagtaactgagctgcggccatagtgcttggcattgtcacatcctgtcagtcaggtctaaaaccagcagagagccacactcacga

SEQ ID NO: 30514 - DNA, 2431 bp, Mus musculus
gtatgaggcaaaagcaggtgtaggagacccaggagcaggacccttccctcagtggcaggttccttgtgccatcccacagaaccgggatggacccacagaggctcaagggagatgtggctgagtacgtgccaccacagggcaccacacatgaccacaggtgctcagttttggcttcacagccccagcagccaagacatccccagccccgctcctgggagagctcagcctcagggcagtgaggaagtccaagttctgcccactttgaggaagaaatctgagcacagcccaccgtgagcttcgtaaactgctgagactgagccccgctggtcttctgggaaaggtggaaaagctgttggaagaggttgtacgtggtgtgtgcaggcgagtctgatatttgtgtcgtcattaagtcaccttgtgcagctgattgatgagtcacacacagatacacatatgcataaatatgcttggaaacagatttactactctagtgcttttaaggggggctttgggatggaaggattaaatatgggtttaacctaggtttttaagttttaggttgaaaaaggtatgttttataatgggcctgatgttggtgtcctgttgacacttaagaactgcatcagggtgtattcatgttgttcacctaaggttggtggcctgttccctaagcctccagcttaagaggctggtctgcgagaagatgaaaactgctcttgattatgtcatgccgagctccgacagcgctttccgtgactgttttgtgtctgaatctcctctctcacttctgttcttgttccctgtcactttattcctgagagtaactgtaaggtgaaaagatgacttggtgaggactggtctttcccatggactgctccagcagcacaccattgcattctttatcgtaactgtctgggattcacaaatcagcatagtggttaactaatttacttgtaaggaaatgtgtgcaaactactttcttacttgtaggatgtgctggagcctacatcatggttgcatcagagtatcacgtgctccatccccaaaaaaagggcctttttgaataagatgggttgaagaccctgattttgacttgccttgaacaccaccttgtggtactgttctgtagttgtggcctgtttcccatgggactgggtgggcgtttgcttgcactgccctggctcctggaataatgtttcttgggatattcaaattgtgctgtgtgttcacggtcacagatgctctaaatcaagctctgtcagctgaccatggtccgtatggactgcatgggctggctatggccctcaggcatagctccttcctctaatggtctatcctgtcagtctcctgctctaacatgtagggcctccactggtcttgttgacaaataatgtcatggtggggttacacttcctctgttacttgctgattttcttactaaatgtagcatttcaatcagatctaattcttacattttgagataactgtaaaaagagtgaaattatgaaatggccaatatcttttatcagtctattcttttggaagctgtcatgcactatacattgtgtacagttaaaagtatatatatatatatattcttactgagtgaacgcctcctctccccacgcctgtatgtcactagcatctaaggagaatgctcaaggcccagtgctgctgctgctgtggtttatatgggttttgttctgttttgtttttgtgtggtaaattgatatttaaaaacaacaaaaaccacgactactgtttacagactgaaaaaaaacaatcactgctttttatactactgagatcctaagtcaagactttgcaaagcaggaatcgggttcaagttacttctttgctgtggacggatagtcctctgtagtatctccacatgatggagagtgcacaaacctaggtgtgctgccatcaattttgtatattttcataattttaattgttcgaaattgcattatattttgcaatcaccacattcaatctgtatatgtctttcatttcaactttttcaatacaaaaagggattcaatttatctgcaggtttgttgagactcttcctacttttttatgtgatttattggtatgggaaatcttctcttgagaactaagtgcaggcagaaaatcagctttaactggacaggctaatttacataaatgtttttattttaagttggcacttttcctggttcgtttttgttcagtcttaaaagttagagcttccaaaacagtgtatctcatctcagttctgtactagccctaaatatgggctagcacgggacactcctatagatccagctttaattaattacacattatttggggttgtgcacagcacattatgttctgggggggtaagaggagggatacagctttattcattcaactctagcttctctgtatcccacaaacattgcat

SEQ ID NO: 30515 - DNA, 1338 bp, Mus musculus
gctgaacatggagctgagtgagaagtacaagctggacaaggagagctacccagtcttctacctattccgggatggggacttggagaaccctgtgctgtacaatggggcagttaaggttggagccatccagcgctggctaaaggggcagggggtctacctgggcatgcctgggtgcctgcctgcatacgatgccctggcaggcgagttcatcaaggcctccagcatagaggcccgacaggccatcttgaaacagggacaggatggcctcctaagtgtgaaggaaacagagaagaagtgggctagccaatacctgaagatcatggggaagatcctggaccaaggtgaggactttccagcctctgagatggcccggatcggtaagctgatagagaacaagatgagtgacagcaagaaagaagagctacagaagagcttaaacatcctgacggccttccggaagaaggaggctgagaaggaggagctgtgaccaagcacaagggttccccagggtttgccaggggcaggaaaggagagatctacctgccagctgtgggacccctgtgggtggaaggggcagtggagcaatgcaggcctgagccagaagtctgtgccccgagtgtgcctggacattgatgctgctgagatcatacttaggacaccccctgagccagtctgtggagagcctgtgtgctcagtcaagatggctggtgagatgccccccgcaggagttggtgctatagaggtagggactactgccaggtccttgatgagtgtaattctgatcaaataaaaagtctgttttggttagatggttttctttttagataatacttttagcctgtgatcagagttcagttttgagtgtaagctgctgttgtgcactctattctgcaagacccttccttgtacgaggcacagccttacgtttccatggccgcccatgtatggtgagatacagggtgcagtctatactctgaccttatgtgaacaagcaacagggcatcatgtttcctatctctatagagcaagcaaattcttttactaatgtactgtctttagaatttatgcaccgaaagccaatgcggtgacatctctgttttgagcactagtggggtaggcacaaggattaggagtcaaggtcagcttcagtgatctgaggaccagcctgtgctacataagactgtgtcaaaagcaaagtcacatgagcattcattccagttccaacatgtaaaatataagttactctcccacaaaaatcacttgctataaactcccagcttttgatccgccagatggggactggaactcctcagcagatacaagtgtgctcgacatagt

SEQ ID NO: 30516 - DNA, 1175 bp, Mus musculus
cctcctgcgacatgggaggccacattgcctaagtgtccccgcgggcctgaccagagctgcaaccgggggtctacaagggcaggacagcgactaccagtgacaaacagctgactaaccgagggaggcggcgggtctcttgagaccgcaggaccgcccagcgcagggaaggaagggacgccgccacgtcttcttccgaggcgagagagagggcaacgaggggaagggtcgaagcggcgcctcccgcgagaacgcagcggaacacggcctagccgagtgtcgccaagtgcgcgtgcgcgtgcgcgtgcgcgtgcgcggcaggcccgtcccgtcccgcgaccccgcccgctcgccgctccgcctacgacgcatgcgcagccgctccctctctctgccccgcccctccgcggcccctcccttccaccccggaggcggccggagcatctcgctctggcggtggccgcttgcgttcatgcgcgccgccggcaggacggccctccccgtgacgtgaccgcccactcggagcgctccgcctgtagcttgcctgtctctcccgctcccaccatccggcgtgatggccgccgccgccggggtgtctggcgctgcttctctctccccactgctgtccgtgctcctgggcctgctgctcctctttgctccgcacggcggcagcggcctacacacgaagggtgcccttcccttggacacagtcactttctacaaggtaatgagggcggcgggcgacggggatcgtgcgcaggtgcagatagacgcccgtggcagcgcgagcccacggggacgttgggcccggaggggtggcagcagcaggcagtccttggggaccatccctacacgccccaccatcctataggcccagtgtcgacagagcaggggcgcaccctgaccacccggcatccttgcaaccccggtactcgctacatctgtttttttacaaaaagctaccaaagcgcagtcaaagggaaccaagtgtcccttttcctttatcaactggggaaaaagacaatgataggaaagatccaatccacgagtcacaagtggaagaccggagggcggggcgaggtctacgctcctaggctctcggatggggtggagatggccgagagaactgggttagcatgccagtctgctcctcggaggatggattgtagcgttcttgg

SEQ ID NO: 30517 - DNA, 1161 bp, Mus musculus
cacagcatgctttatatttcccttcgtctgagatcacctttttattgccaagtaacaaatgtggacactagctgccaaagtcaggctcagtgacacaccacacccagcacttacttgggaagcttaggttggcaagtcatgtgagttcaagatgaacatgggtaacagcaaaaatagcaaagtgcagcaggcaaggcagccttggactgatagcagtctctgcatgcaggcggtggttgcggggatccagcaggcgcacgccgagcagctggcaaacatgaggatccaggacctcaaggtcagcctcaaacccctgcactctgtcaacaaccccattctcaggaagaggaagctgctggggtgagtgagcgcatttctttgatcgtcttcatggcaggcgtggctgatggtgagtgctgagagctcagtggggagtctgccttcatctgctttctgcagaaagtgtggacatttaaattacccaggagttggacacattctgtagttatttttctgaataccctggtgtcgtgatttggagctgggttctgaggtcttaccttgctcttgtctttcccacatttgtaaagcaccaagccaaaggacggtatttatatacacgaccatgagaatggaactgaggactcaaatgttgccttggaaaagcttcgagatgtcattgcccagtgtatcctcccccaggctggtaaaggtcatgccacttactaatgttctgcgtgtgtgtgtgtgtgtgtgtgtgtgtgtgtgtgtgtgtgcgcgacaagaggattagattagcttgtgatttgttttttaagtacattatataaatgagtccacattactaggaaatacagacactgtgagcagatacatggtaagttctgtatctttggtctcctttgatgctctaggttaggcttaactgccagtgccagattgtggcccgtgattttctgtcgtcttagtctcacaatgaagtcacaaagtagagagtgaagaatggagatgtggacagggtccaaggatagcgtagaggccatcagcaccatttccagaacctttacagtgacacactgtgtctcttgttctgtgagtgtaaaaagaacactgcacaagctcatgactagccctgctgtggcttctgtcccggccttatgc

SEQ ID NO: 30518 - DNA, 1099 bp, Mus musculus
aggtggctcacagtcacagtagtctataactctagctctaagggatctgacaccttcttctgcctccatagcgcacacgtaattaaaatcaaataggtaagacaaggggaaacacaccattaagctaagctcttaggaagcagaggcctggaactctgtgaattcaaggccagcttggtctacaaggagagttacaagccagcctggactacatagtgatacttgtctcaaaaaaacaaaacagaatccatcatatctttgcaaagcctatcaatttgtatccagtgctcagagataattgctacttattcaaaccaccatcaccacataagatggtaagttgggttttatatatttaataatttttgttaaaaaattggacacttggtaacatagtaactctggactttcactcttcccggtatttgtagctgcctagaattaaagggaagtttattttccttgtgcatgctaatgtcagatcagggctgttgttcttggcctctgagtaagttagcttctgatgtgggctgagactatccagtgatttgaactcctgaggcttttaccccctgccattcaacccctgtggttctggagtcctttctgaatggagttgacttgcaaagtcacttctggccttagattttccctggcttctcattctctccagtccatttatcagttttgtggagagctcactttggccttattctatggctctgtgtagcagtttgccctctaaacccatatagtctgcattcctggccaggactcttctctgagctcagcacagctgccccttctctcacacatttacctggtctcacctgccctgccccccttttcttccctgccccctagagcaccagcattgttacctttcacacaagctctgggagtttaaagctccctgtattctaaaacgaccccaaacaaccccactaactgttttgggggggttggatggaggatggaagctggaggagccaggctgtgtgctggcttttgacctcacttctagtgggtataaaaaacagacagttctcagtttgtttatactgtttgacaattgacactgtctcactgtgtagctctg

SEQ ID NO: 30519 - DNA, 1199 bp, Mus musculus
tgtccgacgctgacagtaagttccgggggctgcagcgaggcctcggctccagtgggattggtttggggcctgtgtggtctgacattgacctctctccatagtagctacctgttctgtcattagggccagcctgagccctgtactgcccacgcacaggcccctaggccaccatacctcagcacgtcctctctacgagacacttcctttcctctgtctctttctttaaaaaaatatatatatatatttatttatttactttatgtacactgtggctcacactgtagctgtacagatggttgtgagccaccatgtggttgctgggatttaaactcaggaacttcggaagagcagtcagtgctattaaccgctaagccatctctccagcccctccactgtctttcacagttgacagtcttcagcaagggaagagggttctgtttcattctggccaggaattggcctccagcaggcactaacccctgatcttgtgaacagggtttgtgggtgagcattactggtagttaacatctcctcgtgtcacctctctctctctctctctctctctcccatcccacagtggactgggctgtggagcaggcccactttgccctgttcttcaaccagggccagtgctgctgcgcaggctcccggaccttcgtgcaggagaatgtgtatgacgaattcgtggaacgcagcgtggctcgggccaagtctcgggtggtggggaaccccttcgacagccggacggagcaggggcctcaggtaagtcaggcagctgctgctgagcctggagtccaaagccagtgtgccaaagcagaaaggaccggatggcttagccttggtggggctgggttcaagtgtctcctctgctgggtactgcctgtgtatcctgttaggggagaccccagctcctgtcttgagtcctattatttcttattcttcatagaccatggaaggagaatggccaccaaacctgctaaggagccactcccttaatagcctatgttttttgtgttttcattttgcgaatctctgaatttaaagaaacaccggggtatgacgtgccttgcctagtggtaaaggatgtggtgtctctctttggcattatgcttctgaccatggccattttctctttgactcttgctccttaaaagacctgcgtctcccttccagctacctctggctgtaggttctcagcc

SEQ ID NO: 30520 - DNA, 1173 bp, Mus musculus
tacagcattagcctacacaggagcctgttcccatagcaacattacccatttcctatggtgggtggccatgatgcatgtggcttgctgtgctatccggcctcttatgcaggggtcctagacccaggcaagagctgccctaccaggtagtggagccaggtattctgtcccgggttctttgatgcccttgttgctggcggcctgaggatgcccaggtctagctttggtccagttgcccgcagcactgtatccagcatccaccccgacagtcagtttggctttctgttgtcctcctagctcctcatcctgtttttctttcctctgccttctctgcaggctgcagctttagagatggccatgattaaaatggtcgtcccttccatggccaatcaagtaattgaccgcgctattcaggtgagcagccctggactggcctcccgctgtgcctgctaccttcttttccaaactgagctagtcccctccccctcaagctccccagctcccaccccagccctcccggaacagtatgtcccttgttcagtgcattctacttgcaagtagtgagacagctgttgtcagctgttttgagcatgcattcactcttagaactccggctttcttctgttttccaccccatgtcttccaggcctttggagcagcgggcctcagcagtgactaccccctggctcagttctttggctgggcccaaaccctgcgcttaggtgatgaccagctgaaggtggctaagatggaactgaagaatcagtccaggctgcaggagccagcagcacgcagagtgtagatgctgagtttggcatggcctgcaatgtgtggtcctcacatcctatccagcagctcagtctgcgacagtcactgtgacctgagcctcctggggtctcttcaagaagatgtttctggagagactgagctcaagctttaggcgtggaggaaggggatttgggtgcctgggtagctgttcttgagttcttcagatttgacctgtgacccccgccccttcctctgggctgtaggaatctgggcaccttggactctgatgtctccagaggccattaggctcctcctttgtgcttctaggaaagcagggggcgtggtgcacagcaaatgcccctgggatgaagccactgtgtgaccactgatgtgcccacgtcacagaat

SEQ ID NO: 30521 - DNA, 1174 bp, Mus musculus
gtgcattcttcttgcattagggggcctcaggcctaagggaggcctgttcctgttcacacccagtgccgactctgtggggtacacatcctgacacttggtcccacacagaactttctcagtagtggaagcaaaccatggagaatgggcttggtgagcagggcatccaaaggatgacaatatggccctatgtgaagtctgggacacatagtgacacagaggacctcagtcaagacagcagtcgccagctgttttgagcagcctgccacttttagaactcagactttcttgtttttccactcttgtgtctccaggcctttggagcagcgggcctcagcagtgactaccccctggctcagttctttggctgggcccgagccctgcgcttcgctgatggccctgatgaagtacaccagctgacagtggctaagatggaactgaagaatcagtccaggatgcaggaaccagcagtgcccagagtgtagatgctgagtttggcatggtctgctatgtgtggtcctcacatcctatccagcaactcagtctgggacagttactgtgacctgaacctcctagggtcttttcaagaagatattctctggggtctcttcagagacctgcctgcctctgctttccacgtgctggaattaaatacatttgcaactatatcctgttctgagctagattttttcttttctttttcttttttttcttttttttttttttttttttttttggttttttcgagactgggtttctctgtgtagccctggcaggcagccctggaactcactttgtagaccaggctggcctcaaactcagaaatcctcctgcctctgcctcccgagtgctggaattaaaggcatgcgccaccatgcccggcctgagccagattttctaaacaggcttatagtcatgagtatgtgtgtgcctaccaaggccagaagaaggtgttagatcctctggagctggggttctaagtgcctgtgaatagcccaatgtgggtcctcgaacctaccctgggtcttctgcaagagcagccagtgcacttaactgctgagctgctcttctctccagacacacacatgaaacgctgcccctcagagcagttgaccttcatctcctgaatctcctgcctccacctcccaagtgttagcattacagatgtgacagcatg

SEQ ID NO: 30522 - DNA, 1488 bp, Mus musculus
gcctcccagaggcccagctgccttcaggagaggagcccactgcccactgcagaaggtctttcctgccatccctccctcccttctcctgcagagtagaagagagagctgcttgcatgtcatagagaaagggctaggttgtaaaccaagcacaggcttgtcttcagcagcctggcttggggcaaatggagtatacccagtttagggaagacagtgacagctctctttatttctgatgactccatccgaaatgtgcctgtcaataagaaaagccttcctggctccttctcagctcaggtaactgagagtgtcctccatccagcaggattcaaggggcaagcctagctagccatcgagaggcctctgacaagctgactgacttgtgttgctggggtcagtggatactgactgtttacaggcagggccgcatgttcaggtcgcagctagagggagcttgggcagatttcagttactcttttatgatcgtttcaaaggctgcttctccagaaactggcttcagcagagcctcttccaaacagccatacaatatttaatatgaccaacagaggggctgtgtgcctctctttagagccaggaacatcaggtaacttgtaacagattaattgaacagacttgaggggacaccatgttgggatttagcttctaaaagagcctgggcagttgacagctgtgtgtagtaaggacagtttaattttttgctttatcatcagccaaaggtttaaaatgtcacactttagggacttttttttttttttttccgactgactggacctcgtcctttgaccggaatgtctgacatgtcaccacgttgcctgtgttgctgatcaccgtccagttcagtggaatgtgctgtagcatttcctaaaaccccacctgtgactgcagagtgagagtgctcagactcggacctctgtagccggctcttcctcagggcaggccagcactgcagatcctccggcccgagccacacaggcggctggggctggggctggggctggggcagagccgcctcttccagagcttctattttatctagaacgcgttacacactgttacagtcttaccggctcagccctgcttgtcttgcacatctgaccttgcagaagctggggtgggtggtagcatgctaattaagagaatcagaagtagtttccagagctggctccccttttcatcacaacccacccagcagccctgctgcccagaggagagtagcagtgcttcaccacacaggttgggggaaatgcctgggaaggctgtggccagtggaagcagccgacgggcagaggtttccaaactacttgaaggtcttttaaaaatgttccaggaaaacaaaaatcaagatgtgtaaataaaatgttattttaaaaggtcaaagagttacgtttgagtctgaaattacccaggacggaagctgttagtatattcttcagaacagagatggagccttcaccacactcccttggccaa

SEQ ID NO: 30523 - DNA, 1193 bp, Mus musculus
ccctgcagctgttgtaatcccctcttcccagcgtatcaatcctgctgactccatccttgggcagtgctagttcaaaggagtcttaaatgccttccaaccctggaaagagggattactacataatagtcatttccaggacaaagttgggtaatttttttttttttgtaggtttgttgattagtttgtttttctggtattgatggtatttctgaggattgaacccagggcctcatgtatggtgattgaggtagaggaaggaagggagggagggagggagggagggagggagggagggagggagggagggagggagggagggagggagggagggagggagggagggagaagagagcatttaagttgcccagggtagccttacactctgcatgtgttccaagaagcctggagctcatgctgcagtcaccgagtgtagtgttctttcagtttgtgctgtgttgtgaatggtgtctgttctctcagcacagaggtgtcctgtcatctctcattgtgataactgttacagggaaactgaggccgaaggatcaggagttcaagtcagaagcacaaggtcatcttgagctacatgacaccctttacccacctcccctggacccccatctttgcgcaccacatgccttctgtagctacttcctacctgtgttgctgccatagataaccatggtgtagtcccaaattcagtcagggcactgtgatgtggtgaaacttctttcatccatctttgctttccagcaaagctttacttcattggacttgtggattgtcctgaagtagaatttgcatgagctggaatggaagtacagacatgctcctcagtgcctttttaaaggctgtctccaaagataagagtgtgttctatgctagggcattgtcaacgtacgggatttcatacttgtttccctagctggtattttacagttaacctagaggagattctctcccttcacagaggtgaaagtgaggataaacttgttctgtgtataaatggagaacctcgtgcatttccacaggttctgcgtcttaagctgctgtgacaggaatatcaactgtttgtgtcttctaaggctcaacttagaaagtcctgggaaagtagccatccctgcctatgtgattgctatatcctcatactgctgtgctgctactgaacaaatggaggtgctagacaaagacacgaa

SEQ ID NO: 30524 - DNA, 3185 bp, Mus musculus
acacatgcagacacctctacacgggagcacacacgcgagccttagagcagggtggcaggcaggccttcagtggctctcactctgagggactgcactaggattgttggtttgcgggttagcagtgtcccagctgttgcctggttgcctctgtctgctgtgattcctgagcttggaccttgggctgtggtgcaggagaactcaggctctagagtagcccagaccgtctggggcttcccttccttccttcctcccttccttcccccagtgtaaaggctgagcttgaaagctgtggttgctgagagagccagggcagcctgggccatggagaggccctctctgtagctgttaacgtaaggtggctggatcagatgtctgctacttttgatcacagttccctgaggtgggtctcacttagaagagttcctgaatgattctatttcctgtctcagtgtgccagtgaggctctggcgaggtgtgagctaacgctgctgtgtagttgggtctcttgcagaaggctagcttgttcctgtccttcccccagagctgagagtgtagaatatgctcctgttggctggcggcagtggggagggtagccagtgtggtcagtgtgctttggtggagtgagacttaagagaatcagggtcctctaagtgtccagcagaggctgtgaatttatgtgtaagatgagctcatcccaaacctcactcatgtatttgcataagagagtaagaggctaacagggaaagcagagagccatgggcctgtttgaaggtgtgaaccagtgcttcgctggggtgatggtctagagcaatgcacaggatgggaggcaggaagccgcctcttcctgctctgcccactccctgcagagccaaggttgagattaccgaccaggtagctaacatcacctttctaacttaaatttgctgccatttggtactgggttgacccagcttcagatcactctgtcatctcagtggagccagtgactcagcctttgctccgtcagttaagcttttaaagtgaggggcctaagtgctgcttcaccctacttttggggaacccactacaactggggaagggcggaagaggagagactcaggaagctgctgagggtgctggggaggcagtccccttacaggcccttgtcagttgctttctgactggaaaagggcattgatatatctttggccatgcaccatagcaagctaagaaagtgcccttcccaccccaatagcggctgcttttggtgaagaccttgccttgtgtggtatctgagcagacgagttggggactaggaggcaacttccccatcttagccctgctggatctacctcaaggttacccaagaagtccatcttgctccttcaagagccctagtccaatgaaaggaatagctgacttgttgtttaagaaggagatgttgcctgtatgcgtaaaagagctctctgtttcaggctcatgtacagtcaggaatggttccttctcatccaactgcccatgcgccaatgatgctaatgacgacacagccacccggcggtccccaggccgccctcgctcaaagtgcactacagcccattccagtctcgacaacagcgcatttcccttatatgacgcacccttcaggtgaggcgtgtgtgtgcaggggccgccggggcaccccgagcgttctgctcgcagaggtagaatggcaggcaggaccagtgcttcaggctgcaaacctgactagcgaggcccatccaagtgtgcacaggagggatcgtgacggtcaggaaacatcaggctctgtgtgtgttctgctggttcagggttggcttgagaagcagcagcctcattctgggtagccgatgcatgccgaggactcagttggccttcctggttatgtatgtatgataggctggacagggcagcgtggtccgtcctgagtcctttataggctgatgtggggggtttatgcccatggccaagtttgatcgtagcttggaggagagcactggtgaacacgtgctgtgtgcggactggtctgagtgtagtgttagccccagcctgtgccctgacacaggacgcccatgatgtctcgtactgatggctgctgtgacgacacctgtcttccctgtgacttggaaagcagtggtgcttggctagtgtagtgggagggggtgtgaaggcctgctccacaagcagcaagtccaggacttgtatctgaagtggtttacgtctgactggtttgtttctcctcacccccttccctccccaaccctaccttggctgcagttgggggagaggggcagcattaaccctccagtcttactcactagcacaggagtagttgacagtcgtgtgctgcggacactaggctggcgggcagtggtgcctgtgttgtttaaatagccacttttcttttttacagtacaagcccaccaccaacagcagttgtaaggctgccctggaggaaccgaaaggccaaatcccctcctcccttctcctgcttctgccaaccggaagcacagaaaactagaacttcattgattttgttttttaaaagatacactgatttaacatctgataggaatgctaacagctcacttgcagtggaggatgttttggaccgagtagaggcatgtagggacttgtggctgttccataattccatgtgctgttgcagggtcctgcaagtacccagctctgcttgctgaaactggaagttatttattttttaatggcccttgagagtcatgaacacatcagctagcaacagaagtaacaagagtgattcttgctgctattaccgctttaaaaaaaaaaaatcaagacttggaacgcccttttactaaacttgacagaagttcagtaaattcttaccgccaaactgacggattattatttataaatcaagtttgatgaggcgatcactgtctacagtggttcaacttttaagttaagggaaaacttttactttgtagataatataaaataaaaactaaaaaaaaaaattaaaaaataaaaaaagttttaaaaactgatacccagttagtgtgtgtttatgttgactcctgctgctgtgggaggtagaccccagggaagacaggctggttgtgctgctccaatctctgaggaggtgctgaccaaatgacttttcttcttcacctttagttctggctcaaggtatctagaaaaagtcaagactg

SEQ ID NO: 30525 - DNA, 2195 bp, Mus musculus
tgaatggaaccattttcctcccctccagagaactataggctgctgtcagccttccccagctcagatgtgccccgcttccaacacacacaaggctgtcacaggcttcctgtcagccagagctagcccccggctttctcccactgtttacagatgtagttcttgtgcacaggtgccactagctggtaccctaggcctagtccccaacccaaaaggaggtggggctacaggcccagagctggcagtggaaactgacagagctgatgacagacttcttaccaggcagggtcatcgggaagcacaaaacactaacagtccctggattctcacatggtgtccttccctgtagcttcagatctgtggcaagtcctcatgggttccatgccacaggcgatggatgcttcatgatcctgctcctactcttagctttacgacagaagctctgccagagggacaagcttaaagatcaaaattgatttaaacattttacctcagagtacttttttttgttttgttttaaaggattcaggtttccatttaatattaaagcttattcactgcactgccctactaggacccccctgtcactctgaagtcgggggcagcgaagcacccctggttcgcttaccctgagccaagctagcatgctagtgtccttgtctgctccctcaggacagttgcctgctgtggggtagccactgtcctccctaatgtagagaatgaagtgtgtcaccctttcagggaaaaccaggcagcttgcagagaggagggtggcaagggacattccactccagtgccttatgcattaacaaaaaggactctgggttacagcagctttacagaggctgggaggtacaggtgggcgaagggcttgaggtcatctttataccctctacccctgaggttggctcctctgtgagccaaaaaaggagctggcactgtgttgtgtagaagctctgtcccaggtggcagcagggtccccatccatacaatctctccatccagacagtgccaatactgtgattgttcctaagggacaggatcacagggagtgggtagtgcttgcagcagcagtggctttagagaaccacaacttaactcctagacatgttccagggcaaacattccgctgccctgctgaagccagcagtactgacctcctcctctggttactctgtactctgcaggggtgtgggctttggggagggaagcagctgcacctcctcttgaacactccccattgtgttcacggaccgaggtgggtccaacacaggtgcagattcgtgttccatctttaaggtaacttgctttccttcactgcatagaaggtatgaaccaaagatataagcaatatccaaccagtggtccagattcgcctctaatctacataggatgggtgcacagctgtatcccttcacctggcagaagctaaactaacttcaaacttggggcacttgtttcccctgggccttcagaagagagacttgcccgacgctgtaaaccagcacctccacccccactgtggacagcttcctttcaagaagtgtctaagataacagaaaacataaggcaaaaaggtattctcgtgactgtgggacagagtgacaacactaagccaacacctttcctttctgctagagtaggtccagttggctgaaggggacgggcaggtttgcgaagctccaggccagatgccctcccagtgtgttggcaccaggcaccgttcccaccccagcagtctttactggccaccactggctcgacagtccccgtacccttgcttccttctcctgagtactcaactacaaactaaaagtcaccagcaccaaagagttgggtcaactaacctgccttgactttaccagcaatccatatggctttatctgtataaatcttctgcctctgatcatttctggatggtgtaggagaaaggaatagggatcattacaatctcgggccacacaacactatctttacctaagtttcttaaagtaaggcttcaccccttccctgagggctcagtctcttgtttaatattaccttggtgcaaacaccaagtgataaactgtcacccactgcctcctagtgaagacacatctaatggccagtgtgtggccggaataagcagcattgtcaccacagaaacagggaatctcatcttctatcattacagcagaaggtatttggcaaatcttcgt

SEQ ID NO: 30526 - DNA, 1184 bp, Mus musculus
ttctgcttcgtctcacatactagattttataggccactcagcctgacttatttttttcctatgcagtgtgtgcatacatacagaccaaagcacacgtgaggaggttagagggtagttgggcgtctttgtgtggattctggggatcaatctcaggtcaggcttgcaaagcagattttctactgactaaatcatctcaccagcttccctttctccctcttttaattatttttttaaattttctgtatgtattttgtttgtgtgcatgtgcgcgcacatgcatgcaccgtacgcatgtcttacccttatgaatgtctgaaaagggcattgggtccttgggtattggagttgcagatagttgttagctgtcacatatgggtgctggaaatggagcccagtttatctccaagaacatcaagcactcttagcggctgaaccatcacttcactcccccagcacccccttttcttgttggtttttttttttttttttttgtctttgtttttcgagacagggtttctctgtatactctgtatacagagtttctctggaactcactttgtagaccaggctggtctcgaactcagaaatccgccttccgagtgtgggattaaaggcgtgcaccaccacgcccggcttcagcaccccctttttaaatgagacagtttcattatgtagcccaggctggtctctgtctcaactatccagagtactgggattaaaaactttttaccacccctgtcttctcatagtttcttaatagtttttaagttctgagactgggtagcattgtgttagcaaaggctggcctggattttcagagatctatctgcctctgtctcctgagtgctggcattcaaagctgaactaccatgtttggcctggtttattcttttctgttgaacttaacagagtaagccactgtttaaacacgttgagaatgactggctgggtggtatatgtatttgtttctaacttatggacttgcttgacggaagccacaggatctgctcaggatgcgtatagttctcaatcagaggacgctggcattggggttgtgatgatttcaaaacctttaaatctagagatagctcagccggttttggctcttgcccttaatcctgaagtcctgatttgatcctctggattgacatgagattcaggagagaaccagactttgagggttg

SEQ ID NO: 30527 - DNA, 1148 bp, Mus musculus
ttgcccacgtagaggagatcagtgttgtcatgcatgacagcagcagtgccccagcgaggtgggagggtagtgggagacagtggggagagccatgcacttttgctgttggggggaaaaaggagttgttgaggagtttctttagcttgcatgttttgtagaaaataattcagtttgcaagaaagtgttcagtgtggcgagtactaagtttgtttggtttgagatctttttctacatgtttttaaaataccttgaaggtagtctttcaccaaggaatgacttaaatttgttttttatttgttgaaaaaaaaggtctcatcactatgtagatcaggctggccttggactcagatctgcctacctggggctagatgtatgcttggccttggcagtggctgcttaggtaaggttgtggtcagacagcaagggctgctgactcgccccttctgtgcagctcttagctccaaatcacattgtaattcatctagggctttgtcctgtccttttattacttattttttaattgagatggagtttcctgtgcctcggctggccaggagggtctgtgtagatgaggaccttgaactcccgatcctcttggtacacagcccagttttaatgctggggcagaaccccagggcttggtgcattacgagccttgagggtgctaccaaccctgtggaggcttttctatccctcagtacatctccttggcttccttctgtcatgctgtcttgcttgttgctagactgtggaaagttactgctgcctagagaggtgctagggctgcagactaccagcagcagcagtagactaccagcagcagcagtaacctgattaagctcagggtttatgaactttggggtttgttgtcagtgagatttttagtgaaatttctctgtgtgctgatgttagtgatgttccaggtaagtgcagtatctacagaacagcctttgttgttagctgccagccgacctaaataaatgtcccttttctaggtacacacaagagcctcattgggaacagcaggctgacccagcaatagtaagagccagagaataaggttagatggacaggtcctgggtgttaattgtgggaaagtcatattgcttgatactgagagctaaagtagatcttgccaatttggcagc

SEQ ID NO: 30528 - DNA, 1128 bp, Mus musculus
gagcagtagggcgactgtctgcgttctcacaggtaaaagaagatacaacattaagctgtggaaaacgttcacagactgttttaactgcttgccgatagcagccatcgtggacgagaagatattctgctgtcatggaggtatgtgacatggaggtgttgccttcacctaggcagctctaccccttctgaaaagtcagctgggcacggtgaccctggccaggccactgtggtgccaaggcttcttcacagtgatacagcccggtcatttggatcaagtgtgaggaagcaggggttataggttgggaagagaacgagactttaaatacaggacgagccctagtgccctcttctcagccatgtgtctgcctgaaccctgactgtgctcttcccaaaagctctgctccgttcctcagctgttctgtgtgtgaggtaataaaggcattgcaaagatgtggaggtttgggggtgattggaaatgaagcagctatccaaaaacccacataatgtattaaggcgtagtctctatgccctcttggatcgggtacttagagaacaagactgttagatctgttgagtgacatttggtggtccatggaccacaggctcggaaggagctgcctcacagctgagcattgtcgtgcctgtgcccggccattgcatctggtgatggtggcaccctctgtgttcccttcctgccttctattgggagaagtgtggattcagtggttgggtgttgcggggctctgtgttgaggtgactgtctctgaccagcacaccaacagcagtacagtacatttcgtgcattgtttcccccaaaaccaagttaaaaacccacaggtttcaccgcagcatggcagtgccagcctcctcagcaggaggggctggccacatgctcaggccaatgctgtctgcacttcagggggtttcctttctcgttgaataggtttatcaccagatcttcaatctatggagcagattcggcgaattatgagaccaactgatgtaccagatcaaggtcttctttgtgatcttttgtggtctgaccccgataaagatgtcttaggctggggtgaaaatgacagaggagtgtccttcacatttggtgcagaagtggttgcaaaatttctcc

SEQ ID NO: 30529 - DNA, 1157 bp, Mus musculus
gtcagcttgcccaggtagacctgtctgtcgggccctcctccatttgattactgctggcacttgctggttatagcagcaagccaagcacttcattctcaagagagcattttgttttgaacctctgttccctttgtggacagctctgatgatggtgttaagctgtacaccctggcaggttatcctgtctgaggagaaagtgtacaattgatctttttttaatttagtataagtcatgaataatgtaaatgcctgttttctttaggatataaagagagccttagagtgcgtgagtctctacatgtaattgtcataaatgcattctgttgatacaaaccactgtgaacaattttttttccagtttgtttgaaagggactgctttccctcattgtcttgtcatgtacaaactagtgtctgcagctgtggcagcaggagtgacctgcctgccgccagccctgcccagactatctgaagcacactccttcccactgcacatttaataatgattaaagccattcttttcaatgtctgtgattccttcctaaagccaaagtttctgttggactgtatggcacgccctggggatgaggtggccagggcatcgaggctgcgtgcacaggccgcctccctccgtggggcctcagaagcaggttattttaactagcaatagtggtatagtgctgagtaagctattaatgatggaagttaatgacactttgtacagttcccatatagtctattcactgagtgatctttttacagttggatcaggcctgaacccgtccattcagaaagcttcaaattatagaaacaacactgtcctatacgagtgaccgataatgctttctttggctacattctttattctgcggtgacattgaggcttataaatcaaaaggaactaacttgccgtccaccggtttatacagaactcacagtatctatgacttttttaaactacgacctgttaaatgaatctgtttgcacagatgcccgtgtacaatgccatgtgctgagaatggtttcagacttattaaatgcaagcttgttaacttgttcgtgtctttctgtcagcagcggccccacgaatcctttcctgtctttccatatgcagtccttttgggaggggcctgggtcttggctaagtagcctggcagga

SEQ ID NO: 30530 - DNA, 1099 bp, Mus musculus
tctgtgaggctattgtcctattgctgtgaacaaggaagctaagcacagagctggaccgtagagcatcaaagtggccgagcccctggggttcagatcatgctgctgagtgtgtgacactgctaagctgtttcgggattgggtgcaggactgtgctcatgccagcaaagtccctgtcccagtggcacaggcagagccatgtagctcactccgggtctctggctcctaaccaggggttttatctttcagtctgacttgcatctcttacggtcttctcacctggcttccttcagggagacctgctagatgacaatatgtatgttttcagggctgtatgactctcagaaagattaatttacccagtgcctccccagagtaagagtgagcaggttgcctgtgtcatcttcttacggttcttgttaacaatctcagaggactggctgctggcaggccatacttgggcatgctccatttgtttctcggtgagctgtgtgttcttctggtggaggcaggtgcaatttttgctgtagtcagccaggccggagactgtgggccttgtacagcagtggttgcacgcggtgcttgctggctgctggcaaggtggggcttgtcctcctgtgcaccagtctctggaaagtgaacaggttgatctttgagccacttgcaaaaattggtcctatggcctcattgtcatcagtctccagaaagtgcttcatggctacagcagagggcagcctggttttggaggctgggtatgtccctgtctgaaacatcagtaaatttagtgaagtgtcagctgcaggaaccttgttccaacgactaagtagtaagacccagtaacctgctgtggggcctggcactcgtgtctacaggaggaggaacatggtgcaccttgcttaccgtgctcccacaccccttgtcctcagcacctcggggttctcgggtgtggggcaaacctggatggagctgagtgctgacgggcagcagcccgggggagacagtgagcggatgcccatgttgtttgtaggtagcagcacagcctgcatcgtggtgctggacagaagtagccaccgcttgcacacagcgaacctgggtgactcgg

SEQ ID NO: 30531 - DNA, 2570 bp, Mus musculus
attcctgatcctccccacactggagcttgcagctttgactctccagtctggagcatcagcagagcaaacccacagagctcttgtcttcagtgcttacgtgagccacatctctgattgacttttccttcaagcacactgataagtgtcatctgtgttttaggtggaaagccagatgacatcaccgtcctcctctcaatagtggctgagtacacggactgatgggccacactggtgactcctgcctttcccctgtctcccgacttctccctgccacatgtgctgatcctgctggcaggaccacatttctttgccactgatctcagtggccaatgatggatgctctggcccatgtttgagacccatcaagatccttgttgagaaccactgctgtcacccgctagcccgtacccactggtgacccactgagagaaaaagcgaggtgacctctcccttctcctggaggttttcaaagtcttttacttttcaaaagcagttgaagttttgaaaagaagtaatgttggtaaagtgaactcaaaatgtcagtgtgttaaagggatgttaacattcaacaagtagtaaatagcggcacctcggccaaaaaacacgcggatcatcccaggagaagccctgtgtcccccaggcgcaggctctgcgaggactgctggggctttgtgttttctgtttgccaggagcccacagtcctgctctatcctgtgctgggtcatgacatcccaaccccagcagcggacggttttggtcacaaattggaagaaaatttttgttctatggatgcagatattttgtgctttttaaaagatgcttaattgtgcccctgtgactgcagctgtggcagtctgttgatttgtccaggtcacaggctagaggcctggcccacaggagagggacaggggaaggagactccttaccaaaatctagtaatggaaataccacgcaaaatttcagaactcctcaaagcctgggaatcaaatgctgtagctgaagtcgtccgtgctgcctgtaagatgccacgggccttccagggctagagtgtgcagctgcagcttgggatggggttggctgtggacagcctgctccttccctcaggagcctcccacccttagagcatgccccacctgcgctgtgtcctcaaggtgatggtgtggtggctgcagctcccagagcccacaggaaagctagtggtgacctgacattcacagtgaccgcagctgagtgtggggccctgagtccagcttaatgtttacagttccaatagccatttgcagtaggtaacgttccttctcagatttccccattacctgcgagcgcaaacttatttttaaggtttatgtacaattgactgctgtaaagatatatatatatttttgggtccgttcttttccttcattaacttggtggtagaaaagccgtatatacttagaaacccttaagttaaagccgtgtttctgtgcaagtcagatgacgctggtgtgaagatggtgtgagcagccgtgcagcccttcctctgcaggagacactggctccctggttactgcattgaacttgtgtttgaggttacctcaacttgtttttaaaaggttttgtctgtctgtgcgtttgtatatttgagtagctgtctctgttttatttaaactgtttaccatgtaccatgtacatgtcagtgctctcagtgcatcatgcttgtaacaggcattcattcatgagaatgagttactcatttgtaagctcttcagtaatttatctactattcctaaattggcataatgttagattcctattttgaatcacctttaattacatgtcagaatgccttaactcccctaacctgacaacactgagttagttctctggtatggagggagactggataaggagatgtcgcactctgttgatcctggggcgtgaggggcacgtggtgggtatttattttgcacaaactctttgcagtgtctgtgtttaaaacagtaaggttgcatccagatggggtgtgtgactctaggactgaggacttcagctcttctgtgtggtttgtaattagttcttggtcagaggtgttgtagccttacaatctggatatattttgcattaattttccaatgccgacatttaattcctgctaagagcagagctggtcaagtcactggcttttttctgctctcatttagcccatcaaccaatgtttgtaaaagtagattggtgtgttttatacaacttacttttagtcaactcacttttctgagcagtgattgtaagaaacagacaggcagtatggctgttctagtaaactgaaaaccacgaggcagacgtcaggattcagtgacagttcctcaggcctggcgtgtggactggtgacatcgtatattccatttgcttctccctgtcctttttgttacacacttaattttataactgtcgagaggtcaggcagagcaaacgctgctcacactcactgaggccaggggctccatcacacacccctcgccaggtctgatctggaacctggtgtgcgcgtgagttgtattttaaatcaagcaatgtaagcactcatattt

SEQ ID NO: 30532 - DNA, 1153 bp, Mus musculus
ctgcaaatactattctgtgtaaatattttccagtttcctggtttaatcaagaaaaactttctggaataaccaacaattacatgtacacgcacacatttacaaagttataaactataaatttataaactaaaaggagaaataatatatttgccagactcggggctggagagatgcctcagtggcagtttaagagcactgcctgctttcccaggatggggttcaattcccagcatccacatggcagctatactgtctataactccagccccataagttccaggacctttacacagacagacatgcaggcaaagcaccaatgcacataaaataaagataatttaaaattcagttttatgttgcaagtaaaattttaattgttctagctagaaacaagcatacattacacattaacacagaaatatatcagacgaaggcggctattataaatttctcaacaaccaaaataacataccgttactactagtactatcccatacatggtccactcttccctgtgcactcagcatgtggatgttagctgatggctgagcttggtgtggaggactagaccgtcaggctggcgtgagctgggccttgttcttggatggacatggactgcatgcacttattcagcagatcctcctcctgtgtttcttcactcgggcatgactgagaatcattagaaggaactacagggaagataagtgtttataatgcattctggaaataaaattctttaattttattactattattttatgtgtatgggtgttttgcctgcatgtatgactatgtactgtgttggtgtgcctggtgcccacagatggcagaagagggcatcagatctcttggaactagagtggtagatgctgggaattgaatacagagcagccagtgctcttaactgctgagccatctcttcagcctcattcacatattttttgagacggtgttgatatgtcataccagtctggcctcaactcccagagctccacctgcctgtgcaccgtgagtgtggggatgaaaggtgtgcaccaccacacatgcttgggaataaaatgctcaacactacttcagaatagcccagcttagaaagcttttagcaggcaaaatcccctactgttttcaacttagttaccctccacttcccagt

SEQ ID NO: 30533 - DNA, 1239 bp, Mus musculus
catcctttgagaaagaagaccactgagctgttttctatagtctcaggggtctctgcaaccaccaaggccagctttatgccagtctgtgcaagataaagcagttcagttcaacacagcacaactcaggacatggtgttggttcacactccagagtcttaccttgagtcgtttatttcaggcatatgtaagcacagcaccatttgggaaaatgtttcctggtgataaataactcagccccatgtacacagcaaagcttaagatgtgactacatcaacactctgcaaagtagaagatagtataggtactataggttaactgaggaaaaaaggctcgagggtcgttccttgacaagggtctggaggagcatttggtgttgcctggcagcacagatgatgcagtggcactagacttaatcagaggttaaatatatacatctctccttagaagagacgagcccatgtatctgacattcctggctttcccagtgtttgtctgtgaacacaggtctgcatgcctcctacgctagacagtcaatagcccccattctgtctttcagcatccagagctcaccttgggccagaagcgttacctgtgcagcgttgctaagatctgtaactccagctacctgaggaccttgatgaagaggcagtacatgcacatatttcatcacgggtcacagaagacaggcaggtgtacctccatctggtttcttgtcaggtcttaggagaagtgagagcatcttctaagaggtgatttgtgttccaggtgtgctcactcaccacagaggccatatgagctctcgctactcacagaaacagcattccccctgtactgcatggagacaccatctggagagagaggactctctgagcattgcagctggagcacctgaaatgatcatacattccctttggcgacccctgagacacaaagaagggtctgtctggttgttgagtttaagaaggaaaaaaaaaaaatgtacccagttctgtgtgaaaggatcctcttgagagtaaaattccatttcctagtacatccacgccactgaactcagatgagggaggctacttcctcttcactgcagtgagtgggatatgacactcaagggtgcttgagtttccgtgacagggtatatatagcccaggtatttctcaaacgcagggtagtctcttgccacatgctagcagtacagggatgccaccacaccaagtattccacttttttcccacagtataactg

SEQ ID NO: 30534 - DNA, 1105 bp, Mus musculus
tagtgagaccctgtcttgacaaaacaaaacaagaaggagaacattaataaaatgaagtaaaattagtagaagacagtggtaaagtgtaatttttttattttttggtttttcgagacagggttcctctgtgtagcactggctgtcctggaacgcactctgtagaccaggttggcctcgaactcagaaatccacctgcctctgcctcccaagtgctgggattaaaggcgtgtaccaccatgcccggctctgatatatatatatattttttttttatgatggggtttgaggtactgcctacctctgttttccgtgtctagtttagtgtgagcggagggctacgcttatccaccagctgacagaacgtctcagaatccaccagttggttctcttgagtcaggcgctggctccccgtaagccgacgccagcccttttctcccacagttggtcctcgccttgtctcctggtgacacttgttttctctcttccctgggctggcccctgcaggcataccactcttctctcatggacccggacaccaagctcatcggtaacatggccctgttgcccctccgaagccagttcaaaggacccgcccctcgcgagagtaagtctctgggttcttttgttgggttccaagcagacctgctgacttgagagcagggaagagcttagcttgagtcactcttccttggcttcctgtcacacttgaccaggagcagcctgttgcgctccacaggaaactggttcaaactcctccaggatgtttacgtgagctgaaaggaaatgtgggctgtggggcgtggccccgttggtagagacatggcttggcctgcatgagacccccaagttccattgagagccaggggatgtggtacacacctgaaatcctagcacttaggaggaggcggccggaagatctggagttcaaagtcgttctcagctagctccaggccaacctgggctactgaaactctgtctcaaaaaaaaaaaaaaaaaaggaattgtgttgaattctggccacagtccccacaggcactgtcagttatttcagactaactgaatggcaggtccccagccttcttctgacagcattgtgtgggcatag

SEQ ID NO: 30535 - DNA, 1196 bp, Mus musculus
taacaacaacccgtgagttggagaggcggggaggtggcggtcccgggagccggggttggcggtggcggggggacggtgtggtcccgcggagggctgcgcgggatccggcctcggtggcctcggagttctggctccttccagaacgacgaagtcccctgagtcccggggacccagtccaccgagtgtcagccgtgggggtgccaccccagcggagggaggggaccccactttccgagactgagagcatcggtggcgggcgcggtggcgcctttttttaatttaaaaggaaccctggcagtctaatgtaaggcccgacattgccgccggggagtgactggttttgtgtggttgtgtttacaaacaggggtctcctgtagcccaggctagcctgccccaggctgtgtgtgtgtgtgtgtgtagtcaaggaagaccttgaccttcttaccctcctgcctacgcctcccagaagctggggggggggggttaactggtgttttacacccccaccatgctctcagtgtgcgtgtggaccttggggatcgaaccagggatttcaggcgtgctaggcaaaacactaccgatggagtgacagttctatctagccgggtttactgcgtctcaaaggaagcccgggacagttgtaggcttgaattgcctgtaagggccttgcttaaaaatttccccatcattgctcactcttcgacgtggctccgcaagtcaacctagtcattccttttctctaatttctcctcctgcccgagcgctctcagagcaagcattggcaccggtggcttcactttagaaccgctgcctgagccgggcagtggtggcgcatgcctttagtcccagcacttgggaggcagaggcaggcggatttctgagttcgaggccagcctggtgtacagagtgagttccaggacagccagggctacacagagaaaccttgtctcaaaacaaaacaaaacaaaaaaaaatgctaaggaaatgtgtttattacagggaggtccagtaggtcgaccaagatcacaccctggagaacatagaggagcgagtggatctgtctatgattggagatagtttgtatttcagtccaccactgtctagtgcttccaaagaacattacagtagccttctactccgtgcagacatttgcatttggcgtggctgaggctagtctagtgagacagccaaagggc

SEQ ID NO: 30536 - DNA, 1128 bp, Mus musculus
cttgagaccggttctcccacagcttagatctttagagcctgtctttataaacagccctctggcggcttctctaagctcccagctttcccttctttgggtaaatccctagcagcctgttgccgagcgtggagtgatccttcttggaactttccagcgggctggccagatgtctgctctataagaatatggtagcccaggctggaccagtcccctttgtgtcctattccagttgtaccatctccctatgcatactcattcttttttttttttttttaattttattatttatcacatgtaagtacattgtagctgtcttcagacactccagaagaaggcggtcaggtctctttacagatggttgtgagccaccatgtggttgctgggaattgaactcaggaccttcagaagagcagtcagtgctcttaaccactgagccatctcttcagctcccacatacttgaggtatgtagggttacaaatgaggttggggttacaaatgaggaccctgtttgaagtggcagccattcctcaccggtgctgggagctgctggtgactgttttctcaggcctgaggtcgcaggatgatacttccttgtgcccagctctgccttggaagaactcattcccccaaggtggtgctaaagtcagaccaccttgcctaaaggctgaggggtggctcctggatatgtttctgtggaggagggcatgtgaggctccttcgtcctttctggtctctgccagggccttccgttctccatgcctatggccctctgttctgagtgtcagcacatccctggggacctaggctagagcatgtggctggtcctttgggctcgagcctcccatggacatgattgacctctatctgtaggccaggcctgctttggggaaggctcggatctccttgctgctgcctttagccagactcaaggcctgcagaagctgagttttacaacaactcataccaacccctcagcacaaagggctgcctctgtgagctcgcacacagcagggttttgcctcaggacttgagtgggaaccagagagagcaagaatggccattacccctcgtgccattagagggcagattggacctgctacctccaagctcaaagccacggaggaccc

SEQ ID NO: 30537 - DNA, 1181 bp, Mus musculus
agcattgagggtcagtacagacccagcacccgtgacacagcactaggccctcaacagtgggtgtgctagtcaaggcctcaccatggagcctctcacatccttgtctttttaaatacaaggaggaaactttgcctttcttggcaagacctgaaactgagggggaggggggaatgacggaagaagacaacaatcctagccagaagacaggtgattacactccagagtcaagtaaacagatttcttgtaactgagcagagaagtaccctctaatggcattgtagggatggatatgcgctctcaccactctggaggaggttgtctatccccagactccacttttttaagtctcatgccgtggtctaaatctcaaaagctgttcctgcctcccaagtgctggaattaaaggcctgcatcatgcctagcttcagatctatttttaagggcccaacccaacaacacgctgcagttcccaaatatgtccagacaagaagaatccattttagttttttaggtagagcctcatggcccaggctgtggcccaaacagcatatagctgaacctgcccttcaactgttcctgctgcctccacctcctcccaagtgggcccgccatgcctggcttcccacttcactattacaaagactggaaataatggctgctaccaataaacaagatccagagcaggttctcagtcgttctgatgctgggacgcttttatcatagttgctcgtgtggtgaccccaaccatgaaattaatgttactgttgttcataaactgattttcctagtgtaacaaatatctgatatgcagggcagtcttaaaagactcctgtcaaagagtcattcaacacccctcatgggtcaaagtctacaggttgggaacacactgattagaatatccaaaccatggaaaaaatcgaagtgagtgatgcgcattctgcccaaaatagctccgtacagaaggctggttccacctttctggagctgtacaagatccaccagcctctacctcctgagtgctggaattaacagcatacatcaccactgcctggccaaaatctcttttaaaggaaacaaaaataaatcaattccttgtctcaaaggttgtaagcaaaggactccaagatacaggcagcagattacaaaggctgggggtttaggaggtgagaaccatcaagtca

SEQ ID NO: 30538 - DNA, 1162 bp, Mus musculus
gaggtcagaggacaagtttgtggatggagctggttctcccatgggttctaggagtcaagcccaggactccagactcatcttaagggaaaggcctttacctgctgagccatcttggccctggatgctgtcaaaaagctgtcctattacaggagctgacaggactcatttgaagcttatctctgccaagtaaggccagaatagcagtttaagggagaattcaggatcctttcaggtctacttctgtctcccgtcacagtcactttgcatctgaacagtcacacaactcccgaggctagtcacgtgtagacttctagtctgagctgaaaaggcctgatttctgctgaaggtcactgtgacacgcattctgcttccctccaggttaactacaaaaccagtctcccagggaggcctcagtgcccgtccccaccctcctgtaaatcagccacagctctgctgagggtttatcgtagaatagatttatttacctgaaatcatgtctgtgcaatacctgttaccagcacagaaactgacctctatttacagactacagtcaaacatgcgctgtgagaagctgtgagcaactgaactgacgctgagcactttattacgataaatgcacacaatacttgtattgcaccaacatctgtctactgcttctgacttcattaaataagttacaataatacagtgtggaacagctggctgcacacctaaacaactgaagttaggactggaggcctatgttgtaaccattcagcagctgtagtgttttaaatgaatttataaataagcaaactgtacagggcccattagaaagcatgtttcaatgtcactgtagagcaatctggccacttacaactgaaggcatgcattacaattatcatacagttagagaggctatgacattttgcagagaaatgtggagacttggctgatggcttctgttcttggataaggtttcagaacctccttctcgcagcaaagaaaccaacttctctggagaggctctctgatttgttatgctaaattgtacatttgttattattttgattgaacagctaaaaccccactggtaatacacatttcctccacatcacacagtgagttggggactgtttctatttttcttttccccaacctcagtcatgcagagggctggtag

SEQ ID NO: 30539 - DNA, 1639 bp, Mus musculus
ctgaggatgcccccctgggagaatatctggctcgtgggctccatctgcttgtccatgtcacttcacttcttgatcctctacgtggaacctttgccggtgagtcatgatggaccccgggcggggtctggggtagttcctttcaggcagggccagaagcttgacccagccttgtttgtctcagctcattttccagatcacaccgctgaatctgacccagtggctgatggtgctgaaaatctccttgcctgtgatcctcatggatgagacgctcaagtttgtggcccgaaactacctggaacaacccggtaaagagtgtgtgcagcctgccaccaaatcttcctgctccctgtcggcatgcaccgatggcatttcctggccgtttgtgctgctcattatgcccctggtggtctgggtctacagcacagacactaactttagcgatatgttctggtcttgactgacagcgctacatacagaagatgtttaacttaatcaattaattttttattgtttaaagcaactgtctatttctgctgaattttcacatgaacatattggctggtgaaggaggtttcatatctagattttgttttgctttttctgactccagtgggacaagattttcctttttttatacacataattaaagtgtccattgacgtgtacagagaactaacactattttatgcagatatttttttgtagatgaaaaagcatgtacagtgttctgtttaatactcatacttgtacaaagatagttgagccagcagacattgtcagcaaattaattggcagcagacttaggaaatgaatgtgtgtggtttttaaaagaaaaaaaactaaatagcatgtattgtgtcttttgcatgattctctggatttaatttggtatcacagtctaatttttattcataagccaatttttctgcactgagcagagtcctgctacctcagtcagtatttttggtttgccacttcctgcaccctcagcctctgtcacccccagcccaccccagcctgctcggcttcttctgtaggtctgatggttctgtttacatccgtcttcacgagaggtttgcctgtctcgcttgtgcagaaaacattgctccagatccaatcgactgggtttctgtcccttcgcctagtttttaaggttatttatttaaatgtctaatgtattttattgtaacagacattgttttgccaacattgcctattcaatggcacttcacaatctagtttaaaagaaaaataaaacattttaaatggacagagaaaaataactgtcttgttcttaatggccttgaattacgtataatcagttcaaatttctgagcttctcagcttagagccttagtttcctgttctgagaagagtcctgttctgccgcatagtaggattttatttataatgtataggcacgatctgtcatgtgatatacattactcaagtttctgctggcccgttgtatgtaggttggtgtaagggcaagtgtgtgtttatgtgtgtgtatgttttgtaaaatctgtaaatagcacatgaccaaatgaacatattgtatagaaatatttttatttgactatggcactaaccaccaccaccatgactgatgaacgtttgcgcatgttcaaggtcagtc

SEQ ID NO: 30540 - DNA, 1135 bp, Mus musculus
caaagcctaatggaaaccaagttactaatggatatttaaaaaaaattaagtattggtaaaaggctgagagatttcatttccacttcttccttagaccagaattttatatcagggatggaagctactaaacagaagggacagctttgctgtggcactgacactgccagcctctgagtgttcattctttaacactttgttctgttcctgtggtcaatctctcaaattccataatacaggccagacatagaaacacatggaagcagaatgctgctacactacaggtttcaggactgtagctaggaaaaccttgtttgaaccaagggcaagcagaaagagaaaatgacaaactcacagttgtagcaagagtgagctgccaggacactcgggtaggggtaagctgtttgagctcatgtggctctctcactttagaccaacctgactttcgtcggctgtgtgggcatgctggatcctcccaggattgaagtagcctcttctgtgaagctgtgccggcaagcaggcatccgggtcatcatgatcactggagacaacaaaggcaccgctgtggccatctgtcgccgcattggcatctttgggcaggatgaggatgtgacatcaaaggcttttacagggcgagagtttgatgaattaagcccttcagcccagagagatgcctgcttaaatgcccgctgttttgctcgagttgaaccttcccacaagtctaagattgttgagttccttcagtcctttgatgagatcacagctatggtaagattttagctagacttacacgacacaacagtgtacgtgtgcctataatcctggcacttagactgaggcaagcctgtgctacctagtgagatcttgtgcctaaaaacaaaaccaaatgaaaaaggcatgttcttaacctgtaagcaatacttagtgtgattatgtgtctgaggtgtgtaaatgaccttaaattatgtggccccaccacaaatggctctcaggttttgagtgttggtataaggcaatataagcagatgtccagtctccttagttctacctttctgtgatatgactctttaagcttgcatggctgtttttgtattttcttggtaaagtatttgacacagctactgctctgtcccgtttc

SEQ ID NO: 30541 - DNA, 1210 bp, Mus musculus
actgatgcaccctttaaaggaccagagttccagctacaagtctttctgagagtgagggtgaggactgtactttttttttttttttaagatttatttatgtatgtgagtacactgtcactctcttcagacaacaccagaaaagggcaacggatcctcccattacagatggttgtgagccaccacgtggtcgctgggatttgaactcagaacctttggaagagcagccagtgctcttaaccgctgagccatgtctccagccccaggactgtacttttaaacaccaattgccatgtatcctcgagcacagtctggagctgaaagggttgttttggtggtgtagtgaagagtgataaccaagagaaccttttacaagttaaatagtggggttattgatttgctttctttttcaaaggtcattagaataataaacagtgacctgaaatggtcaaggactttaaatgaataaacatcttaatatctgggtttggtgtctcatggttacaccgtcttttctcacatgaaccggggaggacaagctattctgctgacattgacttcttttgacaatgcaggcaaagggtgtgtatgagaaagttggagaagctaccgagactgctctcacgtgcctggtggagaagatgaatgtatttgatactgagctgaaggggctttctaaaatagagcgtgcaaacgcctgcaactcggtcagtattgagctcagcacagtatgctgctcttcttcattacactgttggtttaactgttgttcttcggcattagtttcctgatggtcacagtcaggtacgatggtctctcatgcctatatttctagagctcacgatgcaaataccaggagaattgccacaaattgtagaacagaactcattagacagacgaccaaatcacattttaaaaaacggaccaaaacaaaacaaaaatagcccagcaatcattagtaccttgacataggtgtatcataagggctctaccaagggagctatccctagtcctgagaatacccagccctcctgcctgcatctcagtgtctttctctgtgcctctccagtagcataaagaaaataattgtatgcttttaacattagagctgtcccttgccctaattgtcatttgacaccccatttgtttaactcgggtgaaaaaaactgttgagtgttcattctcacttttttctttttgtttggttagttgg

SEQ ID NO: 30542 - DNA, 1058 bp, Mus musculus
gggctttgctggttagtaggagcacttaaccacagcagcaagtagatcgctctagtgagaatgattgctgccctatccagttaaggtggaatagggcgagaatactcacgtttcacatctgacttcactgacctcagtagtggtactggagtagaaattctgaaacagcctacaaggctgattatccacgcttagctgtgacaaaagtggagtgagaaacaaagataaaagaatccatagtgctgagagctgcatagaatttgaaattacaaaagtgagagtactgccgagcccagagcagatctgtaggcaggttccctgtgtggagagccgtcctgtcccagggagtgagcaggtgctctgtggagtccaggcagtatccacatcaggatttaaggtgggatgtgctggtgccctcatgacccattttcctcttctccctagggtacaaacattgctgctgggaaagctatgggagtggtggtggcaactggagttaatactgagatcggcaagatccgggatgaaatggtggcaacagaacaggagagaacacccctacagcagaagctagacgagtttggggagcagctttccaaagttatctccctcatttgcattgcagtctggatcatcaacattgggcatttcaatgacccagttcatggtggctcctggatcaggggtgccatctactactttaagattgccgtggccctggctgttgccgcaatccctgagggtctgcctgctgtcatcaccacctgcttagctcttggaactcgtaggatggcaaagaaaaatgctatcgttcgaagtctgccttctgtggagacccttggttgtacttctgttatctgctcagataagacaggcacacttaccacaaaccagatgtccgtgtgcagggtgagtaaggggcgttctctgtgattcttgcctgcagtctgtgggtggtcatcccacgtggtggaggagagaaaatgctcctcaaagttatcctctgacctctgcatgtagttccgacacacacaaatacgtggtaaaaattaataatc

SEQ ID NO: 30543 - DNA, 1230 bp, Mus musculus
gcataaaagcatgtgccgccactctcggcttcatatactgccggagatcgaccccagactttgcatgctaagtaagcactctgtcagctgaactccattcccagcccaactgaatgctatactaaacataggtcagacaaatcactgtatctttggctcttccaggaatatttcaggatgttatttcaacattactttttatttttaaaattacactttttgtagtcctgacattctctccattactctgacattaatctccattactaagttttcctagtttgcctgttttggatcggttgagccctttgttctttctcccatgttggaaatggctatgaactttcttgcttgtttatgactgggtctcactgtgttgctcatcccgcaaactggatgtgtagcacacggtggccgtgaacttggaacttgacttgcctcagttcctgtgtgttgggattataggtatatgttaccacaactgctcacattggcagtgataaaacagtgggaatggggtgctgtgggattggctatgccgcagatagcgttaaccatcctgtctcataacctgcataggtgaatctgtctccgtcatcaagcatactgaccctgtccctgacccccgagctgttaatcaagacaaaaagaacatgctcttttctgtgagtacttttatcagatgttgggggtaaggtttcctgggggttgaaccaagggcctcagctaagagtgtacttttatttggagatagtccctgtcttaattagggtttctattgctgtgaagagacaccatcaccatggcaacttttataaaggaaaatgttttataaaggaaaattaagggtagcttacagttcagaggtttagtctgttattatcatggcaggaagcctggtggtatgcaggcagacaaggtgctggagaggtagctggaaaaagttctacatccagatcttgaggaagtgggaagagagagtgagcctcaagaccccacctgttcccaataatgccactccttatgagtatatgggggcgttttcattcaaaccaccaacatcccaaagttctgagtcttttctttttactggccactctcagtggccagacgtaaaaaaataatcagttattccaaagataattattctttggtatgtgtgtcagctgtcagaaaaaaagaaaaaagaaagaaacatagctgggggagtgatttgctgaaggcactggc

SEQ ID NO: 30544 - DNA, 1171 bp, Mus musculus
tctgcctcctatactgggttaaatttaaggtatatatcaccttgtttagcctagctttttactgtataaataagtttgtaaatgtttgtattaaaataccaattgttgggctgagagatatctcagtggttaagagcacttgctgctcttctagaggtcctgagttcaattcccagcacccatgtgggtgacttacaaccatctgtaatggaatctggtgacctctcctggtatctgtaaagacagagcattcatatataaaataaacaaataagtaaataaataatttttttttcttcgagacagggtttctctgtgtagccctggctgtcctggaactcactctgtaaaccaggctggtctcaaactcagaaatccacctgcctttgcctcccaagtgctgggattaaaggtgtgcaccaccacgccaggcttaacatgctttttaatattaagattataagttttaatttctaatctagaaatatttaaaccagacagcctagtttaccatacttggcttttctttatacaggaaagaaatgctgaaaatgcaatagaagctcttaaggaatatgagcctgaaatgggcaaagtgtatcgacaggacagaaagagtgtgcaacgaattaaagctaaagacatagttcctggtgatatagtggaaattgctggtgagttgaattcagttttatttattcctagattatgtatttaacgttcttttctcaaggttcagattatatttaactctttgtgtttagatatttttttgtttttcaattttatgcctatgagttatttgcctgctcaggactgtctgtgcactgtgcatatgcctggtgcctgcagaatccaaaagagggcattggattccttggaactggagtaaactgacatgtgagctctgggatttgaactttggtctacctgaagatcagtcagtgctcttatccactgagccatttctctagccctggttttgttttgttttgtttgtttgttttttttaatgtatattttaaaatacacttttcatatatttaaaaataaaattttgtgacaagtgggtctctattttgtcccttctacctttccactctgtattcctccttcccttcctcccccttccgccttttaattttattgcttgttggtttttcctgtgctt

SEQ ID NO: 30545 - DNA, 1786 bp, Mus musculus
ttcagacccatgacttaaactgcaggagacgactgcccagtcagccccgaggaccactctgctgccttaagtcattacatttgggagaggcgggttgacacacagcaataggcaactgggacaagagatgctgactgaggcccagagtcactacaaaatataacagctacttctattgggcagctgtaagaggtcacattaaccagactagaagccatcaaatctaactgcatacaagttacagtctgacctgccttgctctcctatggttccaagtcactagtactgtgagaaaccggttggtaaaagctgcctctgtgcctttcacgtcccggactgtacagccaacgagtccgaggcaatctgaatgctcctttagaaagtagcccaagctgccaggagaggcgtcaacccatgctcagaaggccgactctaggccagcctgagctacatcgcaagaccatgtctttattttttatttttgtaagatttattttatgtttgagtgttttgcctgcaccatgtgtgtgcctggtgccggtggaggtcagaagagagtgttggaccccctggaactggaactgcaggtggttgggagccaccatggtggtgttgggaagtgaacttgagtcctccgcaatagcaacaagggctcttaactactgagccatctctccaccttcaaaaccacgtcttaaaatcataatcttgataattagaaaagggagggggaagagaggctagggagatggttctgtgggttagagcattttctcctcaggcatgaggactgacctacgttgggatcacagcagccacataaagtctggatgtggcctgtcatgatggcttggcaggggtaggggtgggaaaagagcttgctttgcaatctgatgaccttgaaagccatggtgaaactggagagccatgttctctgacttccacatgaaccacacacatactcacacacatacacacatataaatcatacatgcacactagtaataaataaaatagatgtaatttttaagggaagccagtgcccttcatcgttttctacaaccactaaacatggaagagggaacctttacaggtttggggtcctgcctcgggatttcattttgatagttttctttttcttctagacctagatacttgtttctcacagaacagagactttgagtattatgagatgctttgactgactctaagacttgccattttaaggcgtctaagatcaagaagccatgctctcaatggagagggtggggctgaggcaccttcatgaaggaggcccatgctcacaagcctgacggatgacctcagacggatgacctcagacggatgacctcagacggatgacctcagacggatgacctcagacggatgacctcagttccatcctcgggacccacacagtggagagagcactgacttccacatgcaagcatggcatgtgtccacccccagtctcccagtaaatgaatttaagtccattttcactgtatttttgtttgtttttggttttgttattctttttcaagactggaaagccctggctgtcctggaattcacgtgtagaccaggctggccttgaactcagagattccacctgcctctgcctcccgagtgctgggattaaagggtgtagcaccaccaccaggctcggagatatttttttaaagtagactgtatttgacttcagagttgagctttttactccaagcattctatggaagagctacaggcttccctccctgtagcctcccagtctctacacctttat

SEQ ID NO: 30546 - DNA, 1802 bp, Mus musculus
cagggacacagaagcaaacaggaagttaaaggggggcttccagactggtttccagtgctttggtagtggctgtcttgccagtcagtcatggggcccagacaaccgacttctggcctgtgcggaggccaggccctcctggcttccttccgtatggtttgttaagctctttactgtggtctagccgctatccctgctgtcacataagcagttaggatccaggtacagactgcagtgtggggagggtctgtgtgaccaaggacttcctgtcacttttccctttttaaaattgaaggagaaacagcccagtagctccaccctttctggccacagatggcattccgttagtttgcaatagccaccttatggttaaagccaacaggtcatacagcttggtcccagctcgtctgcctggacgctgagcggcctgcccgagtagggtaggcgtgatacagagctctgcagaattcttgtgtttacacaacccctctgggcaatgccgtggtttctctcgacaggatgtcttaagattgtcggcaatcacgcagccaccagctgctcaggaagaaggaatcgagaggtctgcatgggtaactttttttcttaaagaaacaccaaagaaagctgtggaaaggagtgactccccccccccccgtccccctccccccacccccatcctgcccagctgccgtggaaagtgtaagaggtccagccataactagagcattagagcacaaataattgtttttcaaaagtatcattagtgaggagaggagccgggcagagtggcttttctctgtgggcagatgggctgcccacaattccttccatggctggttcacccgtgattcgcgtgtaagcagcttggccttgaaagcacaagcctcgttcctctctttctgtctttattgcctccccccatgcgtctcataggctcccagaacaccttacagagccccttgttctcccttggggctgcataggccacctcccagggtctggcctttccaggggacagaatccttatccttgaacctttctaggcgcaggataacatctgtgcaagttgacaccaggttaggcctgcaactctcgcccatcctccagggggcgcactttacattgccaaccacagcctccattggctcccaaggtgctagggaagattgttggtttctgtcttctccagctctgtgggttcgagtttcgtgggacttgggacttttatatttggtgaccagtgccctccgcttctgtttgactccccgtgacctctctactatgcatttccctttttatcaggtgtataaagttaaatactgtgtatttatcacttacaagaacatgaacttaaaaaagatgagctttcggttgtttttccacaggtgatcaagcttctgtgtaaacttgaaataaacagacagcaaaatggtgcaaagcccgggcctctcgggggttctttggttggtacctggtcctttgcagcgtttctgcttacactggtattccttcccttaacgttgacagcaagtcagatgcccagagctcacagctcatcccccacccccaccccgccatgtaaactgctcctgggtgagccagcagcccaaaggttgaagtgtgaaggaggtaaggggcggactctgtgaggttggctaggtaagcagctgggagtggctgtcatcacaggagacatgtcccgaggccgggcattgtttgaacaggctccaagccttactctctgccatcagagggggacaggaggcgaaatctgaaaagtcccaatccttgtttcagaaatatgg

SEQ ID NO: 30547 - DNA, 1149 bp, Mus musculus
cctttgttgtctaaggggacaaagaaaaaaaaaaggacttgactccatgtcgtcgactttggccgctggctggccggaccggcgggtgtgaggagttgcaaaccgaaaccaacatgcattttgggacaattgctttttaaaatgtttttaatgccaaaaacaaacaaacaaacaaaaacccgccccctccattgtgaattcagaaccatgtcagatgtaccaggtgaatgtgtgtggggtttgagctgcgtggagaatcacgtggggcgagtcctgccggctggggctacactgggggggggggggcggattagaaggatcggtgtgacccacgtacaaaccccatgcctgggcgccttccaggatcatggaaagacagggctagccctcagtagctgcagggaacttccatgtcatttatttgtaatgaggactttttaagtgtgtgtgtgtgttttttttaatgggtataattatagtcaggaaaactacaagggcttgcagttgaaatgctcgaggggtactttgcacccctgaatgcgagcattcctcagctgtggtggtagaggtctgtctggaggctgaacacacttcatgttagctgctccaactgggtttctgagattgtcagctaagctaattctctttgtaaattggcaaaaaaaaaaaaaaaaaaaacaaccaaaaacaaaaaaaaaaaaaacccaacaacttcaggttggaatctgctctttcatgtacattacatggcttacagctcaagagatgtttccaagtctctgactagccagaactccggagaggttcacaagttccaaaggttggagcttccaggatgggtgtccctctgtgcggctgtgtgacagggaccgagagccggtgagacctgtgcctgtatattagcagctgcgtttgtttattgcctgtgtattctagagactgtaaactttctttccttttccagaatgtctggtcggtacaatgaaacatcagtttccctgtgggccacttaggcaagacttgtcactcagcttaggagcaaagctgtagtgtgatatcagtgacatcagggtgccattgtagagcaaagtgtcaaaccccagagtgttcctcagggcaaagggctttcgggtttttttttgttgttgt

SEQ ID NO: 30548 - DNA, 1865 bp, Mus musculus
tctcaataatgtttagattactttaactgtctagttctctcttcctgtggtgttggggatggaactgggaagtgagagtccccacaggctttcaccaccatgcctgtaaagacagacttgaaagctgggctaggcaggacatgcctgtaatctcatcacttgagagatagatgttggagaactgctgcacatatgaggccagcctaggctacatagtgagttacagtccagcctaggttacaatagtaagaccttgtcataaataaaacaaaccccatcccaaataaaacaatagaagtcaaagctttccatgctacaaatggccactctctcctgcatctgttgaaatcatactgcttttacgtgtattctctggggaggtgttctgcgggatgagatggcctgtgccatggagaaaatgcccagaacacaagcccatcttggcaatgggcacaggccatgcgtgtgtacagtgggcacaggccatgcgtgtgtacagtggtctgctgtttctctttcagctcatccttggaatcccggaacaggccttaacccttctccacatggctatcgagcccatcctagccgacggggctgtcctggacaaaggtcgtgccatgttcttagtgtccaagtgccaagtggcttcggcagcgtcctatgacccagtgaagaaagcggaaggtaggagctgtgtggagagtgccgggcttgcctgtcggttgcatttgctgctgaatcagctcaccagcccgagcgttctacgttttagttttaatttttaaaaaaaaaaaaaaagtgagacgaagctttccatagtatggtgggctttttttcttcatattttaaagagaatataagaatatctgatatatggtatatatcataatatatactagctgaatctagatttcaagttttgaaaactggaatgttaactggatttccccccccaccccacccccagctctggaagctgccattcagaacctcagtgaagccaagaactactttgcacaagtcgactgcagagagcgcatcagggatgttgcttacttccaggccaggctgtaccacgctcttggcaagacccaggagaggaaccattgtgccatgatcttccggcagctgcaccaggagttgcccgcccatggggtgcccttgattaaccacctctagccaggactccctgcttgatggtgtgcatttaggggtgggtcattacatgctatcttgtcaataaactgttctgatcagtttgtctgaagtgggtttttttttatttttctgggttgaattgtcagtatctttgttaagaactgtgtatctaggggctggagagatggcttagcagttaagagcactaactgttcttctaaaggacctgggttcaattcctagcaccctcatgacagctcacagctgtctgtaactcctgttccagggactctgacaccctcaggcagacataaaagcagtcaaaacaccgatgtacataaaattaaaataaattatttaaaaataaaacctgtgcatcctcttaaatctgcttacagagggttggtggctcagggccttaatcccagcacttgggagaggtagaggcaggctgctctcttcaagagctgtgtggtctccatagagaggttaaggccagccagtgctacactgtgagatcctgtttcaaagaataagatttgagagctggggagacagcaaaagtgtggatttccagatcctacctaaaaatatgtctgctgacagctaccccagccctcaggaggcagaggtgagtttgctcatgcaagctgcctagcaggagtagcagaatcagcgggctccaaagactccgacaaatggaaggt

SEQ ID NO: 30549 - DNA, 1390 bp, Mus musculus
ataatttttaatagttttatatctgctatactttcacttgtgtattaattaataatttactttcagctttagttgaaaaagtcaagggtgtgatttgttgttttctgtttaggaaataagaaaatagataattgatacttttttctttctttctctttttctctctctctttttctctctttctctctttcaaagatttattaatgtatatgagtacactatagctgccctcagacactccagaagagggcatcagatcccattacagatggttgtgagccaccatgtggttgctgggatttgaactcaggacctctagaagagcagtcagtgctcttaaccgctgagccatctctccaggcgtctttttatttattttctctgatttagaagttagcagtcatgctgaggagatatatccttgatcccaaatggctacagttgaaaggcttgcagacctctgtgtaaccattactgtttgttttggttgtttcaggaaagcagtcgtactgcaggctcagaaccaaatgacagaggcacacaagctactacagaagttgctgacgtactgtcagaagctaaagaacacagaaatggtcatcaggtaagcagtctgtcggggtgccgcgggggctggaaggcgggccttctcatcccaccctcctctctgttcagtgtcctcctatcggtggcagagctgtactggcgatcttcgtccccgaccatcgccatgcctgtgctcctggaagctctggccctctccaaagaataccgattgcagtacttggcctccgaaactgtgctcaacttggcttatgcccaggtaagccaatgtgggtcccccccgccccgctaagggggactgtggggatgagggtgtgctatgtttatggggtgcatgtggaagccagagtcagtcttggctgccattccttggaggctgtccaccttattttgagtttctcttactgtgtgtgtatatgtatgtgtgtgtgtgtatattatatatctatatattataagattatatatatatacacacacacacacacacacacacacacagtctctactgggacctgtgcttgtcctttagggtggactggccaaccactctaaccatcgagccctctgatccccatgtctcttgcaagcccatcacagggcttacaggctcctgtcattgtccagctctttatgcgcttgcttgggaatcaaactgaggttctgtggtttgcatgcatggcagggatgttaacaactgcgccatctccacagacctcaagcatctgcttcccacaggcagtcaccacacctaggctttctatgtggttctaggggtgtgaacctctggccttgtgtggcaaactccacactgatccattgagcc

SEQ ID NO: 30550 - DNA, 1146 bp, Mus musculus
tcagactcatactggactgtatggaacatttgaggcctgcgatacctgagaccctgtctcaaaattagaaaccaagcccagcctcagtctgtatactgtttaagggtgagtattagaaaggtttgggaatcgtgaatgggaatagcaggcaacaaattgaatgcttagtatgaaaaacaggagggaaatggaatttgacaagaatggccagagacttgaagacctttatcagggtaaagtacagtgtgagctggaaggcaggcgtggagctgctttgtgttttgtgtttgtttttggcaatggccttggacccttcatccccctacctcagtttcccaagtgctggaattataaatgtttgccaccaccaaatgtgggcttctctttgctttttgcaaaaaaagcaaaatgcttgtagcattaaataaatcaataaataacctccaacacatatatgtaaattgtaaggatgtttgcaacaatcatgtgaatatttttttgtatttaatttttctttagttatggatgctgtgtgatcaaaaaatacagtttgacagagcaatgaatgatggcaaattccatttggctgattcacttgttacaggaatcacagcgcttaatggcatagaaggtgtatacaggtaagaaccctggacagctgtcagcactcagaggaagaggtaggcaggcagtctgaggccagcctggtctacagagtgagttgcaggaaagccagggccctgcctcaaacagagaaacaaataaatataaacttaagatctcactgggcagtggtggtgcacgcctgtaatcccagcacttggggggcagaggcaggtggatctctgagttcgaggccagcctggtctacagagtgagttccaggacagccagagctatacagagaaaccctgtctcggagaataaacaaacaaacaaataaacaaactaggtttgtgtgtgtgtgtgtgtgtgtgtgtgtgtgtgtgtgtgtgtgttggtgttgttcacctgtgcttgttcacctctactcaggtcaggccagctggcctcgggttcttgcagactccccttctcccatctctctgctaggattgcagatgctgtgctgccatccagctttgcatgtgctctggggatccacat

SEQ ID NO: 30551 - DNA, 1099 bp, Mus musculus
gtgtcccaggggctcctcaaacttttttttaaagatttattttattaatatatgtaagtacactgtagctgtcttcagacactccagaagagggagtcagatcttgttactgatggttgtgagccaccatgtggttgctgggatttgaactttggaccttcagaagagcagtcgggtgctcttacccactgagccatctcaccagcccttttttttttttttttttttttttttttggtttttcgagacagggtttctctgtataaccctggctgtcctggaactcactttgtagaccaggctggccttgaactcagaaatcctcctgcctctgcctcccaagtgctggcattaaaggcatgtgccaccactgcccggcccaaactctttactaaatgtgccacttaactatggtatcaggagaaaagatagacactaaagaaatttcagcaccattctgtatgtaagcacagaaggcagaggtaggacggtagagttctaaaccagctctgaggccagagggcaccatgggtgtcattctgtaggtgctgtctacattgccttctgagacagggtttctcactggcctgggccagcaagccatgaagatccgcctctttgtgtttctttagttctaggattacaagctcacgttaccacaaccagtttttcatttcttaatgttcttgggattaaattcataactgcagaggacatactaagcccttctccaaggttgtcggcccctttcttgtcctgactgaccgaccgaccgaccgaccgaccgaccgacaatcctcctgtactatttccttctaagactcaaggggaagtgactgcagtgtgtatgtacaaaatctctttactcagtctgaagtttggacagcccatctcagtaccgcccttgctctctgacagatatgaaaacagtggacaggattggcctgtaaaaattatggaagcaaaatgatcatctgctgttgtatttcagtgtttttgcttcaaataaaagcttaattgtgcaatcgttctgcatagttcacacttgatggaatgattagagcaaattgaaaagccttaactaagggactggagaggt

SEQ ID NO: 30552 - DNA, 2469 bp, Mus musculus
cttacagtaatgtttgttcagtctgtgcattacctgtgtgctttcttctgggaaaggaaagaaacacatggactgaattgaagtggctctttatagactgataaagatactctagctgtggatttaaacggcttgtttagatgggcttcttaccctcgaggagaatcccagacagaagctaagaagagaacttgttgctcatgacaggcgtccttccctttatgtcctgttacctaatatgcaagcactgtttgctctattatctcattgtaatccttaccacggttctctatgataggtttgatgcccattttacagatgaggaagctgaggcttagctaagaagctaagtgactggccctaagtcacacagtaagtagcagaggcagtgtctaagtccaggttacctaatgctgaaggtctggctctttgccatgtaccctctgcttctctttcagccctagcgtttcaggaacatagctctcatgggtcagggctgaggtcaggtcataggttctttaagtagagctgtcactgtgcatgtgctgaaatgtgaaatccaccacatttctgaagagcaaaacaaattctgtcatgtaatctctatcttgggtcgtgggtatatctgtccccttagtacctcgcctccctgggaatacagtcccttgttcaacagagagcttttgctgggaagacggccaacaaactgatggatgccctaaaggactctgacctcctgcactggaaacacagcctgtcagaacttatcgatatcagcattgcacagaaaacggccatctggaggctgtacggccgcaggtaggtctccaggcagcctgccagagccacggaggtgtggagcctttagagagaagcaggcgctatggaaatggtcaccgaggggttagagaaaacgcttcaccatctggagacattttgtagtctgcatgaacttgagcagagtcttccccatgttcacagttcactgtccccggctgctctgtgtttaaccaaccgctgggtgatctctcctctggttcgcacatttcctctctagctcatgggtatacttgagcagtgaccagctggcactcacacctcaatcacctgaccctgagctaagagccccccttcctgttcgcatgctgcatggcctccttgtgcaagtccagtgcccctccccacagctgcttgtgtagacgaggttgcttctctggacagctgcagccactgtctgttttccactcagccacctgcagtttggaagtaaacttctgaactagactttcccttggagcccagtcttaatctcacacatcccctagacaacctgctgtttctaggaattccgtaatgaagggagcgcctctttaccagtcttgtttttgtatttcagataattttttggcacggtgtgctctgaaacagctgccgacactggccactgcctgcattgccagagcagccggtgccaggatggcatcgggtctgaatttacccgtgaaacctaattagcatcctgtgacctcagggaacatcgagggtggggaggtgggggtggggatctgggtgccaagtgctcccagctatgttgaccttctctacatttccttggggcctcctcggcctgagggctggagagctggcatggggaggagttgcttccacacatccagagccgcaagggttaattttcttgcctctccactgaggataactgtagggcatggctcaggggcagcctgggtctgctgcctttataaagggggacctgtcccctcctctcctcacccagcaccatggcactgcaacaagcccagatgttgctgagcatgaacagcctggagtcgctgaatgcgggtgtgcagcagaacaatactgagtcctttgccgtcgctctctgccatcttgcagagctccatgcagaacaggtaggtcggttgtgttagtgtgtgctctgttgctatggcagcactgcggaggaaagcagcttggaaggaagcccatgctccatggtctctaccgaggcctgcgctctcgttggcccatcatggccacaccttcagggtggagcatgggggcctgaagtgcttctggggcactggggctctgctatttccttcctcgtgcttgagagaagcactgggtatgtctcagtgggcctggttggtgtaggttgctgaagaatgaaatcccccatggagatagtttgaatatgccacatttgtcaaacactgggtgttttgacatcggtgaagggaacatgagcttgactactggttttcaagaagcggaataggttgggtatggtggtgcacccgaggacagcctggtctacatagtgaggtcccagacagccagggctatcctggctggagagaccctgtcacaaaaacaaaaaccaaatggtaaactaaaggagatggaaacttaatgcagcagagatgtttgtgtgtgtgtggagaggag

SEQ ID NO: 30553 - DNA, 1115 bp, Mus musculus
taattgttgattctatccatgtgaactagcaatgtgcaggacaggacaggagatgaacacattatgagtctggagagttcacagtgttgagtgttcaagtgacagttcacgtatagtctatcaggtgctgtaggaagggagagtgcagaggactcacagggagcatgggtggcctttgagaccttgctgagcctcagtgatagacagtgaagtataaattataaactggggcctgccggggtttgctgggtctggaaggagcttgtgggtgagaagtgcaggcctggaggctcgtgtccaagggaggggaactctgtgtgctggcgtgaacatggtcagcgtgtttggaaaggtgctcaggctgatgaggctgcagtcgggcaagattagtcatgttgtcccctctgggttgactgattctaatgtgctgttgttttaatttcaggccgctttgttgaagaatgatgagactaaagccctcaccccagcttccttgcagaaggaattgaacaacctgttgaaatttaatcctgattttgctgaagctgtgagttttgttcagaatttgttcctaaatttcaaggaagggacggtgatgttcagtgtatcagcgagccacacagattttaggttctaacaggaatcacgttggcaagataacagcagggcccagactgcagggctcccccaccgtccctgggccagaggccctgctactgtattctctcactcatccttggtatggcttttgacaggagatggtagactgatggatataaacatttgagggctaaaaagttcttttcctttcttccttttgtgaatgttttcaaacaaatttttaaattcagtaccctattagctctgttcctctgtgagtttcttaatgtaatcttcagatgatatttgacttgacatcagattttattcatggcaaaacagctccattttgtttcccagtaactgagacatccatgttagaagagtgcgttagttctgtgcttcaaagcaaaaggacaagagttaacttagtagctaattttcattggacatttagaacaattaacttctaacttgtacatgaatcaggttctcattaattcagtgttccttaa

SEQ ID NO: 30554 - DNA, 2247 bp, Mus musculus
ctcttgtgcacaaggcctgggttccatgcccagcactttaaactagacatagtggtccacagctgtaacccatgcctttgggggctagaggcaggaagaacagaagttcaaagtcctcctgggctacaaagcagttcggaagttagctgggatacatgggggaaccaaagttatgattattagaggggttgttctaagagcttttatttagatgtttttttaatggattgcattagaagttaggttcatgtattcttcccccatgtgtataatttcctatgcaattacctctcttttagttgttttagataattccatttttactttgacgaatgttatacagttaagttagcaatgtgtgatactcttgaggaatatggggatgacattttaaatggattgtaaagtttgtcttagagccccagctttaaacaaaccttgaaatcccctttaaagcagacttgtctataattcaggactatggaatgtgcagggtgtgcagcgagccttcctaaaccatgcatcccgattttctcattcagaatcaagctcatggctgaaggcgaactgaaggatatggaacaattttttgatgacctttcagattctttttctggaactgaaccagaggttcacaaaacgagtgtagtaggtatggaacttctccggagagcagggagcgttcccattgaagtgagcggcgttctgaggggcatctgtcctgacttgggtgtacagaagcaagcagactagggtgctggctgtgtgcggtttgtattcactgccttcctgtttcgttctctattcgaccgtaacctgtggggaggcagctctgttctcctggagtagttagcctgggcctggggtctttagggtcgctcagctcttttcacagtcctgcggaccacttgactgggttgtgccaactgtaagtggggtcaccagccacacttaggaagcgaggtgagtggagaccgctcttaagctttagtgttgaagcgcgtgtgcacgtgacatttctttgatgcttttgtactaactgtgtcccgtgggcccccccacccccacactctgttgcatggtcatttttatgttagtcgacatcagttggttattgatctcctgtccccaggtcatggatgtacaaggtagacatagccttgcctctgacagagacaggtgtgctggaaggagggatggcagatgttcaaagggaaatcagtaaataagataacataattacacctcagcttttgactagactcacatacaataactatggtagcttcagagagtttgaatagccgtgaggaaaatggaggcctgaagggctagaggtgggagaggcctgagacctgaatggagggagagcatgcgggaagagcactggaggaggagggacagcacctctgattcctctgaggggaatggggctggaagttgttgtgagtcttgggctatcagctaatgctttctccttgtctgtggtcttatcttgtaggtctgttcctgcgccacatgatcttggcctacagtaagctttctttcagtcaagtgtttaagctgtacactgccctccagcagtacttccagaacggggagaaaaagacggtggaagatgctgatatggaccgagaggatggagagaaacagatggagaaggaagagctcgacgtgtccgtgaggtaactcgggtttcctgtcaggctcttcttccagtcacttggcttaactaaagtgtcccacttcattctggtctaaacatatgagctggccgtcccttttctgttcctggggattccggaggttggatcacaggttacaactaaggtttcatgtcctgtggcttcagattgactgggaggcatgggtaggcagtccacaggaggaaggagatggagggcagggcatggattcaatgactccctttctttgggcttcttggggtggctgaagggacacagtttctgtcagatgattttctacacttctgggaatggagtaaccaggaagaagtgttgatgggcctaagtataaaggccattgttacctgccttaggaatcatctttcctggtggcttccctgagccctgctcccgtctttgtactctactcaaattctaagtttgtgcagtttcattcctgtggtgtcagctaccctaataagcaatagcatctggggcttcctaaagcacagccgttcaggtctctctagaagatgccttaaaattagcttacaatgtcatg

SEQ ID NO: 30555 - DNA, 1121 bp, Mus musculus
tccatggaagccagaagcagcactggacccctgtctggagtgacagagtaggccaccaccatgtgggtgctgagaattaaccctgtactctacaagagcagccactgatttttaactacagagtcatctccccagccccaaacatttttatttttaatgattttttgagacagggtctgacagggacctgagaacctttggcttagctgcctgagtactgggatcacaggcatgcactgccatgccagctaaggatatcaggaaaaataaaacttacatgacttttggttttcttcattctctttgtacagccggttgactttctctaccagctcccatttttcacaacagccagaatagttgacaaaattccgagccaggatctccttcagctggcgcacactcatcccttctacctcttcaaggcttgagaggtcagacagggaagctcttgctttctttttagagagccccgggttctgaaatcagagtatctgttaccttgttcccacaagcccaaactacctggcctactttgctccctgtggccctagataccctccccagacttctgagctgcctgaagtgcgttttactacatctgccctagaggaacctctctttgctggcctagagcaaggcccacatcttcccttcccgccataagcatttatcagggaaagcacttttacctgttcctcctcctcttgttcgtcgtcgtcatcttcatcatcgtcgtcatcatcatcgtcgtcgtcatcatcatctgtgtttgctgaagctatttcactttgtacctatatatacatgacagatccaattatattagtgatcaagtttttctaattaccaaccacatagtgagaccatgccttaaaaaaaataaataaaagaataactagggctggagagatggctcagcagttagggcaacttactgctctggcagacgccctaggttcagttcccagcacctacgtggcagatcacagccatctttaactccaatctaggaggacacacacaatgcccccttctgaactccacagacatgctagagcacacatgaatttgacatgcctaccaggacacgtccatgcaaacattcacatacacgaaat

SEQ ID NO: 30556 - DNA, 1188 bp, Mus musculus
gcagtaagttgccctaactgctgagccatctctccagccctagttattcttttatttattttttttaaggcatggtctcactatgtggttggtaattagaaaaacttgatcactaatataattggatctgtcatgtatatataggtacaaagtgaaatagcttcagcaaacacagatgatgatgacgacgacgatgatgatgacgacgatgatgaagatgacgacgacgaacaagaggaggaggaacaggtaaaagtgctttccctgataaatgcttatggcgggaagggaagatgtgggccttgctctaggccagcaaagagaggttcctctagggcagatgtagtaaaacgcacttcaggcagctcagaagtctggggagggtatctagggccacagggagcaaagtaggccaggtagtttgggcttgtgggaacaaggtaacagatactctgatttcagaacccggggctctctaaaaagaaagcaagagcttccctgtctgacctctcaagccttgaagaggtagaagggatgagtgtgcgccagctgaaggagatcctggctcggaattttgtcaactattctggctgttgtgaaaaatgggagctggtagagaaagtcaaccggctgtacaaagagaatgaagaaaaccaaaagtcatgtaagttttatttttcctgatatccttagctggcatggcagtgcatgcctgtgatcccagtactcaggcagctaagccaaaggttctcaggtccctgtcagaccctgtctcaaaaaatcattaaaaataaaaatgtttggggctggggagatgactctgtagttaaaaatcagtggctgctcttgtagagtacagggttaattctcagcacccacatggtggtggcctactctgtcactccagacaggggtccagtgctgcttctggcttccatggacaccaggaatttcagaggtgcatgtaggcaaaacacccttaacacataaagttaaatgaatagattgaaataaatgaatagattttttaaagaaaagcattatacctctttagtgactgagtcagttatggaagcctatttatagagctgctaaatatttcattacttgacatgggctgtgaggcaactattgtcaggtgaactagataaacaattgctgagtatagattccttgcttataacaata

SEQ ID NO: 30557 - DNA, 1127 bp, Mus musculus
ccctgaacttatcggaagatgtacgggaagttttggcaactttgtggctgagtgtgtttttctagaggaaaaggtccttaggttctccagagacccttccatcccttgggtgttgtttgttctcttgctccttaccctcaatacataaacaaacccagaaccttccctgtaacctgcaggatgtgttcctgggcccacattattggccataggtagctttttgtaggtggcatgtccattatgcttgagtgattggaagctgggtatgacttttcatgtcaccttggctgtgttgatcatcagagtgcaattttaatatgtttaaacaaacaaacaaacaaaaaacccttacagggataaatgatataggtattctttgtggtaggtaagtgggaaacccagacccattttctcacctacagctttgggaattgaactcaggtcattgaacatagtagataggccctcttctattgagccacccagtcttccccttttaaaattacattcaatctgtgtgtacacacatgtgtggatctacatgtgccttggcatgtgtgagggggtcggaggacaatctgtaggagtgggttttctcgggatcaaactcaggatattagacttagtggcaagtgtcttcagccactaagccatcttgcctgctccctctgcccccacccccctgtctcccgagtgctgggattaaaggtgtgcgccaccacgcccggcccagcccggcttctaatttttaatttcatctttacttattactattttctttttattttgagacagagtcacactaagtttctcagattgtccttcaactcactgtgtaggccaggcatgcctttaagttttgatcttcctacctaagcctcccaggtagctgtgagcccaccagacctgtaaaactatcttaattgtagaaacttttagctacattttcttgttttttcttcccttggctactgttgactgtagaaacttcctttttcttttcagagcaggtttactctgtgttgccctgactgtcctgtaactgacagacctagatctgcctgcctctgcttcctgaacactggggctaaagcttgtgccacaaccaaacagtaaaacccaactgc

SEQ ID NO: 30558 - DNA, 1175 bp, Mus musculus
tagtaggctttggtccatctgggttgacgttcctcttaacctctttttccaatttgactatatatatctccgtccatcctgtggtccagtgcctttgacaggacgcaactatctctgagctgtttcttttgttttggctcctgagactgtttattattatagtgagttccgggatggcacttgtagcagttttcctgcctcggcctcccaagttctggcacttaaggtgtgaaccttcacacccagcttgcccctgggcttatgagcacattttgaggcactgttccttctgaaggagactgctatattaggaagggacctgcacttctgtagccaggtaattctcttcgtatgggtcaagctgggaatagctttttctgaagcagttagcaagagaaattctccccaagttttcatttacactttagagtcccccctccccctcccacaccggtcttctaggcagacagtagtgcagaaactgatgtcagctcagatactttgcattttggggataccttaggctgtggctcagtgctctctgcctcccctctccttcccaccactttttttttttcctatccattttgtcagccccgggcttctgcgtacctgagaagagtagatgtccttaaggacttttgtgaaagaatctgtgacttctaagctcgccagccccaggcttcagctcttctcttccgagtttcccctccctgttccttatccttctagcaggatgtgttcagcaccctcttgaggatggtgctggagtcctgacatggagatatcaagtatacttggccacctgtaaatcagaagaccgcaaggagggaggccttgttggggagcagttgttccactgatgaaattgggaaaaaagctgctacaaccctcctcggagttctggttacccccagactgtcagccaggcctgagcagtatcaggcttatagacttattctactagatggacccccccagtgatactgggttaactatctgtcctacacctttcatcagccacttaggtctcccccagtgtcctcagcctatggactagccaggaaatgatggacagagagcaactttatcatgagaccctttgcttgctcattgctgttgtgcacattggctgtgggatgtcccgtacagaacactatcaggaaatccctcta

SEQ ID NO: 30559 - DNA, 1208 bp, Mus musculus
caggctagtcaccaacttgctgatgtctgtccagatgtttcttggccctgggacattgttcctccaggggcataatgccagactcctctagagtgaagaaggctggaagatctagccactaggtgagtcaaagaatttctttatggcccgagccaaaacagaaggaccatggaagttgggtctgtatatgatatagttaaaaagttctaaattgcccgccccccaggcctccgcagtacaagctgtcatggcggccaggctgttaagcttgtatggtcgatgcctgtcagcagcgggggtgatgagagggctccaggctgccctcgttcgctgggagtcctccagggctgtaatcgccctatccggtgtggagaaaaagcggcaacgagaaccgaccatgcagtggcaggaggacccagaacccgaggacgaaaacgtctacgcaaagaaccctgactttcatggttatgatagtgaccctgtggtggacatctggaatatgcgagctgtcttcttctttggtttttccatcgtcctggtctttgggaccaccttcgtggcttatgtgcctgattataggatgcaagagtgggcccgccgggaagctgagagagacttgtgaaataccgagaagtcaatggccttcccatcatggaatccaactacttctatcccagcaagatccagttaccagaagatgactaatggcttaccgagcagggcctaagaagcattactcatccgctgcttgttatttacctggttcctcagaacaccttattaaaggaattgaaagtaaaaaaaaaaaaagttctaaattagctagacattcatgcctgtgattccagtacttgggaggtggcagaaggctcaagagttcaatgttggaatgggcttagcagtgcaagccttgaatcccagcactcagaaggcagtggcaggccaattctgagtttaaagctagcggtctatatagcaagttccatgacaaataggactacatagtaaaaccagcaagcttgcctaaaatggggcttttttttttttaagatttatttatttatttattatatgtaagtacactgtagctgtcttcagacactccagaagagggcgtcagatcttgttacagatggttgtgagccaccatgtggttgctgggatttgaacttcagaccttcggaagagcagtcgggtgctcttaccca

SEQ ID NO: 30560 - DNA, 1127 bp, Mus musculus
agtcagcaccctggctgccggtcagtggtagccatgggcagcaacatctcaggggccagcagcatcaccgggagcagggccaaggccccggtccccggcggacatgaggaatgtgaaggccacctgcgcgcgcagtattaacctgtcccagctccctatttataacatatttaatatcgggtcttccctgcttccctggaatccgaggcctgccttccctggagctctgtgtaatggccgtgggcaggcctgtgtctgtctttcagggaggggccagaagcctcagggaacccctctcttcctactcctatcatttgaatccctcactggggtttagatgtgcctcactcgagttggctttagccgacctgctactttactgtgtcccaggcaccgggaggaatgaaactttgagcatcctgtggagcctcccctgtcctgggccaccacctcttctgtaagcctcccacagccccaccttctgcggtggacaaatatttaagttctcagagaacctacctgtgttgtctcttgccttggtctccggaaccgcaggcctgctggccactgggggaaagagatgcagcctccttgggacctccatgtggcagggtgttaaggacgcggacggcctccaccagagggcgcccagcctctgggttgttggagttctggcggactcttgggtgcctgaaccctccagccaccttcatagacttgctgagagtccttggcataggagccaggccctccttgtgactggaacttcagccattcggaggtcacccattcccttcctctcttcatctcagaggttcttttttgtacgggaaggggaggagtggaagggtctaagtgggctcagcccagggtgtgaccctgtgaggtccaggaagcagcaagagtggaggggcaaacaggtccagtttgagtgttctgtccctgcccagcctgctcagacccaatgtcacggctggccgcctcagacacgtttcatttggtcctcacaggacttactttaaaattctttagttatgtgataaaaatgagaactcgcctcctccatggtgagattcgacataatccagatttctgtttaccttgcaaaaactgggaaggcctggcaa

SEQ ID NO: 30561 - DNA, 1528 bp, Mus musculus
cacctggccccgagcccaagtttggaatatgacctttttagactctctgcaaccgaggtgggtcggaggacccgccatccccgctctccacggcccccagtgttttctcggattgttccgtgccaatgggaaccaggagggaaagttgaacaaaaaccttcagagctattaaattgtcgcgtgatggaggagggtcttgctgtgtccgggctagtcctagtgacaggttaggaccctaggtatatccctttgtaccaacgttcgctggttttccgcctggcttccagaaatcactaagcccatcctctgcttgttccctggagctgttaagtagctgagacttggagcggtcaggctgcctaaccaggtagataagatagcctggcttcacccctctgctagagtctttatctcccccctcttatccgttccatctgcatttggatagctcaataattgatttatggggcctctgaataggggagtggtggccttagcctcccccacccaaatttgtactttgtccttaaaggctgcagtctgttctcctctgcccccctggatctgagctttagtctctgcagtgaccacctgacagctccctgaggggggtttgaggcaagaacccacagaagcaatttcttgctttcctctgctctctaggaattcctggacaatggagagtgccccaggccccctgaacatcttgctgatgagggagtaaagccaccctgggtgggtgtgagtgcgcgcgcgcgcgcctatctcctcagctggcccggcccgacctctgaggaggctctcaccagcagctggctagattcctggttatttttagttacagatccagccccaccatcaccaccagagttgagtccaaatccaacactctaggccgggtagtgctgggactttgccagcctcctgctgaggtagggctgggtgagtaggcaggctggaacgggtggggtggccgtgtgctgtctgaaccctccccagagctggtcgcttttggtcatttcctccctgcagacttgctcttcctccacacaggtctgggggagtttgtgggaagccaggagccctctcttggttatatgtagtagaacaagttttttttcttagaagtgaattctccccttggcaaactgcagccagccagcctcctgggtcgagagccaagccaaaagatgtctgagagaagaaacctggggtcctgcaaaggtaagtgggtcccagcccactctcaatccccctctctctgtgtgattgctattccacactggagtcacctgctctgtgcttctgaggaacctcacctctggcacatcaatggaaattgtccttccctttttatttatttttatttattttttattttttgccaccctcactggccactaagagatagccctagctcctcctctcctgcctggttttgacaggactcactccattgagtcctgtctcgtctctttgcagccctcctcctccccccccccccccttcagccagcacttaggccctc

SEQ ID NO: 30562 - DNA, 1153 bp, Mus musculus
gacctggacatggagcccgagccccctcctatgctctccttgcccttgcagccgccattgccgccccctcgactgctccggccacccagcccaccgcctgagcctgagaccccagagccccccaaacctcccgtccccctggagcctcccccagaagaccaccctccacgtaccccaggcctctgtggcagtctggccaagtcacagagcacagagacagtgccagccaccccaggcggggagcccccactgtcagggagcagcagtggcctgtccctgagctccccgcaggtgcctggcagcccgttctcctatccatccccgtcccccggcttgagcagtgggggacttccacggacacctggtcgggacttcagcttcacacctactttccctgagcccagtggacccttgcttctgcctgtctgtcccctcccaaccggtcggcgagatgagcgtaccggccccctggcctccccagtgctcctggaaactggcctgcccctcccacttcccctgcccctgcccttacctctggcattgcctgtcccggttctgagggcccagcctcggccacctccccagctgcctcccctactgcccgctaccctagctccctgcccaacccccatcaagaggaagccaggccggccccggagatccccaccgtccatgctgtccttggatgggcctttggtccggccaccgccaggacctgcccttgggagggaccttctcctcctgccaggccagccaccggcccccattttccccagcgcacatgaccctcgggctgtgaccttggacttccggaacacggggatcccggcccccccaccgcccctcccaccccagcctcccccacctccacccccaccacccgttgaatccaccaagctacccttcaaggagctggacaaccagtggccctctgaagctatccccccaggacctcgccgagatgaggtcactgaagagtacgtggacctggccaaggtgcggggaccgtggcggcggccacccaagaagcggcacgaagacctggtggccccatcggcctcacctgaaccctcaccaccccagcctctcttccggccccgctcagagtttgaggagatgaccatcttgtacgacatctggaacggtggcatcg

SEQ ID NO: 30563 - DNA, 1889 bp, Mus musculus
ccctgggggagccaagctggtcccagacaggaacttcctccttggggactcccagctgccctacctactcccccccccacccccccaatccttgggttcaatgtttactttctcattcggatgccagcaacgatggagcctcccagggtgtccccagtgcggtgggggcgctgggaagggtgtttccactctcggcagccttggccctgcccaggtgtagagggtgccagggccctgagggcctcccccaagccctgccattacgggtttgtccgaccgtacgcatgtgacattttttgttgttgataagcttcgccccattaccctaacccccacacccatgtcaccctgctggaggcccccacccaggaggccagggcgtatttatttccatagcgagcaggttgtttctcctagagaaaggaagatggtcttggaaatgatattaaaattcagatctccatcttggacagctcctgcccccaccccaccccatcctcttcagggttaatttccatgaatttttttttttctcgtgtataaaatcaaactgaagggaagaaaattattattttggcgttccgaaccaatccctgtagatagactgccataacagactacttttttcttgggaactttgtttcttgtagaaacaagtgggaagactttttttttccttctctcatttctttgtacttaaaaaaaaaaaaaaaaaaaaaaaaagcaaaccaacaacaacaaaaagacacacacagtaacagcaagtcccatccacccccccaaccccccagaaagcaaagcagacatgtaaatatttctggaccgtgactgttgtgacccagagtcctcaccaagatgaagtgctccgggtgggactgacctcacccgtggaccaggtggcaggagcctcttggtacctcagcttgtgtcaagctttcttatcatgtaaattctgtacaaagaattgttttttccctttctctctctctctctctctttctctctctctctctctctctctctctctctctctctctctctctgtcgttggtggttttgttgtggtttttctctttttttttttccccttttttaattttccacaggccctctgtgtttgagactgtgcccacaggccctctgtgtttgagactgtgcccacaggcccgtctgaaggttgagaggattatttcgattggcaattaagacacaaggggcacctggtgggcacagcgcccacctactcttccatatgcagttgtctgcataattgtgcaaatgagaaaaaaaagatttatttttcacaagaagaaatgtgtagcgtgtagagatggcttaatttgagttcctcgggcaggccggctcgctgggggctttcttcatcttccctactgacccccatcacaaagggatgaagatgcccagatgccagggaagggctgcttggtccctggcagggcctcactgagccccgtcacgggatccgcatgcattaaccttgacttgagtttagggtgaggtgttgagctaacccttccccaagcccctggcttctccacccccacccccagcatcccaggaagggtatgcaatactcctgatctgtgggcccatttttctttgaaagcttttgttttcattgagtagatctcttgcttttgaagggtcaggggtttctgatttttttttttcctccctctccctgcccctgcaaagaagagaaccaataaattttagggttgtctgtgcgtatagactctgtcatctgtatgtaacttgtttttgaagagaaatgtttccgttgtgggtgtgtcttgctgtaaatatttgttcatacttttgtgaattcaatactatgtaccattgtattatagtaacttttataaagc

SEQ ID NO: 30564 - DNA, 1099 bp, Mus musculus
aggtgagaatcagtttctacaagctgtcctctgacgtgtgcacaatggcacgtacatacctacacacatgggcatgcatgcacacacacataccgcacatatacaccacacacacgctacatagaataaataaaatataatttagaagctaaaataaataaaaataagagtcttgaaaacatgatttgagaacacttggtcatgagtgtctctttctaggggttatagtatcagtctttcaagtaaaaagtacaaaaatcttccagttgccctggggcttggtctccccgccctgttggtgaggaaccacatgcttcaccagcagggtgtgtgatgtcctgttttcctggctggctgcagcttatgagttttgttagtaacagccaggcctctacagggtcaggcccttaccttcacatctcttcatccctacagctgccttctcaggccaaccgcagaaggtgatcatgacatcagctcctctgaagagagaagggattctagcatctactgtgtccccatccaatgtggtcattgcttctgctgccatcaccagggtaagagagctggcctaggcagtcctctagtgtcttctcatctccctacagtggccaatgtagctgttctgctctgctctacatcagtggtacaagatctctctgctgtgtctccacaggcttctggagtcacggagttcctcagccacagcacgagcagccagcctagccccgtctctcgactcttttctccaagtacagtgcaagactccctggtgaagggcgagcaggtctcactgcatgggggtagtccccaggtccctgccacgggctctagtgagtattcacccaagtggggcagtcagggcctcgtgggaaataagcagattgttctgggttgaggaggccattcccaggctcccataagcaagcctgagcctacagaacctaccatctgctcatagcacagtctggggaaatgcttactgggaagccggatagtggtagccacaccagcagaaagggaaaagaaggtggcaggcatgtcacagcatgggtagctaggacgctcaagacaccacactcagaagaccaggcttggg

SEQ ID NO: 30565 - DNA, 3448 bp, Mus musculus
gccaccaggctagctggtaaagtgctgtgctcagatttgaaccagtggagtttggagggcggcacgcgcctgaaggttcaagtgtcccaatgtgttacagatggtagagacatggaaaggctaggggaaggggggaacctgaccctcatccttctctttgctgcctctgagatgctgcaggtggtgaggtgttctctgcagcactcagggagcccggtaaagggtacctcccggaagaatgtggtttttttttatcctgctgtgacacctagagcaggcagcaggctttttctcctgaccctgcctcaccgtgctgcctgtcctgagaagaccacatgaaagaggggagcccaggatgtcccctgaatttctgatccatttggaagttcctgctgatgcctaagcctgccctggactaggcagttggaggacaaaaaaagggtaggggctgctggccttgtcagcggttctgctgggaccctctaaccggttgctcactccttgtctaatttctgtcctgtatgggaatagtatggtggccctccctcagctttcccccaaaacgtgtttacaggttgagggaagaacacaaggcatgtaggctgggccttggcactcccaccagcacccctccttttcccaaggacaaggtgaaattgttcttcagaaggtgaaggccactgtggtaagaaggaaaaaaatgaaaccgctgctgtgagagggtcgtgaagcccagcccttcctccactcacaccacacgccacaggccacaggccacaacatggctgtgcaggactttggctctctctccccttataggggagtaaccctgtttttacaactctccggggtataagatttggccttttgcttttctggcctacctctcctttttgctgagttaatttcatcctgttttctcagatgtttaaggctgttgttagtttgtgtgaaactggggctagggaggggggcggtggggggagagagagagagagagagaatgtgtttgtgtgtgtgtgtgtgtgtgtgtgtgtgtgtgtgtgtgtgtgctggcaggctctttcaggtgcatgtctgttttggttttgagagtgtccccatttcctttctcttggtgctcacctttgccatggctgcgaggccacagtgctttgaaatctcctctaggaatgatctatctaccttggagattttcttgttttgaaatcttgcctgatgaatctgcccaatcagagggccctgaccttgacttctgtcctggataccaaggtcacattaggaatagccaaggctgctctacttggggtctccaatgggcgctgaccacactgtttgactggggtttgtttacagttattttcatccccattcctgtccccactcacacagaagaaacttcaaaatggtggcactgtggagaatatgaatatcggccaaaatggagaaaccacaaagctacctgggaaatctctgcaagtgtttctgtgaaatctgaataagccatcagtgcgtgttctgcccgttctttcactatgagtgggcactgcagaggcagggtagctctggctaaagtgctatgcgcttttaacggaaggctatgcaccagctgtcagaagaggaggctgggagtgctccagtggtttacacagcacaggggaagcgcggcagcttcgggacttgatgttgacacactggctcttgtagaagaggctggaagtggtcagccagcatggattctcatgtggcccagtcatgaaccctggatcttgtctgtgtgctgtcacctgtgccccctcccccagacatacatagagatctgtcctctagggttctatgccctaggaatgatgtccacttagattcttaggggacatggtacccattttctggtagagttcagtggcaggtggcaccaggcctgccagtggccagcagcctctcttgggtgtgttggatactgtggctgctggatcgcctggcctcagggtcagctgctttcacttgctagctcttgtcttccttccacaatgtcaggaatctctgtctgttcatcctaccctggctcctcaagggtctctgtctcactagggcctcctgagagaaactgggtgtgtgtgcgcctctctctctttgctttcctgggagatagacatgtcttctttttagataaacagatacagggcatggtggaagtccaccattgtgtggaagttggttttttcagtgtcaccttgtggtcttgttggcaaggtatgtggacacaggaactgtcccctagaatgcctgtgtttcagagaagttcaactttgggcttcagaggacccgttctgggtctgtgcaagtgtaagaggaaagtggcagttacattgctgtggaagagtatgaaggcacagggcttgtgggaaatatgtcccacacacctcggccaggatctactcagcagattttgtgatcttaaggaagctggtgggaaaagccttaggaaacagctcccaccccttgtcgcttcaaatgtgggcaagagcaggtcaagctaccacctctttctgaggaatgggcctctgctcactagataggacagtctgcttgtcagagcttgcaagactcaaccttctggaaggaaaagggaactttccacagtgaatgttaacgtgtgtgtgcatgcgcacttgctcaagcctgtgtgtgtgcatgcgtgtgtttacttggtggaattttatttttgtaaaattcctttccagttatttagtagaattcacctacatctcactgtcaaactttggttccaccattataaccctaggcatagtgaaattggaactcctttgagattcccgaacaggatctggcattctcttgaaagctgagattgtgtaagggcaggcaggagacactgactatataactatttcctagtttacatcctgcaggttaaaaggactcatggcctcggctaggctatgtccctcttggggggagtccagtacccctcctctaggcaccttgtcacctgaatcttcaccccatgaagggaaagcaggcttcttggcttgctctgtagcaccccagcatgttctccttcaagttcttcaagtttcagcttctgtgcacaggctaagtgtatgttgtgtgctttggtgatggtctggggctcctttgaggaggcagctatacctggggtagggtggctttcatttataccagagatccctgaggctgctcgcctgagcctggtcctcttgaagcctgctgtcgacaagcacgttttccaccagctgtacccaacactacaatgcatttttaaaactatatttgcatctaagacaataaaatcttatttttttttggaaaggttgttctgtgtgaccttcaatgctgaccattgagtagtgggaggggtgaagtaatgagatcagaaccaggtgatgtcctggctggctggttc

SEQ ID NO: 30566 - DNA, 1179 bp, Mus musculus
gtagtaggatgatttgtttttcacgagacagggtttctctgtgtcaagtcctggctagcctggaactcatctacctgcctcctgagtgctaggattaaagacatgtgccactgccaccacccagctgagtagagtgttgaacagaccctccactctgaccacatcaagcttccagttaccctcctccctcagagccaagtgctgtgactgtaggcaggaaccaccattcccagcaggcttgacttttttggagtcagtgctatgtaattgtattttgtaccaaactgcagaaaaatgagaacactgaaaacctgagaaggaagagatggtgagcatggaagtgttgttggaggagcagctcacacgtggtgggtagtttccagtagtgctgagaactgacccagccaggagcctccccgggatcctccaccatgactgggaaaaaaatctcttcagaaatattaaactgtgggccgaaactttcagagaaaaatcttaaatcctgtaagatactagaaggactaagtagaaccagactgtagtagttggtttaccctgcaaacgtaggtgctggaaagctcccacctgtctccacttccggaagtacaattcatgagtaaagtttgaaaggagaaacttgggaaagttagatttaaagtagtagcttgggagtgagtcatggagagctgccgaggggtgatagggcctggggccatgtaccataggaagaggggcagagaaaacatggcaggtgtggttgaagcagaaaatgaaataaactccaagcagtggttgtgcacacctttcatctcaacactggagaggcaaaggcaggaggatctctgagttcaaggctagcctggtctacagacctagttctaggacagccagggctacatagaaaaacctgtcttgaaaaaccaaaaaaagaaagaaagaaaaaatacagactaaaggtttgagaagctagtatcgtgcctgagttcaagccacagcacttctgtaaaagctaggcatggtgtcacactcttgtaaatcctaaagagctgaacgcctgggggacaaacccaaggttcacacatgcacaagatacaaagtaaaacataggaacaaggtcaccaggactcataagaaaaaactactaagtaacagcctgtgccagaagaataattctaagac

SEQ ID NO: 30567 - DNA, 2052 bp, Mus musculus
aggactgtggttttctgttgaattggaagccagcattgtccagtgtgtgcactttcctgcaaagcacatttgtgtctccagtctctaccgagttattcttaaggcgagctttgtttccttctgaacaactaagaggttcgaaggggcttcttggcataatgacatttctgctctctgcgttagccatgactgtgcaggtctctgcccagaagggactgatcaagagtgagctgagcgccaggcagcctcttccagctaaccttccaaaggcacttctgagcgtgcatgttggtaactcctggactcaccagggtaggcgctcctgccgggacttctgttttcctccatgtcctccatgggcagttcttctgttctttcaatatcatgaagctctgtctccgtggtaactgccacacacagctctctagccctctagctgtactcaactctgcacaccccctttccctgaaaatactcaggtggtcagtgcacttcggtcagtgtcagtcacaagagacaagcagcaccagtgctcagggagtggagcacggccggaagcagagcaggcatggcctcctgatcatctcagcatctgaaggagctaagagcaccaagtgggggaccacgttgatggctttcctgtcatcactcaagactccagaaaagctagcctgtctcagccggtcctggtccttgcccaggtgcagtttctatggttaatattttcttcttgtttttctcatgtagaatcaggagcaatacactgcacattataagtaaccagagttgggtatttaaaagaaaaaaacctaggaatgtaggatggcaaagatgatatttgcttctcgtggcgttaattcagtattgggagagtcaggcggtgtggggggcattcccaaatgggaaatcattcttaacttagaagactctttttcagattcttgttactccagggagactagttttacctttgagccccagcaatgggtagtttcagctgccaggggctgcaatccaccttgtcctcagtgttttccactctagggattcaggacaagtctgtccacgtctccttggcgtgggtgtttgtccagtgaacagacactcagttctaatctcatgtgtctgcatttgtttctgagtctatatttgctttctcagagcatagcaaggtcaactcctaaaaatgtacccagcagaagacctttttgaaaaaccacacacttgcttcctctgtattcacacacaaagtggtggtatcatacattatgccctgtgatgtaagtccccttagtgctcaaagctgcctttgtctcttaagagcgtgcactgagaaaggctgtgggaacggaaggcttattctcagacagggtggtttgtttaccccatgtctggacttgtcctgagtctgaggaccactctgctgcactgcccgtcctgattaaagacgtctctgtagatgctattttctgtctcaatttacacattctttcatcaccttaaatctaagaactgggtactctaatggattgatagagaccaagagagacgtggtcaagggaagattaaatcgggacatgtgtggagaaccaggaaggcctccatgtgagctctgttccactcgagctctgcttgcactagaggtgggttgtgattatcagggcgtgctggtctgctctgttctccgttgtacatagaaggtagctacaaggacacagtggcatgtctttaccgccaccaccaggagctaaggcagaaagattgagaactcaaggccagctgggctaaacagtgagaccttgtacaaaaaaagctatgggggagagggatttgtttagctgtgtagtctgctgcttagcatgctcacagccctaagcttactcctcagcaacacagagagaaaaagaaagaggccctgccggcctgaccctaggaggaagtgtttgttttctgcagacttgaattccagcaaaaatacatctgttgtcgagtcagggtcttcctgtgtagcccagactggcctggagttaagtcctgcttcaaactagtaat

SEQ ID NO: 30568 - DNA, 1176 bp, Mus musculus
gcttgaaatgctgtgtagaccaggctggccttgaacatacagctttccttgcctctcctcctgagttctgagattaaagatacatgccaccagaactggtctacaaaagagaaccattttgactttttctgtttcatgtttttcatctttatcttttgcctgtctcaagtgggaggtcatgtagctcgggatggcccaggactcctgtcccagccaccattttgacttgtaaatggatggtgattgtaaaacagttgatgatggaggtggtggtccacagaagccggctttgtctccacaggagtgctacctggaaggcgaccagaccagcctgtaccacgcagccaaggggctgatgaccctgcaggcgctgtatggaactatcccccagatctttgggaaaggagagtgtgctcgggtaagaaccctgtcttctggctttatccaaaataggggtcaaagggtgaccttgggagacacagccaatccctttacttcatgtgcacgcaggctgcgaccccgttacccctgcttctgtctttgagggtttcatctcctccctgcagttcacaggtcactcaccacatggtcggtactcacagggcttgggaacatgcccatcgagagatgttcccagaggtgaccgaggtcacaagtgtctctttcacagtctgcttagagacaggctgttcatatctgtgtacttgtttggtggctttgccttttaaatgtattctgatcatggtgtagatgtgtaatgtgacttatgtaagtttcatcggggccagagtcacagagctcttagctgtgagtcctgtgtgaatgaatggttttttgagacatagtttccctgtatagccctagctatcctggaacttctttcatataccagaatggtctcaaacttagagatttgccgcctctgcctcttgagtgctgggatcaaaggtgtgcgccaccacagcccagctttcagtaaaacaaaacacaaggtttagtattgatctgtggacaaaagctgtggccaggggctggagagatggctcagtgattaagaacacttcctgctcttccagagaacccaagttcagttctcagctacaaccacctgtaattccagactcgggcatatgatgccctcttaaaaccaagttggtcactgcactcatatgcaca

SEQ ID NO: 30569 - DNA, 1179 bp, Mus musculus
ggaattgcaagaatagaagcatgtctaacacatctgtacagagtgcatcctttcattctcacccacctatcaaaggcttgccatgtgcttgctatgtatcaaatatacttcatgctatgtagtatgggacacagatgttttagccatgcctgtgatcccagagcctgggaggttgaggcagggcagaccctataaattttaagtgagcctgggccacagagtgagagccctgtgtgaggaaagtatggggcaggagagaaggcgtggaagttaagaggacaggctgctctttcagaggacacaggacgactcaggaccatatctgtaactccagttctctctcacagagctgacggcttcttctgccctccctgggcaccaggcatgcatgtgttgtactgacatccatgtaggcacagacactcacacacatgaaaatgataataaatctttaggaaaagaaagatgccaaaatgcaaatagaaattcctcatctttcctcctctttattttacatagtgaggaacttcaagatgcactgggtgtgacagacaagagtcttccccctttcatctaccggatgcgccagctgggctacccaccgggctggctcaaggaggctgaactggagaattctggacttgcactctatgatggaaacggtatagtctgtcaggacagagacgtcagcctccaggtccctgtcttccccctcccgtcgtctttgtgtcgtgcccccctgcacccccagctaattaagatgattagccaggcctttaagccagtgttcaggagggagaagcaggctgatctcagtttgaagccagctcggtctctaatgacagggatggctggcctgtttaatgtgttttggggtaactaaaatcatgatgactttttgtgttttaaaaggaaggaactaaagcttcattgaacatatggaattatcaggtattttagctggatagggtggtacacatttggtatcccagcactcagtaggctgaggtaggagggttgatagtttgaggccagcctgcctaagctatatagcaagaccctatctttagaaaaaagaatagaagaaatagtatcaggtaggggatagggaagcagctcggtgggtgaaggtggtttttatgcaacggggcagcgagaaggacagaagtgtctcaagag

SEQ ID NO: 30570 - DNA, 1244 bp, Mus musculus
catgtggttgctgggatttgaactcaggacttcggaagagcagtcggagctcttaacctctgtgctatctctccagcccaaggctttgtactttattagtcactttgaaacaagaacaacagtaacgaaagtcaaaattgaggcaagagtagatgaaaatggggtcgtcatttaaatgtagttctgccctttcatgaagccatgactttacagttgaaacagggtcctgcatgagatgaaataaaacccttagacatctccctttccctttcaggtgcaaagtcatttcagctgatcgacaacctgctttttgtgctggatactgatgtacgtttctgagactgctttagtggttcatttactactacctttttttttttcttttgttctttgagcctttgtgctatgaagtcagctcccagtctcccactgagctacgccttccacctgataatacatttaggtggtagacaaggacgttagctgggtgcgtgactatctgtgtgctgtgcttcgtctcagcgtgcaccaagaaacgaagcctgacgtttgccttctaaatcatagatgtctaaatgggtgtctttcctgtagaatgtgctgagcttgtgggatgcttacactctcactcctgtgtggaactggccctctcttcccgtagagcagtttgttctcacgacagaagcggattctccctcatctgttacctggtatgttgggggtctagttagtagtgatttccatagccccaagtgtctgtctgggttggttcagatcatttactacgtcttgtgttcgaaaccacatctgagtctgtctggcagaggaaggaccgattctttatttgccagtttctatttggcacaaatagatactataatgtgagcgtctatggaatgatggtagaaacagaatctgtgatgtgtacatgtgaaacagagtccacggtcttctctgaatgtgttttgacctttctgtgagaatatcactttatttaagttcatacttagaaacatgcatggtgggctggagagatggctcagtggttaagagcactgactgctcttctgaaggtcctgagttcaaatagcagctacatggtggctcacaaccatccataacgagatctgactccctcttctggagtgtctgaagacagctacagtgtacttacattgaataagtgaataaatctttttttttttttttttttggtttttttttttattttgttttgttttgtt

SEQ ID NO: 30571 - DNA, 1281 bp, Mus musculus
gctaatacggatgcctaccacgtcagactctacatcttgcaaagtttaacatcagaggggcatttcttcaagtagtggacattccatttgtgacgcagttagctttatggcacatagacgttcataatttgagccatggatgttcatgtgtacttgacaggtcaaactatgaaggacccaatgtcaaatccaactttctccatgtatgccttaggttgaatttgtttccaagttaataacttttacgggcttagacattcacactcatctctgttttattttatgcttagtcatatttaaatccagaatttaatagtctactagacagataaatgagatgcatgaatataaaaatatataaaggaaaggagatggcaaactatttataactttattatattactaacatttcaaagtttattagttgcttataaattgtatagttaaaaaaatgtctgttctctattaatcagaagattgcaacatatcacaggttggctaatgttactggagttttcaacacagttgctattgtggaaggttttctgcattaattaaaaagttggtaaaacctggcttttacctcagcgtgtcagatgtagagaacacgtgctctcagtgtgtgagtggcagtggctgtgcactcgcattcgtgacagctgcgcattcgtgacagctgcgcattcgtgacagctgctcagcctgaacagctgtgcaatgcggtgagctccagtcatggttcattctttcttcagagctttagtagtttggaagtttgactgactggcacattctatcattgtcagaacttaaataattcagttaaaaatttttaaaacatgatttgaggccgggtggtggtgcacgcctttaatcccagcacttgggaggcagaggcaggccaatttctgagttcgaggccagcctggtctacagagtgagttccaggacaaccagggctacacagagaaaccctgtctcaaaaaaaaaaaacaaaaaacaaaacatgatttgatatttagggcttttcttttttaaaaaatgagaagcaagtaaggaattgtaaagatttgggacttctttgtggcattgtgacaataaataagccaatgtgaaaggaaaaaaacaaaacaaaacaaaaagatacaattgaacagcagatgaagttttatcttaatttctatgaagactcggctgggtctcttgagtatgtgttagtaatgaacatataagtataaggcagagataaagcgaagcattacactaagttccactcccgct

SEQ ID NO: 30572 - DNA, 1229 bp, Mus musculus
gtgtgtcagaagctctgtcagatgttggctgacgatgtcccaatggtggccccaggaggactcagccttccttctgagatccatgacctcgcatgccacgctgtcaccatctgcagtccaggtgacaggacagacaaacctctcatgttctctggtccattgtatcgctgtgttccaccgctatctcttgataactgcgttccggaaaccacacgagagacagctctccttacgctaggcattataattaacaactgagtgtggttgcctcctcaaatgcttgcagttaggtggctgagagccaggaggatcatcgaccctgggctagcctagactacatagccagaccttgtcagtcaggaagtccattaacaatgtcattccttatattgatggcatttgcttctgtgtgatcctggtgtccatgacatgtgatcatgtgatcccacatgaatctttttcaaggcatgcttaagcacagacaggaactgtgtttccaatagtcaaagctatgtggtgaatctaagtggttgttaaagcagtctgacgacactttccactttcagattatttgctggatgttttagaactaagtaaatacactttaaccgctgtggagctttgcagacaatgccagatggatgactgtggaatgctgatgaaggtaagccacctctgagttctatttccataaacagcacagctgctggcccagtgtctggccctgcagatcacttgcacagttcatagaaatgcggaattcatcacttgccttggtagccagcatttgcttctttgtgggtagcactgcttttccatttcaatcctctaggagaagccgggtttggtggcgcacgcctttaatcccagcactcgggagacagaggcaggcaggatttctgagttcaaggctagcctggtctacaaagtgagttccaggacagccagggctacacagagaaaccctgtcttgaaaaaccaaacaaacaaacaatcctctaggagctaacaaaaggatagaggagaaagggggtgatatcatcatgagactacttaacaaaccgagagaccaacagcaaacaacaacccaatgcatctctctgggccctagcagtcattctaccctctgaaagttaccagaagtccaaatgttacacagttgaagaaactatctgccagtgtcaaaatcacacccctcctagagcaggaggcaaatcatagtcagctgc

SEQ ID NO: 30573 - DNA, 1196 bp, Mus musculus
tctgttaagagtttaatcaaagtaatattttataagtcaccatccagaacagaatgttagaataccgttttcccttagtactcacagaattggttccaggctgcctctcccctcagagataccagtatctctgggtgctagaatccttttgtatccaaaactaacatttacacgtaacccacgtacatttctcacacttccaacagctccagcttttactgaataagtttgatccaacattggtcaggtctgtagccatagactgaggattcagagttgtgtgtaaacatcgaaagtgttgggctcttgtgctggctcagtggtttagagcatttgccactcttcaggcactgaactacatgatgcagctgcaagggtctgtaactcctgctccagggcatccaacacttctctctcccaggtacatatacaggcctacgtataattaattaataaaaacattttttgttttttcaagctgttgggctctcaacctgacccctgactcagcttgggtaaggtggtatgtgctacagtgcacctaacactgtcttttccatacgtttgccgttaggccgctcttggaactcacaaggatccctatgaagagtggtcctttagtgacttcttcagtgaagatggaattgttctcgagtcccaggtggtgctgcctgtcatctatgaattgatctcatcagtgatgccccctgcaggtagatcacacttggttcattattttctacatgtttttactctatgcacgctggagctctagaggctgagaaccagaactgcatcccataaggtccgtttatacacttaaggacccaagtgcaaaggaacacctgcggcatattatttcatttaggcaagggaaaacccagctctcaattaagtcatggtatttgatgtcagggcaggggttgcccctagggatggtgggtaagatgcttttctgttgctgtagtaagatagcatgacaaaaagcaacttatggaagaaaggggttgctttggcttacagttccagagggtaaagcgtctaccatggtagtagaacaaggaagccaagagctcacatgttccaaagcaacagtgaagcaccgagaacaaactggaaacggtgctttaacatccaaagcctgcctccatagctagccccctccagcaaggctacctgctgacactccccaaaca

SEQ ID NO: 30574 - DNA, 1212 bp, Mus musculus
aactattttgaagaatttgtatggaactgcccaagtcttatcctatgagcaagatggcaccttgattcctcttaatgtgatatctgcagtgttcatagatcatgctttaggagacagcaatagattagggaaaactcgaaatggattttgttttgactgtgtgtgtgtatgtgtgtgtgtgtgtgtgtgtgtgcgtgtgtgtgttttcaggcacacgcacgtgccaccacgtacatgtggaggtcagagttggttttctccttccaccatgtggttccctgtgttggaactccggttggcagcagacatggtggcaggtgccactgaccctagcagagactgtgaagattgggaaatgcatgcggtgcagatgttgcagacacagcggcccttataggtctcttgctcctttccacacaggcgctgaatcttctgagacacttgaagtcatacagaaggatctccccgccagtggaccacgaataccagtacgcgctggagcacatgatcactctgccaccggctgctcacactagactgccctttcacctaatactgtttggcacagcacagaacttctggaaaattctctgtacgttcattaacttgtgatgagtttcgctaagtggccgacgaattcttttctcactggcatgcccttctgcttccccctccagcctcagagctcagcgaagagtcgctgccaaccctgctcttaatcgcgaagctgatgaaggtaatgggtagagcatcccgagagggctctttgtatctcagtcaagcctcagcctggaccggggatctgacaccacttcctgcctcactgtctctctcctcttttctgaagttctccctagatactctctatgtgtctaccgccaaacacttgtttgaaaaaaacctgaagccaaagctcctgaagtcggcacaagccaggtcctccaccctgatgagcaaggaagtggataagctcatgcagacgctggagtcgtacctcctgtccatcgtcaaccccgagtgggctgtcgccattgccatcagcctcacccaggaagtcccagaaggtctgccagccctctgctctcgggactcgggtgctcgctgacagctttctttgggttctattccctttttgcagatagatctggggaatctctctggggtcttgtacatgctaggcaaccgttctgccctgtatgttgtttctcactg

SEQ ID NO: 30575 - DNA, 1148 bp, Mus musculus
catggttgcttagcatctgtctcatcacccccgcccttcagcccggtacccagcaaggagaagaaagcccacagttgcatgtgattcgtgtttaagggtataaataaagtggggcaggcctgcagtcactaaagatggagtctgtctccctagagagttttacagtcaggcttcctttccgtttcgaacgctgttacaggatgagacgtgtgaaaaggccaaagccttgcagaagaagctctgcctccaggtccggctctcaggaacggaagccgtgctcatagcccacaagctgaacgatcaggaatatttaagagtgatagggaagccagcgcacctcatcgtgagcctctacgaacatcccagcataagcgaaaggctttgtaccacatctggcaaagattatcccggtgaggaagagacagtagtgtctggtccagaaaaggtgctgtcttgattcccagttgtcttcagccaaaagcttgagtttccctgttgtacttttttatcttcattgtcttagatatccatacagccgctaaagaaatagccgaagtcaatgaagttaatttggaaaaaatctgggacatgttgttggagaaatggctgtgcccctcaacggtgcccagtgaggtgagtgagcaagcaagcaagccagcactcacagcccgggttcctgctgagataggagctgagtgtgttctacacaagacaaccctgcaaagaaggacagactaacctcccttcctccctcccagacagcagctctctgtgtccctcagacagcttgcatagttatcctagtatctcggcctgtccagtgccgagagccaagtgccgagagcatagcctgccctgcacacctgactcaggctctaagatcacctgttacctggcgactgttaatcaatgagactgttagttaatgaggcagtttgtccttcctttctgttactctgtggctattgtaccctccagcccctgacttcagacgcattctcatataagactttttacttggattcatgtggttaactttttactttgagttaatttaaaatgaaacagtgcgggaatattcctgtacacctccgttagttattaatctccctccatatttactttattctctctaactttttactcat

SEQ ID NO: 30576 - DNA, 1101 bp, Mus musculus
gaatttctgaattcgaggccagcctggtctacgaagtgagttccaggacagccagggctacacagagaaaccctgccccaaaaaaccaaaaaaacaaaacaaaacaaaaaacccaatcattgggcctttgagatggctcagcaggtacatgattgttttacagtcttgagttgaaacgcatgacccacattgtagaagtaacaaaccaactcctgaaagtgggccatggcacagctacctgtatatatacatactaaacagagatcaagcagggcatggtgcctgagacctgcagaaaggaaagttgttgcaagattgaggtcagcttgggctacagagtaaaaccctatcttaaaaaaaaaaaagcagagcatacctttagtaccagcacccaagaggcagaggcaggcagatctctaatttgaggccttgctgtctgtctgtctgtctgtctgtctatctatctatctatctacctatctacctatctacctacctacctatgattttatgtgtatgaatgggtgtttgcttatgtgtctgtccatgtaccacttgagtgtctggcaatcacagagccagaaggcattgaatcctttgtctggccaagaactcagtgtactctcggctggcctctgcttcccaactgctggtgttaaaggtgtaaacaaccaccctctgctagatttcagggggggggaaaggtcatgtagcccaggttgtccttgaacttgctgtctagatgatgatgatgatgacagtgaccttgaacttctgatcatcttattctgcctgctaagtgctggcttcagttgtgtgccaccgtttccagtttatgaagtattaagggtcaatcaagcccagggtttcttgggttagagaaacaataaacagatatacagtcctaaaccttatgtatgtcacctctaaggtgacttttgaaagggtgtatgtgtgactgtagagctcaggacagccgttgatagttaattttcccagtgttgaggagtgcagtaattgaactcaggtaatcaggcttagactgactgcaagtgtctgtgcctgccagtagttctgttccccgtccctcgcctttttgag

SEQ ID NO: 30577 - DNA, 1216 bp, Mus musculus
gtgtgcagggcaggccagcccagtaacctcccactcctgccatgctgggtgctctcatggttcaaagccacaggcagagtttgcacttggctgctgtgaggtgtgcagaggccaggcgaactgtggcccggggtgcgaggccagtgtgagccctcagccctccccacacacctcaagccgcgtcacggtttctgtgaagaagaaaaaaagatactcaatgtttttactacacttgtaattttcctgttttatatttcaaaagaaaacttttttgacactctcaagaccattcagggaaactttttttaaaatgcagatactgttttgagctggtttaaaaaatgcagatttattgagtgccgcttcctgtcgggcaagcagtgcacggtcacatctgccagtgcccgtgctgtgccttagcttcactggtgccaggactcggagcccgcggcgtgccagccgcagctgccctatggagccgaagaccagctaggtagggcctggcgggcctcgtcactttgtgatgggtcaggagtggtccatcttcctccaccccggataatctcaggagcaatgctgcaggtgctggcgtaggcatgggaggggtttggggacagcccgccccacagggttggcagtggccgctccctcctctctgggatgtcatctgcaggtgccacatgtgcagagttcccagggcccggctggggaggggcagccccacacctgttcccagaagagggctgcgagcctgttggtagaacttagaaccccaccttcaccctgccagctggctacagcccaaggtaacacagtcaaggcagcgctgattagtgagcctgccccagctgggccaccggcagggccatcagcctttgtccccaagttggactgttttcctctccatggatttggactctgtaccctactggaaccactctgtaaagagacaaagctgtatgtgccacttcagtacctctgccaccaggaacgcccactgccagtctcgggccgcagccacatgggagctccgggtggatgcagtaaaggggccgccaggctgaccttgccaggccatagctggcactggggctgtaaagctgtagaactcttaataaattgagaattattaatttcagtttgctgtgtttctctcattgaccctgcactgctttaactgggcatgtctgtgaccacaggtgactgtgcccgctgt

SEQ ID NO: 30578 - DNA, 1180 bp, Mus musculus
agtgagtcaaatagtctgactccagcctcaccatcctccccctggaaacctagaggttggtttgtttgtttggttttctttttgagacagggtttctctgtgtagccctggctgtcctggaactcactctgtagaccagactggcttcaaactcaaagattcacctggttctgcctcccgagtgctgggattaaagggcgtgcttccttacctggcttaaaactggagcttgttagaggaagaaaaaggcaaataaatgtagcaggactcttgattttatttatttatttatttacttatttattttgagtcaaaatgtccttctaccatggatggaaatggggaggactgaccgcacctgagaagactacatagtgaagttactcagcagtagagtgtgtcgagctttaaaaacggggaagctactggaaaaccaaaatatctggtttgcacacccggtgtcctagttaggagcggtgttttccaaagggatgggtgggactccgacattgggtttttactttattttttcggttgtgaaagtttccctcccctggcccgttgtgtcacgcatttgtttattttgggttggtgtcaagagagaaagaggagtctgtgaaccatcctgaactatccactccttatgtgaaagtgttacggagctttgctttggggctttggaatgataggctgcggtggagggtggagtggacttggctgctgtcgttgctgtgtaactgtaggcagcttacagcacctctctgaacagctcttgggaagggcaggatgatgcttcgtagagatgacaagggtcggatgagatggtgacttttaaacaccgaacacagtttatggttagtgttcagtaaagagtaattgctggagctgggcggtagctctgttggcaaggtgcctactggagaagcaggaagacctgagttcaacccccagagcccacataaaaagccaggaatggtgccacacagctgtcatccgtttgtctcccccaggacagggagataggaggctccgtaaggcacactggtcagccagcctagcctagcgggggagctgcagagaccctgtcccagaaaacaaggtggactggacctggtcctgcatgctcgctctgatatgcatgttgcgttgtgtgtacccctgtgtatgactgatgagctgg

SEQ ID NO: 30579 - DNA, 1132 bp, Mus musculus
ttgcgcaagggcagcttcggcctacctggccagagtgacttccttcgctctcggaatcacctgctccgcaccatctcggcccagcccagtgggcccagccatcggcacgatcggacacagacccagatggacagcgagcagcggggccagcgcagcatgagcgtggcagccagctgctggggccgagccatggcaggccggcttgaaccaggggcagccacgggacccaagtaggacactctcaggaggcgctgtggtctccatggtgctaggccagggcaccggccctcctgggaggcctggcctgggcacacacgtcagtggctggggacatgcacagacatggcctgagagcgacccagggccccttggaagacatggccatgccaacacagccctcccagccttgcctgatgccctaggctctaaggagcccagctggttatgggatctggcaggatgtccagcccatgatggaagaggagccaggatcggccgcctagcccagcctgggaggcattcctgggcatcttgctccgtgttgatctctcagcctcctggtgccaggcgtgggtctgggccctgcctgccacctctctgtccactggcgccccttcccatttggtagcggctccaatgggtccagtccacttcttgttgactccagttctcaactgtccaacctcactggttttgcactagtttttgagagtggagacccgttaccatctcctggctccagacatgttgacatgcatgaaaatccagtctctgctgacccaggccagggcctgtcaccacacagagtagtccagtgtgggaaatcttcacgcaagcaggagagaaaggccatatcgtaatttctgctgcctgcccggtctgttgacaccacggcagcccagtggcagtcccagactgctacccacccgtccacctgccccacccagagctcagtgcagtcccggaactgatgtcactccgggctgtgagcacagcacaggtgtgaggccagccacgtgcacagctggctcttggtagcccaccttgggcagctggacctggagaagcctggcctccaccgacgctcccgcctgctcaggggcgggcgggggggggggtccccatgtcatgg

SEQ ID NO: 30580 - DNA, 1288 bp, Mus musculus
tctgcttctcttgcaggcatcattcatgcccggagcctggttcgggagtgcttggctgaaacggaacggaatgccaggtcctagcccctggctggtctgaaggcccatctcactaccccgtggagatgagaggctttgtgcaaaatggcagtcatttttctaccacagtcattaagctctgaacccacactcaaaagattgggaggacattttgcagtaactgacgatgtgcattttaagtagttaggaatgacccagctctttttttctttccaaacatttgaaagatgtttgtgaagccacttcacagcaagctattgtttgtccccaaataccagtgtcccctctaacctgcctttggatacgcatcaccccagctgacttcctttccctgagctcacctgcctccgaggagttgagtgcaaaccacagcgcctttgctcagtagctggcccgcctgtgtacagtgtagaccctgcttcatggagcttctctgcctaagcgtttgcatgactgagtgcttggaagtcaatctttaaaatgcacaggttacacatgcagaagaaagagccatctacccaacctcccaagcaccctgcagatgtccatcctgaggctgtagatctcagttctgtgtttactgtgagcccatcacaacatctggaagaaagcgactgaaactgttgcatctttgtatttattacttgatgtaataaagcttattttcattaacattttgtattacgatgtggaatctttgaggtcttaagtgcttgtttttctttggggaaggacagagtcttgctatagtgactctggctttgaactcacaatctgtcttggtttcctgattgttgtggtcaccactggagctcctgagggagacatgtgagggacatgtctgctatctggcccagaggcacctatgtgatactactagttggtgaaccacagctgctccctgccatcacaggtaggtgatactccaagaatttccttttgctgggtattgtggcttactcccagaacttgggagacagaggcagggaagctcacatccttggtgccataccaggactatgtagtgaggcattgcctttaaaaatttttttttgccaggcagtggtgcccgtgtcacacctttaatcccagcacttgggaggcagaggcaggtggatttctgagtttgaggccagcctggtcctacagagtgagttccaggacagccagggctacacagagaaacttgaaaaacccaaaaaaccatatatatgtatttcatactgtg

SEQ ID NO: 30581 - DNA, 3303 bp, Mus musculus
ccagacatttggctgtgagcagaccaccccaagtagtctgatgccccaacagatgccaagtagtggggaccaggagggataaggcctttgggaggagttgggggtagaagttggttatggtcgctgtgtgttaaaaatcccacccgcgttggcacttccaagttggaggtcttgtgtccaaatgttgattccagaactccagaaaccctcagagggacctggaaaagctctggacgtgtgttttaaaccacttctctgctctttggggtttggaaaaggttgagatttagggtgccagcctgggagagttgaaacgctagcacgtgggcacaaagaccccccccccccaagagcatgcagtcactgtatcttttcaaatggtttcactccctttgggtgacaggatttgtcgtcagatatgatttttgcctctcagtcttcttggtcagtgtttgggatggaagggcagtaggttgcgttgccagccctagggagaccagagacgtaggcttgatctgggctagtttcccgtgtgtcttacactggggaccttttggggtgtgggtcccagtgcagaccgcccctgggactctgaagccctgttctgggcttgctagcacctgtattcagctgtagttattttgccaatggggaatgccaggatgcgtgcgggggtctccaggtgttcggcattttggtgggggcccgcccgcttgccggtattactttgcagaaagcccttctctcccctgccatctgcatccaagatggactctcacagtggctcctccgccttccctgtcatcatctctcacgccctccaggcctgcctcctgctcactgagttgccaagctgcggcctggccggcagtggcagtggcggagttagacaaagcccccgccttcccccgcccgagagccccccccccccagggcgccccaagtggcgggaaggccgccagctccccaggcccaggccgctctttgtctggcatgggggcggggagctgagcctggccccaggagcttcctggcctctgccaagccctctcagctctctcacactgcgctcattgtctgagatgctccacaccggctgagctgacgtggaaccgcctccctggcctccttcagcccaggtgccggtgtcttccggaagaagggggcatgatgggcggaggagcccccttccaccctgaatccctcccggggggtgggggagacagacaccttccctaatactgcatatggtgctggctttgacgcaaagtcaggtttatctccactcctccggggtggtggaaaataggcttgaggtcctccaccagtatggggggtacttctcattctttctgtatccccactcctctaagggcattcccaaagcctttaacccttccattgggaaatatggcctcaaacaagtagagaaactgaggcctggaagagccttggctggtcctacagccaagtggcactgctgggacagacccccaagtcctggagaaaagatgtgacagggaggcgagaattagtgagaagccaggggagcacagatggtgtccctggggagtcaaggaaggtcaggctactatctccatggggccggaatcacccaaaggcttccagtgctctgtcatggcactctgtcccttcagcccctatcccctaccctatccgagcccaggaagggcttggcaacctgtaatgggaagggttaaaacccacctccaggcctctgaaggagccatctctgatggggtgccaaatgggttttggcacagtggtgaagctagggttgctcaagttgggtggcaggtccttagtctgctctgctcaggagccacatgcataccgggtgcctaagcctgggcacactctgcctttcagtgccatgtccacccttggacagagagaggggctggggttgccagtttgctgctgagccacttctgtgcagtgtggctcaccctgcagccaggcccgaggattcacggctcctcccagctccagccagcccagctcctgaacttacttcctcctgcccctcccctcgcccacaccaagtgagcagctggtgacttggccagcctggtaccagctgtccatccctggggccaagtctgcagagccgctgtgtgtgtgagagacagtttggctctgggggcggtggtcaggcagctgccgaggaagactaggtaaattctccatggttactgctgtttgtaattcgaaggacatcctctacccgcctaatggccacttggttgccattatgggtctgcatgctgcagccaggggcctcctcattgcatatctccgatgtgacattctgcgctgggctctgggccctggctttgttctgactgctgcacctggatggtgtcctcaagtgctacagtccatctgtggggtcttaagccccacttcttggagtgtagagccgctgagtgtgtgtgtgtgtgtgtgtgtgtgtgtgtgtgtgtgtgtgtgtgtgtgtttgtgtgtgtgtgtaggcaagacttctttctttggaggggatgagaagccctgagaggctgagaggcttgtctaaggcacagagactgttcctggctttgtgggggcagcacgtgtttctcttaaggttctgtgcctttgtggggtttccttgatgtattttttttccagcagaggtgggtgcataggagtgcatgggtggctctgcgtaagaaattctagcctaggttagaccaaccttggtagttgccagtcacagatgtagccttgcttctcagcctcaagtgagtaggagctgggatggtgccagcaagaattagtctggacacagctatcagtttcacttctggtagtggtctctcttgggagttctgtgggtgggctagggtgagctgtcttttgaggtactaggtgtgtgtggagtggctgctctttctgcccttgtttgcattcatctagattagtggtgtctgggccatttccattagaggttgtgctgaggtctctgctgtaaaacaaaagttcacaggtgggacctgcgcgtgtgtgtgtgtgtgtgtgtgtgtgtgtgtgtgtaacagtgaggaccttttgtagtacccagtacactttggtacagatatccaagtctggggcacctctaacttctccctctttcttgctgcaggaagtgtccactcaccctctactagcatggcgacctcctcccaatatcgccagctgctgagtgactatgggcctccatcgctaggctacacccaggtatgctagtgccagtgacgggagggccaaatgggcagctgg

SEQ ID NO: 30582 - DNA, 2339 bp, Mus musculus
cctgttcatttggggttttttgctccccctattcctttccctcctatttattctttttagactcctacctggggcatcttagtactttttttttttttttttaatttaggaaactgtggaaaagttcttagctgagtaaatagttttgtgtttaagatttcttctttgcctcacagctgtgggggtcttgttacccacatcgccaacacacactgctgtgctgtcatggggtgcatctaagcaccaccccttatcctgtcaccaggtgacttgttatgctcatttttgttctctggaagctatagtgagcctgatggctttcatatttgaaaaaagaagaaagaaaagaaaatgtctccctgaacttccttaagctcctctagcatcttcagtcagtcagatgcagctcctcagaagcctgactcattcttgctttcagttgaggctgctccagtccctcagctcctgctgtttgccggatgggaaacccttgcaggtagacagtagctcatagcctggctgcacgttacagtgtgtataaggagttggatatctctgaccccacaggtgacagtcagagatttactttacaacaaacgtccgtaatctgttttctatactgctggtcaaaaatatttataggaggacaagagatgagcttatagtacctgacaggagacagttgtcatccaagtgatgacaagagtcctactgtggaagctaccacgagcacacaaggcaggttcagttttgggggctcatttctggctggataagctataagcagagatgctgagctctggagaattggtgttggtgcctaccctcacccaggacacaggagtggagtttattcacaggccattacaccctcaaaaaaatgtcctctgtaattctcaggaaagatttcaattaacattcagattggtagatctgatgacatgttgaaaattgtctacatttggctgtctttgtaagttagtagtcaagaatgagggtctgtcaccgattgttccctcagaaatttcctcctcacaccaacttccttcctctggtccctgagatataggtgacctgtggcctgcaacagcagccaactatgtactatctagggagatgtgacagagcacagttaggccaggaaatctacagcaaacagttaattatgatgtacacccatttcatgcagagcaagaggagatggaatggaggctgctttttgcactggaggctccctcaggactgagtcagcatgccagtctcctggggagagttagtgtggcctttctgattctggcctcttaacccagaccccactcaggcgtctagtaggagcttgctgctgttgcagtgactggggcactgaagaggtaaagaagcttgaaccattcctggctccactttgtgggactgaggggccttttccttttcttctttaacatagcacagtacagcctcgccactaaactagtcaccctgttcatagtttttactgaatttgcaaactactcttacttcctctcataaccacctttatcatcaaccacgaggggtgggagaggtgcaccgtgtctctgcaataaacttgtgccgggttctacctccttgtgcaaagggtattttatacacgggctctgggcttccttcttgatctgacatggtgcatctggagacatctgaaggagtccaaataccttttgaagcaaagtcagatgtaaagtctggggggcttctgtcttcagttcccttttgtactgctgcgctgcataggactgtccatctgaatgaagagtgcacgctgttcccccgatgccacgttgctgccttcagcctctcccaggaacctgctcccaagtgtccagaatgcagtgctgccatcattttgatatgtaactttcaaatccagtctcatgcaatacaagtgtgtcagcttcactgagcagggttcatttgcccacaagtagaaatgctcgatcctcacatggaaagtactctatgtatttaggtttttgttgtggttttgttttttcatttttgtttggattttgtttctgtttttgtaaagttcttaaataaaattaaacaaatgcactttgagttgtggtgttgtggtttggatttgaaacatctgctgccctgtgtcattaacctcactcaccttaaggttccttggcaagggttgacgttgctatgttggcactttgtttaaaatgggctctctagatggctggataggtgtaggctggtgatgggtacttgccttagattgtgctcagaaagcactgtgggatgggtgggtgtctcccacagattgacctctgcacatgtagtaaactcaa

SEQ ID NO: 30583 - DNA, 9524 bp, Mus musculus
aaaaaatttttttttctttaacctttgaggtttctctgctatggtttcatgtacaaaggacagaagtattcagtgaacacttgggattattctgacagtttctaaagtctctgtggatgagaagggagttacaaagtcatatgttgccagaagctgttggcagttgatggctgcaggaaagaggctcatctgataagttgtgcccactccagtagatagtcccacgctcatacacattagattagtgcaaggcatggagttgggaaggggaatgttttaaattggctctgggggtctagtggaagatggggtgatgatagtaaaatgcacattcatacatatgtgaaattctcagtctcagccaggccaatggcagtggtcagccctgagtcatacatacaagtgacatgtaagactgtgtgtgtgtgagcacgatgtacaaaatagaagccctgaatttgagagaagttggaggcctgcagagagagacaaaggaaatgaaagggagaaaggatatattaaaaaaaaaatctatactgggtggtggctcacacctttagttccagtacttgagagacagaggcatgcaatctttaaattcaaggctagccaggaccacaaggagaaaaagttctgtaaacaaataaatggatatacaagaagacttgtgtggatacaagcataggagctcacattgtaggttgaggtaggaataccctgagttcaaagctaccatgagatagatagatagatagatagataggtaggtaggtaggtaggtaggtaggtagataagatcgatcgattgatatagatatagatatagggaggtccagcctaggtgggaggtctcaaaaaaaaaataaagcaagagcaaacacttttatgactcttagtttagtcagagttaacagagtagcctcccctcacattaaagcctggacttgcggttatatacttacatacctagctggtatatcttttgtactgaatttgctgctgtggtattatgatagagtatttttaattatgtaggatcaaattcttatgttttctgttcttttaatagataagaaacaacaaaaaaactgcaatcttagttaaagaagtaaaccctaagaagaaactatttttaatttaccgaccaaacactgggaagcaactcaaattagaaatttatgctgacctgaaaaagaaatataagaaggtattttctcacttatgtactatgtcaatgcttgcttcatgataggaagctgtgtcttcaaagttcctgggctcaagggtgatgatttcttgtataatagcaagggtttttttttgttttgttttgtttttaagatttatttattgcatttatgagtacactgtagctgtcttcagacacaccagaaaagggcattagatcccattgcagatgggtgttgggatttgaagtcaggacctctgtaagagcaaggagccctcaacctctgagccatatctaaccctagcaagtttttttatacactgctgttgcagttttaaggttactgcccattgatacacgatacgcatgtgatcttcaatacccaagacctgcaacagtttagttaggcaccgtcagtccttccaaccagcttttgatttgccatgagtatgctgcatattttcatccagaaaatggtcaatgcttttcccaacattacttgtgtaccttctgaaaagggttgtcttaactttttgggcactcttatttggaagtaactattcaactagttctctgcaaaggtcaatccatgaggggctttggatacctttcttggtgttatttccattctgctacacatgggggggctggactttctgatgaagatgatgttgtcgtccatgttgactgcctctggtgttagtgactaggtcagctatccagttgttgcaatatggttttcctttgtctttgcaggtagtttctgatgacgccctggtacactggctggatcagtataactcctctgcagacacctgtactcacgcatactggttagtgcttcttgtagcctcacttatttctttacctgtaattaaaatgttttctattttggggggtgagggtgctgagtttccttgtttgtgatcctattgcttctacctcctaagttcaataatggtcggtagacctgagccacaatgcttgtttaagaacattttctttctctctctctctctctctctctctctctctctctctctctctccctctccctctctccctctccccctctctctccctttctctccctctctctccccctcccttcccctccccctctctcttttttttggtttttcgagacaggatttctctgtatagccctggctgtcctgtaactcactttgtagaccaggctggcctggaactcaaaaatctgcctgcctctgcatccaaagtgctgggatcaaaggtgtgcgccaccactgccgggcctcacattttcatttttttttttttaagatttatttacgtattatatataagtacattgtagctgtcttcagacacaccagaagagggcatcagatctaattacagatgtgtaattgaactcaggacctctggaaaagcagtcagtgctcttaactgctgagccatctctccatcccacattttctttttttttttttttttttttccattttttattaggtatttagctcatttacatttccaatgctataccaaaagtcccccttacccacccacccccactcccctacccacccactcccccccacattttcattctgtatgaatatgtgattgtgagtaaataaacaaattgcctcttgttaggcacagtttactttatcagaattttatgtagagacttgccgtggtagtcagtacctataatcctacacttagcacttccagatcatcctaatctatttagggattgaagtccagcctaggctacattgaaaccctgacttatcgccttaattcctatccctctggtaaaacttgcatccactccttttctcttcctcattttcctcctcacttcctctgtgtgtgtgagtctgtgtgtgtgtttgtgtgagcgcgtgtgagcccgtgtgcttgcatctgtttttcttttgctttctctttggctttaaaaacaaacaaaccttactgcttgggcttgatgactcatgtctacagcctcatcacttgggaacattcagacctgaggtcagagtgtgcaagaccaggcctcaaaacaaacaaatgaaaaagaaaggagctggagagctgggcatggaggcacacacctttaatttcagcactcagcaagctgatctctgagttccaaaacatcctggtctgtagagtgagttccaggacagctggggaaaccctgtcttaaactaaaaggcgggggtgggagctgaagagatggttcagtggttaggggtgtcttctgctcctttaggaaatccaggttcaattcctggcatccatgttaagtgactcagctacctgaacctgagactagctctagtggaccccatgccttctactgatataccccacatgagttactgacatccaacctcagaaggttatgtgtacatgtgtgagcatactttgatgatactgttttggggcacgcttgggcaggtcagaggacagctctgttagggtccaccttatgtagattccaggaatcaagttagatctttgggcagctagttcatattttggaagagccacctacacacctggtttgtttttcttgtattaaatttatgttgctttggtgatgactcagatgtctgtcaatgaattggcaaacatttgagtagtactatgaccttttgtttctcagtttacatttctctgtggtttgtttgctccagttatccagcatttcccactagtcatacttgaagcagcccatagcttagtgacacagcatccactgtgatttcacagcaagcactaccacagtgaagcacagggtattgaagtgtcaaaagtgaatagatagtaagtagcaccagcagcccagtgtacaaggagaccgtctccatccatttggaaaggataacccaggaatcccaaaggattttctaggaaaagtcaaatttttcttcttgaaatatggctagactctacagatattcacgtatgtagcgtgtttctatacattttttctcctcaatgttttctaggcgtggcaattgcaaaaaagcaagtttaggattggtatgtgagattggtctccgctgccgcacgtactatgtactgtgtggctcagtactgagcgtctggacaaaagtggaaggtgttctggcctctgtcagcggcacaaatgtgaaaatgcagatagtgcggctaaggaccgaagatgggcagcggattgtaggtaagttttggttgtggggaaagaatcacatcctacccagtattatttttcacttctaacatcagagatctcttgtctcacatgtgttctagtagtgagcacagaacatgctactcattctacaagattcagaggggctggtgagatggctcagtgggtaagagcacccgactgctcttccgtaggtccagagttcaaatcccagcaaccacatggtggctcacaaccatctgtaacaagatctgacaccctcttctggagtgtctgaagacagcgctacagtgtacttacatataataaataaatcttaaaaaaaaaaaaaaaaagaaatgtttacaagattcagagcctgggttttggctttagacttatttatctgaggtatctggctgcctctcttaaaggagatgattataagcaggcaccatggtagccagtggtatttgacccttgtagtggacattgtgatttgacagtaattaccctatgaatgtctctgggctgctgtctactccttgtgcttattatcctttgctcctctgtgttcttgaaacaacctattccttttccaggctttgagtcctgcagaagctaggacagcaggctagctcagacagtgtgtggtcagctccagatgaactagttgttacactgctccttgctgataacctgtagtggggagaccaataaatctccttgctgcttagtgaactttatttgtactcaggttgtggttgtaaaattttcatataagaccgggcatggtggtgcacgcctttaatcccagcagttgggaggcagaggcgggcagatttctgagttcgaggccagcctggtctacaaagtgagttccaggacagccagggctaaaagagaaaccctgtctccaaaaaaaaaaaagtttcatataagtgagtttctagctgctggcttttaaaaaaagaaaaagggcacttagttgctacattgagttcagatccttcacaggccataactgaagttctgcagctgggacctggacctctaattgcccttacagtctgtgtgtccgtctctactgtttctgtttaccctctgtcttagtcactttgcatcttactgagtggtagaaggaaggggtgatatctgtgaagtttatgaagctgatgcctgtagtttggaaagtgctgtactgcacaccaagttccttcatcaggagatgctgttgcaccagattcatgtgttcatgtgtgtgcatgtgcacatgcatgccgagacatctcctaggaacagcttgagttcaatgcgggctgcctatctggtttctgagggaacttgatttacagttctctgtgaaggtatgatgtacaatggtttctactggacggttctacttcattgtattttgggtttgtttttttttttttttttttttttctaattacaggtttgatcattccagcaaattgtgtgtctcctcttgtaaatctcctgtcaacttcagaccagtctcagcagctcgcagtgcaacaaaaacagctgtggcaacagcatcacccacagagcatcaccaacttgagcaacctgtgaggagcagcggcgtgcacaggcggtgctgagtgctgtgagagcatactacttgcataaaaatcagggacagtttccaaagaatcctttttatttttaacttcagttgtgctctctagttaacttgggggggtaaggacaaacctggaaaaaggcagcaaagctgatggcgcaaacagagtagaggggacacgtgtctttcctccagcttccttgaggctgcctgtgcgcttttactttggtgagcagagcggatgtgtctgtgtgtgtgcgtgtatgtgtcagtctgtctgtgagtttgttacatgctacaaggccacagttggttgaaaaggcttggaacttcccagactggctttccctttcctttctacagtgctcagggtaacacagtacatccttgtccttactgtgggagttccccggatgcatgggtttcaagtctaaatactgagtatgtatattggtttcttttccaacttacacaatgtttcctacagcatgaagtgaagggttgcgtgccatgcattcaggttcatttgtagcttttgttgacgatgcatgtctttgaaagcatgtgtaatcaagattcccacagaagtcacatggagagaaacattggagatgtctggcattgggtactgcatttctagtgttgatacctgggtgttgcttctaaccctcagccctgcccgctccccctggcccaagtttcttgttgaagtagtaagtacatacttttttgtgagaaagctctttaaaagttcattttaatatgttaatagtattcctaatttgtgctgcaaaaatggctatgagccttatcatataagttccattttccttaacttaagcatagttttaggaagacatatgattggcttctgtcttgcacacaatcttttttacttcattatctgaatctgctttgtcattcaaaccagaaaccgtacttgagttgtaaactagacagtgagaaaacacttggcttctgctgtatgttgttgtcatcgttacccagtaacttgaatattgtttaatgtgctgtaagacattatagagattatctccagctgtttaaaatggtaatgtacaaatgtgaatagacacttatctataacatgggtaagttttgttttgcctataatagatgtttataaaaaaattcagtgaggggacaattggtctttttggtttttttttttctcccaatcctctccttcccccattttttttctatcttcttctttttttttttttttttgcttgcacaggttgcactattgaaaaattgagattgtataaatctggtttaaaactacaagataacaaaatcttgtagatgttgaataaaaaagttattatactaacgaagtggactcttgtttaggccctccctggggactccaggcataggatagctggcctctgttacttggagttgccttagccttccaggtagccttagagtctgactgagccccttcctgaagtctgtggaggtcttagggatggggtaactgatggtacttttgaatgtttttcaagttgaattgttttctttgtagctttttaatcttctcaaagagctgggtgaggtgtgtttagtggcagagacttgatggagcgcttgggctctcattctctcaagtttctaggatttagtttgctgtaaaactgcattggatttatttattcttagtgcctcaaagaacaaatggtgaatggtttctgttcttgggcacattttgcccagtggatgcaacttttatcctcattccttgtatctcaggcagtgatcagcaagcagtccccctttgtggcccctgagaatagaatgggtcctcctttacctagcctctgagcttctgtgtttgaagtagcagactgttcagcttccttgggcatggtaaagtaaaagcctgaggaagagctgtgtaactgaacttgctttcttcaggaaaccaagtcacagaggatgaggaatgagaacgattctgtgtcctaaggtgccagccccctcgttctgtgtgtggatatgtgtttatgcaggtcctgctttatctggtgtttccaaagcagcacctgcaggatttctctagtcttcttagtgaacaggtcattcatggtgatgacgctgtgacacttgctcctggagcagatgaggatctgggtgtccttttcatcaaagaacgtttcattgcgttttaatgttgagtgaggaaaagtccacagataccaggcatctgacaaccctttcaaaacagaattaaaggtaggtagtgtggtgggacagacagaaagctggtcagcctttacccactgttggggggtgtgagacatctggaattggtgcccagcctctctgcactctgcccctacaaaagtcactcgttggcagtcatgtctttttcagccactgtcatgtaaagtaggttcagtttcctgcagggtctgagtgccacacatgcacccaggacctcacttaactctgtctccctagcctctgagatgccttctcccacttgagcggtgcagctctgagcagcagacccgagtgttggttccatcagtgttttcagagtttacagtagtttgtgctgaaaatcactcctaggttccagctgctcaaatatacttgctggagaggaaggccatgttcctcccctagcaacctctgtgctgcaggcttgccctctcttgttccagtcagattgttggtggtggtgcagtcagaaaagcagtgaaagtatttctataaatgcaagttggtgagaaagctaggcaggctaagcagtttgctctctttactactaaattgcaggtctgctttcagtgtcttctttttttctgtgtgtatagactagcaagaacttgtatccaaagcactgtagatgctataggtatgtacatacgtgtatttattcttactcagcacttaaaccttttgagttgcaacagtaaatcttgtaatttgctctgtgtgtgtagagagaagttataaactacccagctccagaggaattaagcattttggagccacagtttggctgtagcctttttatttgctggtttctgtactatgtcatcagaacaacttctgagataggagagaaggggtaggaggacctaccatttacagtttgtcacaggagggagccccatcctgtcctcttccatattagcactagggccactgtgacttgcatttgaaagcaggtgaagaggtatttatcctatgagaccttacccagggatcctggtcttaaagaaggacccttgtgggctcttgcacttcctaggaatggagcttcagaaaagctgctattaagccaggatccacacattgaatgttcagttagttggggcatctctacggcaacagaaactgttgtgatggtttgtttgttaagagtcagtcctgtgggtgtgggctctggtgaacaacatacacaacacaggcactttggccctctagtgctgaagtgaaccaagcattccatgtcatggctgcagctgagtagacagaaattctttgcatgaaaatccctcacaaggctagct

SEQ ID NO: 30584 - DNA, 1113 bp, Mus musculus
tctctgtgtagccctggctgtcctggcactcactttgtagaccaggctggccttgtagactctgcctgcctctgcctcccaagtgctgggattaaaggcgtgcgccaccacgcccggcttatttgtatatctttgttggagaccacacatattcctctctctgtctctttggtctttcagttcttaggattgaaaatggttttgggcctactatatcagatgtctagcactcagttgtaccactcactaaacctatctattataaaagtcccatcaagcctgtcattgctggaacatgtgcaatggcattttgcctgaatgtatgtttgtgtaaaggtcctcagatcctcggttatgagtggccttgaggcactgaattaaacactgccttgtcctttggaagagcgaccagtgttcttgattgcagagccatctctcccagcctctgtatgttaaaccttcatgctacatcaacagctccttgagttatttggattgtgaagatttttgataaatttgttttcttacagacgttcggcaaggactgataggagtgggcttgattaatgtagaggatcgctcaggaattcttactcttgataaaggtaatgtcacactgtatgtgcatgtaacttagattagtggagccttccttatgcttttgtacactaaagaaaccccaactcgcgtggatgactttggagaaatctggttctctttccactttgcttttgagacactctgtttctatggctgtactgactactctaagccagttggcctttgagtttctgggtgagtttcctgtgtctgtctcctctcctaatatagaatttatttttctttttaatttttaatgtaattattcattatatatacagtgttctgcctgcatgtattcttgcaagtcagaaggcaccagacctcattatagatgtctatgcgtcacaatgtggttgctggaaattgaacacaggacctttggaaatgtggctagtgctcttaacctctggtccatctctccagcccccactatagaatttcttgaattaaagacaggagcccctggatctagcttttttacatggtggatttagtgaccacattcatcag

SEQ ID NO: 30585 - DNA, 2433 bp, Mus musculus
agttgtttatgatttcctgaaattcccccgtagagcatagttcttgtctctgtggatcctttcctaaattttgttaagaaagaaattttgctgaagtgaatgccaccttgagcgaatgtctcagaattttcagtttaagggaaaggaagagagacaaggcagagatgtcttcatctatgtatggaatcttaagacccttgtaggttgctattctataaatcacactcctgccctgtgatatgttccttagctcttccttccagatagtgtttgatgaatgtcacaaagcaaaaaacttatgtcctgttggttcttcaaagccaaccaagacaggcttggctgttttagagcttcagaacaaattgccaaaagccagagttgtttatgccagtgccactggtaagtatatatttaatcagaaatatatttgcatgttactttagcagctataatatttttgaatgtttactaggtgcttctgaaccacgcaacatggcctacatgaaccgtcttggaatatggggtgagggaactccattcagagaatttagtgattttatccaagctgtggaacgcaggtaaggaggctcgtggcactgttctgccagggctgtttgttagtgtgtacaaatcctgctttgtgtatcgatagttactgtgtgttttaattttgttcagaggtgttggtgccatggaaatcgttgctatggatatgaagcttagaggaatgtacattgcacggcagctgagctttactggagtgaccttcaaaattgaggaagttcttctttctcaaagctatgtgaaaatgtataacaaagcagtcaagctggtgagaaatgttgtcagtgttgtgcctgataattgtttttaatgaatattatccattgaaaaattacaacatagaagaacattttaggctgtaaaacaacagatgatcacagttgcttatttgaccatattttctgtgttgttattctttgttaattcatattcaattcagaatgaactcacaattacagtgtaataatatcctaaagtgacagctttctgtagtgtatttttgaaacatttatgtatgagcatcctaaaagttgtccaggcattggcccaagtgactgcagattattttggtgaaggaatcacttttagtttttgtgaagatgagggtctttctgtgtcattgtggctggtctggaatttcctatgctatgtagaccagcctggccttgaacttacagagtttctcatacctcctgagtgatggatctatgccaaacatgtttagcttaagggatcacttttaagtaacaatattcaaagatatttgtaaaatgttgtctgtgttttcagtgggttatcgctagagagcgatttcaacaagctgcagatttgattgatgctgagcagagaatgaagaaatcgatgtggggtcagttctggtctgctcaccagaggttttttaagtacctgtgtatagcatccaaagtgaaaagggtggtgcagctggctcgggaagagatcaagaacgggaaggtaagttggaggacatctggtttagttagtctgtgctagtctttgtggaatgaggtcttttacttggaatagtctttggacgtaggaggcagggcttttctgtgtagcactgttaaaatttaccctgtagaccaggctggcctcaagctcagagatggaccttcctctgattcctgtgtgctgggattaaatgtgcataccactactgtttgactattatagtcttttgtttgtttgtttgttttttgtttttgtggttttgtttttgtttttgagacaaggtcttattacatagctctggctatcctggactcaaaatgtagaccaggctggacatgaatgcacagaatcttgggattaaaggctaaaggtttgcatcactatgcccaactctggaatagtcttttaaatggatgttactagaaatactattacagtaagattttatgttaataatttattttatcattggtttagttttgagacagtattgttctgtaacatagattggtttggtatttggtgcgttgtgtaggatcaactcatagcagtcttcctgccttagtatcacaagtagtaggatttgctaccattacttgctttgtattaaagagtgtgagatatccttaaaaataaattctaaaccagacagtggtactgcatgccttttctcccagcactggggaggtagaattcgatttatcccgtgtgttccaggacagtcaggtataaacagagaaaacctgtctgaaaaagcaaacaacaaaaaaacaaaaagtaccaggtagtgtgtgtgtatagttctagcacatgagagatagacactagaggatcgcaagctccaggccggctgtggctgtgtgtatcagcatttgaattgggcctcagtgatgactg

SEQ ID NO: 30586 - DNA, 1099 bp, Mus musculus
tggcaggatagaaggaaaaagtttagttcctatatgtagagaatattcatggtagggttcactcttggatcaaattgcatcaaggagaaatgatgacactttttcagggtggttttaattgagtgggagtttatttattaaagcatggccagcttacatcagtggctgcttttatgagaaaataacatacattttcccaatttatctcctttttagcaacatgaaacattcctacctaatggagaccgtgctggcttcttaataggcgatggtgctggtgtgggtaaaggccggacaatagcagggatcatatatgaaaactatttgttgagtagaaaaagagcattgtggtaagttccatggctgactgatgagcttatcaggatgaatttaaatgaattttttttgtagtgtcaagacctgactttatttcttagttctatctaaaagtaaaattaaagtttaatttggttaattttttttgacaggtttagtgtatcaaatgacttaaaatatgatgctgaaagagatttaagggatattggagcaaaaaacattttggtccattcgttaaataaggtatggaagtttccttgttcagtggggctatcaatcaatgcatactgacttacgtgtaagaatgagagtaattttgagggagagttggggaattgggtttgttacaaggattaagtgagtttctccacataacacatgccaaaccatggaggtgttagtggcagacaatgtgggcatggtccctgatataatcgtgttgtcatcttggtctccagtgctatattgtcttagtttctagagtgctttctttgcctgtattagaaaagtagtgcacctgtcaccatagtcaacacatttgtgcggcctagaaacaatcattctgatttataaatagttttatgaactttaggtgttagtccaacaatggagttaaatggctttgcttatgttaatgtggaagcaagaaaatgtgtgtctatatttaaaacacattttaatatgattagaattttaatgcttgggctggacagatgactctggttgagagcactggctgctcttccagaggtcctgagttaaa

SEQ ID NO: 30587 - DNA, 1183 bp, Mus musculus
cctcccggtggcacccaagaggagcggaccttcttcccgacagcccgcggacctcaaccggtggggcgggggtggggtggggtggggaggagaaacgttattctcgcgaggtctcggcgagcgaccgcggaagtggcggacacgtgactgtcctaggccgcctttgccttgccccctcccccttctcggaaacccggccccctcgcccttcgcccaccccggagccgcgggaatggaccgtttgggttccggcatcccccttggatcccatctccggtaccaggctagcgggacacggcggagtcccggtttgggtgccgaaggcagagaggggggcggtcaagatggggaggtgtgggggggggaatccgcttccttcatctaggaaggaggcggggcggagacgggaggggaagggatgggggtgggtgggatgggggagtcacgtgattcgggtcgcgcgctgcgtgcgcgcggcgcctgacccgtcgccccgccccctcttcctgcggggcggggggtcggggggaggggcttcaagatggcggcggggaggtaggcagagccagacgccgcttctgccgccgccgccgccgcctccgctcctgtcgcctccggctcctcacccgttcgcggacccggagaagctatccttgggtcggccccggcggggaaagtaagtcccttctcttggtccttttcttcccctcacgttcatcctcccggacagcctcccactccccacaccacggctcctcagggtccgtgtggggccgtctgtggggggtggcggggaggcggccactctatggccgtccgcgcctcgctcgccccgctgctctgtttcctcctgctgtccgccccgttggttccggcgttctcagccagccagccagccagcgccggccctgacggagtcccgctgtccggagccggagagcggctccgaggccggctcccgccgactccactggagatcggggatcgccttcctcgccctctcttctcttcatggacccgggacgggtggtgaaaccgaggcggacaccctgctagattccgccggctcacagtgctcacgggtcgcggagcgggaggggatggcaccaggacgcccttcctggacctcgctcacgggcgggtggggtgcgtgggacacgtgggtcgggacacctttttacgc

SEQ ID NO: 30588 - DNA, 3369 bp, Mus musculus
aagttattggtggatcccaggtggttcaggacactgggccttgcttgtccctcaataagcagagaaccttatggaccagagttcccagtgtcaccatttcctagctttgtggccttggacacatggctgcctttctaagcctcatttttctcatttgcaaaatggtgtttgcccacttagcaggtttcagctgggagcctgacgtaagagaactttgaatgggcatagagcagctctttgtggtatggactgggaaaaacctgagactaaacccagaacacacagtaaaggctctgaagccatcctcagttcaagtgggttttattttattgaggtccagtcagtaaaattagcaaaaagtgtagtccaagcctcttgaaagacactgtgcctcttgacacctgtcataatattgaacccatgctgtcttgtccctccctgacagattgatctaattgatggcaaaggcaggggtgtgatcgctaccaagcagttctccaggggagactttgtggtagaataccatggggacctcattgaaatcactgatgccaagaagcgggaggctctgtacgcacaggacccctccactggctgctacatgtactattttcagtatctgagcaaaacctactggtgagtacacactgtgactttttaactctttgggtacaggaaaggcagacaactgggtgcccagggccattcctgagtctgtgatcagtttctttacctgtcacagttaggtcacctctggctggcatcaaactcatcctccccctgcctcagcctcctgagtgctgggattgccaatgtaaagcgccatgtccggagagctctccttctcctccctgttagctgtgggatggagctgtccttcagcaggagtgtgcatcccctagacacctgctccagccaagcccctttccctctgggcatttgtccaaagagctctgtgcaatggtagctgctccttcctggttgaggtcaggggagccgatttttatagttactccctcgtctccgtagagagttctttggggcctctctggcttttaaagtagcctctgggattaacctgtcttccaagtgaggcatgccagccaagttagagcctctttatcagtgtgatcccctctcattctcccacctcaccagcgtggatgccactcaagaaacgaaccgcctagggagactcatcaatcacagtaagtgtgggaactgccagaccaaactgcacgacatcgacggcgtgcctcacctcatcctcatcgcctcccgagacatcgcagctggggaggagctcctgtacgactatggggaccgaagcaaggcctccatcgaagcctacccctggctgaagcactaaccacgtggcctccctgcctccctgccaccctgcctccttcaaaggacaaagtgccctcaaagggaaatgaatttttttttacacacacacacgcacacacacacacatacacacacactcacactcactcttagctaattacttcaaatgtttttaaaaagtatattaaagatgccttttcatgtagtatttaaatatctgttacaggtttccaaggtggacttgaacagatggccttatattaccaaaacttttatattctagttgtttttgtacctttttgcatacaagctgaacgtttgtgcttcccgcgcagtgtaagactcggcacaggttttagagaatggagttgaacatgaactaggaagccgggctctgcccaagatgaaagccaggactcccccacaccccacgtccaaggacaggccggtgtgagggcgctgcccccccacgcacagcctggacgggatgtctccaagctcttgttctcctcagcatcctgacaggcgtacacactgtcgtgtatgaatattttttagcaaaagtttcacagtaagctagtcttcccctctgctttctccaaagcttactgagcccggggctgggaggcccggccaggaacagacctcttccacaggcttacggcttttccaggcaccttgaagcatcagggtggacagtcagattagaggcgggccgggaaaagcactgttctcctgctcaagaagggcaggtctcctgaaactgcattaattctttatagaaatgtgaacactgaatttattttaaaaaataataaaaacaaaacattttaaaaaaatcaaaaaaagaaaaaatggaaaaaaaaacccacagaaaacaacttaacgtgtatataggttttgaagggagtgaaatgaatgcggttttcttttcttctggggtttattttttttctttttggcttggctggttggtttgtgtagagaagatttgagatggtactctattctaatcaaaagtgaggttttgtagtgggaccagaaattactaagcccacaccccctccctaaccccaattctgctgcatgggaagttctccacctgctgccaaggcagagctcctggtctcccatgaagatgctgtcagctgtcagtctagcaccccggagcatcaggcaccagacgtgcttggcactagggtacctggcagccggcagagaaccaggatgatgcttcggttttgacctgtgagagcaagagtaggtggcttccttctccctccctggggaggactcaccattcaccttcagtccaggggcctggggttcaggagccaggtataagaccctaccctcgtcccctacacccccatctcccaggctcatgatggtgctacctacgaaagtctcccccgcaccctctgctagcccagtcagtggtcagacttggaggaggatccgacaggagggtgtaactgtgagataaaaatgtcttggttgtacctgtttgtggcttagctttgtatttaaatagcaaacaaacaaaaaaaaaggaaataaacttgaaacttatttgtcatcttaagaataaagcaaaaaaattaaaatatttattgccaggcaaggccacctatgtgttgttgttgttaataaagtggaggtggaataaggggaaagaataactgattcaccctatagaggttcttgctgcccagcctgactacccaggtttgctccctgggacccacacacatgaagagagtgggttctgagtccctgaggagtgaactttgaggtctgtcctggggagtcagaatgcaagcacgtttagaagttggcttctgattaacctatggggtagtttcagagggttcttgggaaggttagggtatataggacctctgggtaatgggcaacgtgtaatatataccctaaatgttagctgctataattgtcttaaagtctcaggtatcccaggctggcttgaaataactgataattcctggtgctggcatcaca

SEQ ID NO: 30589 - DNA, 1403 bp, Mus musculus
ggtcctttggtccttcttcgaagctcttgttctagttgccatgacattgggacagatctactacctgaagagattttttgaagtccggagggttgtttaaaaggccttttcctgttgatcccaaattcatgatttacttgtttaccaaacaccttggtcataataatgtcattagtttatacatttttattttctgaacgttcatgacttatgtttctttgtgattagtaggtgttggggaaaacctgtttaagagagttagagtgaaaatttgacatttgattggcctataattcttacttgaaaggagccccattatataggcccttccaagaatccagaggctgttaatgctgtatgggactatggtctttattatgtttttacctttggttttcataataaaatgcagttcatccaggaagtagcccacagcctgacaatacttgttaactaactgcattctagtagtcccttggttcatcatcagaggctcattttgttattacagcaacagcaatctgaatcttgaccctgtggccccgcctcagggtggagagtcctgatggggcctgttaccagggtgggcactcatgctttctcttgagctcgatttaaagactcatcaaaactcttccccctaaagttttatattgaaccttagaactgaatcacctctaattgaattgaacaagcagccaataacttagccgttctttgaatccagtttcccaggtgttggaacagactgctgtcctgtgtgctgcagagtctgtcccttgttggcacttaggaagatccagtttctccctcactggaagtctgcacttctcaagcagaaggattaagcctctggggttgcttgcagtgataggcagccactgatgtctttttagtcagtggcctttgggccctggtcttcagtgtcagcactagggtttgtttgtcctctggggtcttttttggcacatgtcagttttgtttatataaaatgaagagactgtctctctgatgatgggtttaatgaaaggcactctgctttgggtgtgggcggtccaggattatgtggtaactattgtctgttagttacctggatattttatttttctttttggatcttgcaaggggaaaactacaagtaacaagttttataaatttaatttaaattgttacaggttttcatgttcaggacaaataatttttcaaccttcgatgatatccttgcagcagtttgttggtaaggtgactttcacctagggcagctgttgcatgccaattttttttttttgtgtgtgtgtgtgaaaacacttcagaattgaattaaaagatgtaaatttaaaattggttgtgtatctaatatgcccaggttcagtaaataaacaattctttttaaaaacagtatt

SEQ ID NO: 30590 - DNA, 1371 bp, Mus musculus
ctttccactcaaccaggaggacgtcccagataagtttaaggtaagttttatgtatttgacaggggtctttgactatacccagaaagttgctcccttcccattgctgtttcctgcagcttttccggtgtagagatgggagctggagctgggcacaatctcacttacatagcaccctgctgagagcctggcagaaccccagtttcttcatcccatctctgcttttacaaaccatgtgaccttggccaggcacttccattgtggcctcctctctcctgtgagatgggaaggtatcctggacatgctgtccctgccagcctgctacacagccagtgtcctgacccaggggtagtcccggcaagagctcacttacaactcaagccagggcctcagcagtgcagagcctggatacaaggccaatccagctaaccacgttctttcctcctcagtacaaggcagacactctgaagtctgtgcagactgggcaggatctcaaagaggaacacccatgggtggactacacctccccatccctcatcaccctgctgtttacggacctgggtgtgttgacgccatctgctgtaagcgatgagctcatcaagctgtacctatgagccgagtcgctcctgccaacatgcaggaagcacgcgctgtgcaggatgagcagcctctccacgccagccagccaggggctgaaactgaatccaacatcagacgtcctgaagaatccgtggacttctgctctgtcacatctgaagcctgtttccagttctggaagcaagctgaggtgcccttatggttttcggaaactcggtctcaggaaggacaactgagattacatctgcagtcctgaggaaagacggcacacgagcagagacccccttctcataccacactcagacggctgagtacaaaccttatggtgcctcacaagacagcaaacactggctgactacgtctggcttcggggctccctcccctcagcagcccaagccagacaggagaaataccaatgcaggagccattcatgtgccactgcgcacagaatgttgtctatagaaaatgggagtttactttaaacatggttagaacccaaacagctttttaaagttaaatgtggaaacaaatcaataaattatatgaacaatttagatacggtattgcctctctaagttgacagatcagaaacagtgcaagcacaattaggcagaacccattaacaagaaaaggcctagcagcacttctcggggtagttcttcctggttttaataaaccaccgccagagcctgttctgaaatactctcaaccccaatctgaccccagcctgtggccccagaacacgggaggctaaggcaggaggatcagtctgaaatc

SEQ ID NO: 30591 - DNA, 1250 bp, Mus musculus
cttttaacagttttctgcaatttcagccccatctgcaccacgtgcgagtgagtatcttcgtaggcgctgggtgggagtgggttcctgagctccagagcctgagggtcccttctctgtcattccaggacagcttttaagatctccctccctcctgtgctgaaggccaagaagaagaaacagaaggtgtccctgtgaccagcgccacaggcttccccagctcgtcccacaggctgactctgtagggagcatggaggaattctttgaaacactgctcttgccctgtgcttccagggtgtgaagctgcagaggacccacacctccgatttctctgggaagggggacaggtgtacttatttgttgttgtagggtagcagttgcctggcagatgctaagctgttgctgttttgttgtcgctttgattttggtgctgggttttgaagcccagccttgcaggagccaggccggcagccccgcactgagctgcagtcagctccctgggactctctgttcagatgatcctctgtcagcgcttatggcggatgctgggtcttctgcacttcaggattggtagtgtgtgaagttggatgccatttgggaagatgaccagcattgggtcacggcagcagtcataacagagcatcttagttgctcatggtacactgctagaaccttgaacctgggaggctgagacaggaaagttttgggttcagatcctgcctgggatgtgtagaagatcctggctttttttttttttttaaagaacattttacttaaaataaattgtttcctttaactatactcaactgtaacctgagctaaaggcacaagccttcagtctcagcactcagggagcagagacaggtgtatctctgagtttgaggccagcctggtctacagagggagttcaaaccaaccagggttgcatcttgccaccttttttacaaaaatataaaaactagtaacattaacattggagaacttttgaatactagacatgtaaatgagaaacatttgtaatctcaacaataaaaatcctatttttatatttactaattttccttagagtgtttttctaactatttgcattgagtagtttttcttaaaattactaagagctgtgggatggtggtggtgcacaactttagtcccagcactctgtgagatcaaggccagagctggtctacagtacaagtcctaggacagcacagagaaaccctgctcttccagaagatccaggttcaattcccagc

SEQ ID NO: 30592 - DNA, 1194 bp, Mus musculus
  misc_feature (872)..(1194): n is a, c, g, or t
tagaggtcatttgggctgttagccatctctggtcttggttgtgagagcctgcaggagcccttggcgatacagatggtggaaggtcatttaaactattagccacctccagtcctggttgtggggtcttgatatggcctggcccaatagatactgcagatcaccaggctgttagccacccccattcctagccttctggatggaaaagtaggttgtgtgtcctttcctttgagagcatgatcctgtatgctcaacattcctggcttccctagcgatctgcgggcacacggaccttcaagctcttaacaactgccttttgttgtctttcaggggagccccagtctcagtgtgtggccaaaggcctgatgctgctgtcactcctcatgctggccatcctcctcaggcacccctgggtcaggatgtgcaaagcccgggactcagctgccatctaccattaagtttcctggaagactcagggcatccactcagcggctcctcatcggcccttgcgcctctctgaaacctgtcagtttgagacaggtctctccacatatccctggcttgcttctaagctcacagagatctgcctgtctctgcctctggagtgctggattaaaggcatgttccaccatgcctggactctctgaaccattttaataaacagaatgtctatttttgtagaaatccctagtgttaagtgaacgtgagccaaatatctagatgtttagagtggctccggattatcactctcgattctagctggttgcaggggaatcgagggtgtcctaagtgtcagagacttaagcccagcacggatttctaatcatggggttttatgtttgaccagacttgattgatgcaagcaggtaagcagnnnnnnnnnnnnnnnnnnnnnnnnnnnnnnnnnnnnnnnnnnnnnnnnnnnnnnnnnnnnnnnnnnnnnnnnnnnnnnnnnnnnnnnnnnnnnnnnnnnnnnnnnnnnnnnnnnnnnnnnnnnnnnnnnnnnnnnnnnnnnnnnnnnnnnnnnnnnnnnnnnnnnnnnnnnnnnnnnnnnnnnnnnnnnnnnnnnnnnnnnnnnnnnnnnnnnnnnnnnnnnnnnnnnnnnnnnnnnnnnnnnnnnnnnnnnnnnnnnnnnnnnnnnnnnnnnnnnnnnnnnnnnnnnnnnnnnnnnnnnnnnnnnnnnnnnnnnnnnnnnnn

SEQ ID NO: 30593 - DNA, 2666 bp, Mus musculus
gttattttttaaagtgtaagattggaggagagaagccagctgaacagctagctaaaaatggtcttagatacttgattccttttcaacttaaaaaaaaagaaacatgaagttattccatcgcaagaagatgtcagataatattttccaacagctcaagttaggcatagtgttttcagacattactgctgggtcatcagcaggtccccgctcccactgcctgctccagaatgtatgtgagttctcccaaaatgctcgcaggattgccgggaggggcagcgtgacagcctgatcttcttttaataatcggagacaatgtgacaaagtggcacagcgatggctctcctgcttgcatattttttaaagacgcttgtccttcatccttgtgttagaccagtcacggcagttgtgcgttctgaaggatgactgtcctgagccttaaaacccaggggagacaggaaaagccgtgtgtatttttatagcaaagaacagatgaagatattttaccacagagactgcttctactggacaatagtatagttttttactttggcactaattctgaataaaggtctgatggccagtttgatttcccaagctgttcaggttagctgaaaactgattcttactaacctgttaatttattacattcatgtaagatcacctgtcctcagctttgagtgaagttggctcaatcccattgaacacttagatccatgtcacagtcttagaaattatcctcactttcacattttacgttaagcgagtttagctaagtatttcagaaagcaatctgaggctggggtgtggcctgattgtttccatcccccgaaccacttcacccaggtgtggtggcatctgactggtattccaaggacttagaaggtggaggcaggaggatcaggaagttcagggtttcctttggctatgtggtaagtttgaggccagcctgggctatgtaataaccctaaagagagaaaggaatctaacatgtctctggcctcttaaaattctgagttccacgctattgcagagaccttttggtgcctcagccctccagaaccatgtggtagagtgtgggtccctttccttaaaagccaagcctctggcagccagaatttcacagcttcttgggtcctgtaagagctgcatgctgagaggcatggactgcttgtgcctcagctggagagtaacatcagatcgctccagcccctgtggggtccacactgacggcagcgaggctccagctaggatgccgagcctgccggcagctgggtaagctggtgccgcccagtgtagacctgctcttacctgtatcatgtgtcacccccatgtcactcttgttactgtgcccccagggtctttggtcaccacagagatagctgcttccagggacaggaaccaaacagtttctgccatatgtactgtccctgttggcagttgtgatggggcctcttttataactggcatctcttacctgggtacagaacacagagcaagagtaacttctcagttgaagcctgtcacagttaaatagaatgtccttgcataaatggaagtcactgtttcatgagccctctggaaatataattggtagcgtcctctcaggggatgcagctctttggtggtgtcacatgttcctcttcctagaacaacatcaatggagccacgtcacatagacttatgctggtgggaaggcccgatgtgatgtggccagtagaggcatgcaaagggctttgagctcctgcacgctccctcctccataggacctgggacagactccttttcccccagatcctcccctggcctcagttctggaatgggtctctatgcttcaagatatttaatgccaccgacgcaggccttggccttgccatcctcttgccttagtctctcagctggcactacaggtatgcaatgctggccatgggtgtaatgacattcaggcccactgctccgtctgcaggagtgtagtaaggcacagaccgtccactggtaacttacagggctggcacatcaagctgtgatttagagtttgaacaagttttggaaaataaaaacaaaaccagctccaaggtcacatttttctacggagggaggaagtctgggtatgcatacatgccacactatccagatgggccttaggaactcttgtggtgttgtgaagaggcagtttgcccaccagcagaccactgctctaatacatcaagaaatcctcagaccgtgcaactccacaggatgattcgtcaaggctgtgttctggagctgggacctggggcggaaactacgggagccagccagagccgcactgtactgatagacgcatggaaggactagtctgcctgacagtattgaactcccttttgctagtgacaaaataaatgtatatttttgagatgccagtgtctagttttcttgtgatcctgttccctaagcccctacgccagaaagagctagtcctttcttagggcctgtcgagtgtcctcacagtgcctgatggctgaagccagtcttgcctgcctgacctggtttgcttctgttgctatggtaaaacaccatccaaaaccaacttgggagggaagagtttattttatcctaggttacactccatcattaaggggagaagcacacagcaggaactgaagcggagacttggagaaacagtgttg

SEQ ID NO: 30594 - DNA, 2689 bp, Mus musculus
ttcagcaatagttctaacctctgcatgcaccagagagtccacactggggagaagcccttcaaatgtgaagagtgtgggaaagccttcaggcatacctccagcctctgcatgcatcaaagagtccacactggagagaagccctataaatgttatgagtgtgggaaggccttcagtcagagctccagcctctgcatccaccagagagtgcacacaggggagaagccctataggtgttgtgggtgtgggaaggccttcagtcagagttccagcctctgcatccaccagagagtgcacacaggggagaagccttttaagtgtgatgagtgtggcaaggccttcagccagagtacaagcctttgcatccatcagagagtacacaccaaggagaggaaccatctcaaaatatcagttatataaaatgttttgctaagaattaaaaatcttaaacaaacccgtaagtgccactaggaaggaaacctcaaatccacctacactgaacccaggaacatctacagcagtccccagaaaaacattctttctgaggaggtttaggtgaagttgtgtttgtgaactcggagttcttctctgtatttgcccaggatggagcactctgtccctgtcacaggtgtggtgattcctgagactggcaacatgccacagagttgaaataatactcagaactcaggagccttgcccagccgctcagtcacctgcctgctgtgcttccgggcagtgccaggcactcccttgtggggctcatgctccttctacctaccggtcagtgcattcagaagtggacagctcccggaaggccgagttctggtattgctgaggttgccctgacatagctttccatgtatcctgttatttctgaatccaccttacctcatgtcctcagagtacctataaacacttaccccttcctagatggcattaaactccattctagatgttaggaaagttgtaacatgcacactcactcagccgatcaggaatcattggcagatgcacatgccctggaactttcccttagttttgtgaactctgctaatcactgtgtctctaagttagacttattttctagtggcttcaacacatgttccaacttgaatttttttcttttcttctttaagtagctgaatgtatatatcagggaggaagaagcaagcaaaactgagcttgccttcttcaagagtgaccctttcgggctccttttttaggtggtgggattgagtccctactagctcggaaggccttgagagggctgatggggaagtcactgaggatgaatctgtcatctcaggcaataatgtgtaggtgtcaccatgagtcacatacagttctttttaggcatgagtgtgtattactgatccaacatcttcattcattcactgagtatttattgaacgcctcctaggtgtcggacatgtactgggtgctgggaatgccactggatcatgaagttcacctctggaggagacaggataaaagtggttaacacattaataacgtagtttgcggtagtgattaagtgctatgagaaactagggtggtatgtagaggggggtggggggccaggtagcaagggtcagggactctgcgctgaaggtgctggggtcaggtgaagggagcagtgacaggacacagcacaggtgctgctggctctggggacgagatggaggtgctggaggtagtgtgtggggaggggaggtgctgagccatgagcttagtggctagcatttatagacctgttgtgtttgttttgtttcttactgactgatagtaaaactcatggaagaactcaagagatgtcgagaccaaaagtccccagtgacaccaacacaaagctcgcagttccgtttccttctcgttcctattctccgtcctccacatgcagtcctttgctcaggaagtctttggggaaactaatgacctgcaaatttgaagtgggtgactggcttggtggcttctgctagccatctaaggctggataaggaacttcccagatgattagaagtacaagacttgctttgttttgttttctttggtttttgtgtttttttggagtttggctggaagaggtttctgtaaacctgaagccttggtgcatagagggctttgtggaagcacatagtcagcggctggggttgaagagtgagtgtcaccatgccttttagtggagacctgcaggcaagcctttggcccactgatcactgcctttccccctccaccgagggctattggctgacaaagccccttcctggcctcacaaccaccacagtgatttcctgtagtgtcttacacttccatgtcaccacagcgtggagcattagagaaaagcctggatagacttttagttgatagagagccagttgaaatatcatcaatagaattttagtttagggaaaactggtttgatttctagctttattactattaggtatgtaagcttgggcaaatcgcttaaccttcaggtctagctttctcacagaatgaggacactggactaaatgattgcccagtttccagctagtcctagagttctatatttctacatagttgaattattttatcatgcggttgctggggaatacaactaacacttttgaagctactaattttatgtcaagctttaaagtccataattgttatcttcagaaatattatttgacctacagtatgtttaaat

SEQ ID NO: 30595 - DNA, 1485 bp, Mus musculus
ctttgattatgaggctacaggcaggtgtcatggcctccccgcccccacctggccttgcggcaggcagcgggcccctagctggtccccaccacgcctgggatgaggagcccaagccactgctgtgttcacagtatgagacactctcggacagcgagtgaccacggattgggggggagcggtgccaggtccccgcacaaggcagaagcagcccagcatggagcagacagctgctgactcccgagactgaggaaggagcccctgagtctgcctgcgcgtccatccgtccgtccgtccactcatctgtccatccagagctggcatcctgcctgtctaaagccttaactaagactcccaccccgggctggccctgcgcagtgaccttacactcaggggatgtttacctggtgctcgagaggggagtggacaggaggggagggacagcgggccaggagggggggggacagcaatcgtgtgtcagtcgcactcgtgcatctggggcagcggggacccaccacaggctgaccaggcacctccatgccaccgcctcgccccttaccgcatttggaaccaaagtctaagctgaactctcgcgtggtcctgcccctccctctgcccccagcccgcttgcgctctggacagacagacgttcccagcttatcctgccctaatgctgtcatcatcgcagtctccaaaggccacccagcccacaagactgggagcccatcagaccaggtgggtgcacaaggggccaggcctggcctggggcacggatgcttgcaggaactggaccgtttcccggcctgttgctgtggcaacgggagggaaggcacgtgtaaatggtgttggcttacagggtatatttttgataccttcaatgagttaattcagacgtctcacacaaggaaggactcgcccgtgtttctgccgctgtgctttggtctctacctactgtttcagaggcacgtgccagccaaggcggtggccccaccatacgcaggacttgggggtcaggggctccggcacacggcactgtgcccttcccccccacccccttccttgggcaaaatggacttgatgcgtattctgtggccgctctctgtgcacggcggcattctgtcatttacacatgttgttccaattagaaagcaaatatactcaagtgacaacgtttctactctgcttctcactgggcagcaggcagccacaggagtcaaggggagtgttccttaaagtcagcactgagcagtgaacattgacccctaagtacagtgccaccagagggcatcctgcatgcacacgtatgaggaagccaccaggtacttgtgtcgtcgataccttgctggatgttcacaccggtgggggacccattggtcattcacaccagtggtcatcgtacaggggtgttcacacttgttggggaagccagccagtacctgtattatacggtgactatgtggaggtgttcatacccgtggaaaagggtcc

SEQ ID NO: 30596 - DNA, 1209 bp, Mus musculus
tcctatatatgccaactcagctaggggtctgatgtcccacgcccatttagcagataggaaaactgaggcatagagaagtgagttaccatcccataccatgcacacatacttaccctggctgggcctgaggctcggggcatgagagaagctggggccctacctaggcttaggagcggagtgaggcatcttgtatgagtttgattttagaagcacgggtatagacagtgaggttctggcatgggtgcctcagtgtggtggcacacactctactcaggtgagatagctctggccaggctgaggcaggaggattgtgaacttcaaggcagtctgggatgtactgcaagaacccgactcaaaaatcaacaaaagcttacaagtctttaggttatctcagaagatcgtagtagcccactggggtctccatacctcagctgcagagtggccatttacagggaaatgtgcagggccccgctgtggacagtggggtctcctcatcatcgggtagaacttcaccctcagctaggacgctatctccatcaggtccccagaacccagcaaaacatcggtcctgggcagcagcgaggatgccattgagcctgtgtccccaccagagggcatgactgagccaggacatgctcggagcactgcgtacccactgctgtatcgagacggggaacagggcgagcccaggtacccatagcacaaatccgcgcttagagatggtggtgtcagttccatgtacacccaaggcctcggccctcccatatggaggccattaatccctcacagctcagcgggctgatagaccttcaggggccttcagttgcagcaccctgtgtctggcatcctggtgcctggcatccctgtgtctgggatctcagcctgagccatgccctgttttatcacttgctggtgatctgggaatgaactaagttgaaccagactgggtgggggtggacatggacttcagggagggtgtgacctgcacctgtccagttccctggggattcttgtgtcagatctagcaataaggcattgctgggggcaattcacagcgtacctgggatgggaaccagctggtccttagcacctcacggtagctcaagtggtgagctccctgttgctaaaggtcacaatgcccagcctgctgaccctggtgtctcctgctccctgcaggatgggctctaagtctccaggcaacaccagcca

SEQ ID NO: 30597 - DNA, 1186 bp, Mus musculus
cttctaggctgggactcaggatactgtccctgccctggagcacacctgagctctcagtgagctgtgagacttcctgggggaaagctgaccaccttccacagccacaccaccaccacaggggcccagggagagtaaagtgaagtacaccagcaggccccagcagcctgagctgctttctgtaaaccctgcgtgttcacagccagccctacaggcctctctaggagagctctgctgctcactgctgctgtgcctgagccagttcggcttggagttggcgaggagacttgcagccttacctcactttcagagtagggccatggtgctttctagtagatctggatcttggtaagcccccaccccacccccaacccctagcccccatccccccacccccaacccccaagttcagtctccatattgcaaggggtgttttgttagaaccatgacccgggggccaggtacacagtgtttgatgcagcctgtgctgggctgagatggttagatgcaggaaccagcagggccctgattccctgctgctctggcgctggtgagaagaaaggcatatcgctcatgagccatgtggatggtatgtgtgactcgaagcaggcaagccttagggatgcttattgctcttagtgtagagaggaagcctgaacacagggaggagccagggaggacaaaggccctggggcctctgagcttaggcctctgagtttacggttggtgcttctcaaaggactggagctgggaggccagtgaccagtggggtttttgtcttgggtcctgtgaaggccagagatcaacactttttttttttgttactgtctctaattgcatgcctgagtttgagtatgtgaacatgagtgctggtgtctgtagaggaacaaggttcaggtgggttgtcatccacctggcatggcttctgttctctgtaagagcagtgcacccctgagccacctctctgcctcctttatgtatgcatgtcacatttttgtgccgtgtccacagaggcctgaggaaggaggccagaagagggcatccggtcttctggtgttgagccaccttatgggttctggggaccaaacctgggtctctgctctttaccacagagccatctctctagctctagggtactgttctagctttaagcctgcctggagataatggagaaaccgagggacatggt

SEQ ID NO: 30598 - DNA, 1100 bp, Mus musculus
ggtggcaggcactgggcactctcagctcttgattgtcccgtagggcttccctcagcctcagcctggcctcagcattggcctgtctttctcttccccccaggtttatgcagcaccctaagaactttggcctgattgcctcattcctggagagaaaggtgagtgccatccctggctggcagagctgggcactaaaccggcttgccatccactccttagggccgatgtctgggctgggtggagcgcttgcccctcctctgtctctctggccagctccatcctttttcctgcctccacctccttcctcagggggaaagccaggcaggccccaccctggatggggaggagcctcaaggcttcaggcccaggccacccaggaaagctgtagggactggcatcacacagccatttgcccagcacactgggttgggcgccggttctaagagttttgccacgttccaactgaggccttgtggccaggaatggcctgcatccaggtctgtgtgtggagtaatctcctgggcccttgtcatgggtaatatgggttttctgacaactctagataccactacttccggtgtgtggctaacatgtctatcattctgaacaaaccttcatgcagaattgatatttgaacccaacctgttccctaaaccagagcctgaaagcactctcctctggctctgtctctcgtcggtaaggagttacattgtccccagagggcagttagctggctttcacttacataccaggctagcctacagtacatgaacaacccgtggtgggcaggtggcagggttggctgtgtgctggagttggtcctgtaggcccagcacctcagactaccagggcccacccttgtgggctgtagttggtgtctagaccctcaacagtgggatgtccagcctgcctggccccctgccctgagtctgcccagggatgctggcagctggtgggaggtgggacccgggatctagacagccgttctcaaagaccgtgatcattcctcactgttccagtgggctgatacggtctggagagatgggaccctctgggatctgggacctgaagaaccagtgttgggaaccagttatagcctacct

SEQ ID NO: 30599 - DNA, 1176 bp, Mus musculus
ctccttcccgctcagctcagccaccccgctctgtcttcactcagaccccagggctgaggccattccctgggagcccttggtgctccccagagagaagcctgcctcgcttttttctgcggggccaagtgtgcaggagaccagtcagccacgttcctacccagcacaggccgacagacagagatgtctgcttcctcccctggccaggccccctctctccctgtgagcaacatcccactgtctttagacagtggttgtcaacggatcctagctccactgtgggccagatgcacacacctccccagtagatgggacagactgcagcaggccacgcggtggtttgatctagtcagagactgtcccgtctcagacagtaccacacctccccctcggaagctgcttgttgggcctttgtgctattgcctggggctatggagcatgtaggacgtttctgaggtcttgggaccctgttgcttgtctgcaaggtctgggacagtcccagctctcagctggtatctgacgttagctggtgtcctctgctgtctctggcctctggtctctgagtgttctctttcttctccctggtcctctgggtgggagccaagaggcctaggctggactggtggagtgtgttttggggccctctagccgtagccccccatcttccctcagctggagtccaatactctgggggctgttgttcaagacacagacacagggagctccgggtcagaggttaagtacactgtggccggtatcagggcctagaacatatccaaggtgttatatgaccgagtctcctgtcctgtggctgatagaggcgtgaattttgaaatgatccccttggatatacacagggcatgtgtctatgctctgggccaattgggagataaacagcaggcagcttggtggttaaatggggagggggacttccttatcctgcagaggagggcagaaccttcctttccaatgtctgctaggttttggactcttagatttggggagtgtggctgcaccagagaccagggatgaggaactgcctagaaagcggatactccctggggacatcttttctgggccacaagagctctacagagccatgctgcccaggacaacttcctgcaagtggtggggcctggcctgatctcctgtgcagtatcctgcagtgtcggtagccgg

SEQ ID NO: 30600 - DNA, 1221 bp, Mus musculus
tgggtgtcctcaacgttctctgtccaaccacaggaccgtagcctggcaggcaagctggagcctgtgtcacctcccagtcccccgcacgctgaccctgagctagagctggcgccatctcgactgtccaaggaggagctgatccagaacatggaccgcgtggaccgtgagatcaccatggtagagcagcagatctccaagctgaagaagaagcaggtgagtagtgagggcgggcagaagaccggccccacgtcctcaggtgcctggagccacacaatttcctggtggttggtgtgtgtgtgtgtgtgtgtgtgtgtgtgtgtgtgtttaatgttttgcttctggaagcctctgggccgggcccatcaggctcatatatctgcacggtcaacagagagtcctgagcttcaggggaccaaggcttcccgggagaggcaccatgagctgcccaaggcagagaaagagcctttggttgttcttgcataaaagctgaatggggagccgggagctgggcactgagggcttccaagatggtggcccagaatcccagagtgaggctgggccctggtgcggtcagattggccgtgccagaccagtggagctctcacatctccagtcctccaggcctggcttgggggctgggctggagccactgttacatgcatggatgttgatcaagtctggaggccaagtgacttgagctgctgttattagttttctttttctccttttatttttttcctcttaacctaaatttctttcttgaatgttatcttaaaaaataatttatatatatatatatatatatatatatatatatatatatatatatacacacacacacacacacatacatatatataaaagtataaaaataagattatataataatataaaaataaatgaatgagagagatggttcggtggttaaggacatgtattgttcttacagactacccaggttcagttcccatcacccacatctgacagcttacaactccttgtaactccacctccaggggacagccctaacctcatgtacatgcacatatgcagatgtacacacatgtatgtgatgtaaatatgttgtaataataaaaatatttttaagaaaataaaatatacttgtttgcctgtgcgcatgtggatactccctttgtaggagttggttctctccagctttgtgctttgtcagcctgtggtgggttaacgccaccaccattt

SEQ ID NO: 30601 - DNA, 1225 bp, Mus musculus
tccagtggttctcaacctctgagtcatggcccctttgggggcctgaatgctcctcagggggacctgagttgaacctctaggacctgtatagaaagctggcatggacacgtgaacctccagtggttctcaacctgtgagtcatgacccctttgggggcctgaatgctcctctgttacataacagtaacataaattactgttatgtagcaatgaaataattttattggggtaggggtccactacaacatgaggtattaaagggacacagcctaagaaaggttgaaaaccactgctctaatcccagtgtttcggaggcagagccagggttcctgggacttgctggtcagctagcctaacctgattggaagggcctgtgccatggtgtgaggacgcccccttcaaaaaacaaaaaccagggttagacaggatctgaccagcgcttgagatgtcctctgacctccactggcctgtgtacacattcacccacacttagacaaaactgagtcagatcgagccagctggcccagccgcagagccaggcctggctggcaaaggcctgtgtagctgctcactgcccccgctcatgtgcttcctctgtgcctgccatgttgaccttggctgctgctcctcctgtgttcttccaccccagggcctttgcacactctctctgcccgaggtgctttccgctggggcatctctacctttgcttccacattgcctgacccgagggctctttcctggtttgtcagtacctaacaccttcacctggctgagtgagggtgtaatgtgctaggccttgtctgtgctgacctctacagtatgaggctgtctctctcgctgcagtgtgtcaccccactacacctcaagttcttgaatggtgaggctggtacctgccctggtactgctggggatctgagtctcccatctgtcttcatgtctgatacctttgtctggactgcagtgcccgagaccaggcgcactctcctctgaggctgtgactgctctgggcctctgtgcagcagtcctaggtaccagcgagtctcagcgtctggatttgtcaagcaggcagctgccttcaactgtatggcatgcacgtgggtggatgttgtccttgcattcactggcctgcccctgcctggcccttggggacaggtgtgcacactggtgtgatagctgtggcttctgtgccagaagtccactctgccctagtgtcagagctggttggg

SEQ ID NO: 30602 - DNA, 1502 bp, Mus musculus
ttttaaacatgtgggcagacatttaagccattcctagtttctttgtgcggcggtgttatctacccactccggactctgcccccttcactgtaacaggccagtctccctggcctcagttttcccatctctaaagggagaggttggaaccaagagacctacatgactgaggagtccccgtgtctatagagtggcatctctgggttcatggcagacagggctggatgtgtcaggaagtggtttctgtgctggtgggatgtgcggtgggactaggggaggtaggcagggcagggctaggtgacaggcttgtgactcagcttccttttttctccacagggtcctgaagacactataagccccccaaacctgatagcttggtcagaccagccacccagtccctacaccccgcttcttgaggactctctcagcggacagcccaccagtgccatggcctgagcccccagatgtcacacctgtccgcacgcacggcacatggatgcccacgcatgtgcaaaaacaactcagggaccagggacagacctgctgccaagtgagcctgatgggccacaggtgtgctcttctaaatggcctgtgagccaggctgtgggaactctagctgctgtcagcccctcctgtaggagctggccctgcccaggctcctgacttccctcaggaagtctttctgtctttctccatcagtctgaaagccttagttcccacagaggacggatctgtcactcctaggggctgggcatatgtcggcctcttgtgccaaggccaggcaagcagctccaggtcctgaccagtttgcacacacactctggagctgtatctggcgctttttctatcgtctctgctatgtcactgaattaaccactgtacgtggcagaggtggcaggcccctcagggtccttatttttcaggcatggggtcaaagctagaggtatgggccgtctacacccccccgccccccggcatctagtgtacctcaccagagggtattcggaggcccagcatcctgcaaccgaccccttttttctactggaagagaaattttatcatcttttgaaaggaagtcatgactgaagcaataaaccttttcactgattcaacaacactggcttctgtgactgttttctgggcagggctgggtctccagaatccaggccacatcagtaggtgttcccatgactgccagcgagtctcctggtgtgaggccagcaccggccactagccatgtttccacctcaaggctaatgtggtatgtggcttggatgcaccaggacaggctagctctgtcctttctctgtcccgtggaaccttctgggccttccagcagtctgtgtccaagatcagaacatccttgtgaccccaagtgacaagcctgcagcgtctgggggagggctggaagggagggtctaacttttgtcccaagttcaagcaggggttctacctggcatctctgagagtaaaaccatgttttgcccttaagggacccactagga

SEQ ID NO: 30603 - DNA, 1064 bp, Mus musculus
ggccggaagagggcatagggacctggagttagacggagttgtgagccactgaatggatgctgagacttgaacctgggtcctgccagtgttctcaaccacaattccctgggtttactttatgtttagctttgtgtaacgtacagagtgagactgagagtcctcctgcccccattccctgcttgcccggcagaaacatggtggtaggagtccagccttggggctggagagatgtcttagcagttaagagcactgacggctcttccagaggtcctgagttcaattcccagcaaccacatggtggctcacaaccatctctaatgggatctgatgccctcttctggagtgtctgaaaacactaaagtgtacttatgcaaataaaataaataattctttgaacgaaaggacccacatgctggtcactcctcagcatcgcagatcacatgcctgggaaccactgaggaagaggtggactctgggcttcatggtgaaaactaagtccgggaattgctggactcagctaggcttctgtacacacacacaccctgggactcctgcatgccagaaaacactctttcactgaattacatcccagccctcttcactttttaggtctcactagattacccaggctgcccttaatctctctgtagcccatcatggccttgaacatgcgccacttgatctgactcatctgggctcttgaaaccggaggccaaagtgggctggccacgggcttgagttcctgaggtcagcagccaaacattgatttgctccactgcctcaaatactctttagaaatctttatagatttatggagaggtgtcagagacgcaagcaaatctttgttctctgtccccggtgcattcagtactgtccgctcctggcagtatctgtcacggtaaggaaccaaagtctagtgcagcgttattgccacaactgcagcttctcagcacgagatgccgcccgctcacgcctcacgcccggctcccgtggctgtgatgggttgttttgttttgtttttttcttttaatctttgtttcttgttggtgttgtgagttttggga

SEQ ID NO: 30604 - DNA, 1120 bp, Mus musculus
aatatctcattggtgctgtcccttccattcctgtgatgtcagagacccactcacgtgtacccctgagctacaatgtctccaaaagcagtctgtgtgcctggcttgacattcagactccgcttccactcctaaattcatatggtgttaattttcctttccactttcatctcccatgattccctgctgcacctccagacctggaggggtgggggtggggggttgaaaatcacgtccaagctctcacctcttgctacactcccacccggaatgcctttcccttgccgggtagcagctgctctctcccttcctccacccacccacccacccacccccaacactgtaatcggccactctggctccatccacccttcccaggtcctgtgtgtgctcagcttggtccccagtgttagcatccctgcatccctggcaccgaggcaggccaacgtgacgctcccgtcttctaacgcctctcttcccctcctccaggtgcgcctctgtttctctcccacccccacttttacaacgccgaccctgtgttgtcagaagctgttcttggtctgaaccctaacccaaaggagcattccttgttcctagacatccatccggtaagctccgtgtcctgctagtggctggggcccattcccagagattgccactggccgctgggcacccgccccgctccccccaattccccaggacagagcgggttccaactgaggcaggggagttcagttccttccacagcggctgctcctagaacttcaagtcatcaaagtcttactttaccccaattccagagttcagtgatatcattaccttttttattggggcctataaaaagatataagatagtaaattaattaagacctatcagccgggacgtctccttcaccagagacagatacccttgacagtgtcaagacactaaagacatcatcgtgggccagtgtctcacagagaaatcagggggaggaatttgtcctctgttaacttctctctgcctctggtcactgtaagatgtgtccagtccagggttcctgccctacgtgacgccctgaaggcattccgtgaagaactcttttttgttttactgggtggggatggaagcctgggttttgaa

SEQ ID NO: 30605 - DNA, 1185 bp, Mus musculus
tcttcccgtgtcactcgggtgcccttgctctctcgccagctcgtattgcaccagatgtcaatcaaactcaaatgaaatgcttcctctgatcctgatcagatcctcccagacactctccctgatcttccgtcccctctggctctccagccgctctctggtacactctctcttatgccttcctgttgcctgctcatggctgtcgatgttatttactgaaccctcccctgcttgtctcctccttggactgcaaaccctgtggccatgtcccagtaggatattgggagtcaaacttctaaggcccctacacagacgtgggatccagggcttgcctgcggacaggaagtttcactcacaactgcacctccgccttcccctccttgtaccagcaaaaatcccagggcttggttgaactggtccagctctgacctagtcattaggctgtgttaattggccaggctgggtcccacacaccgcaggggcagcaacaggcccacatcacacagaactctgctgtcaggaacagaatttcagctgtgaaagagaatctaagtgtagttgtgtctgtagcttgttcttttgttttgttttgttttgttttccggagacagtgggtttaagtatgcgtgtgcgtgtcgcacacgcgtggagggaggtataaacaggtgcatcgatggatggagaccggaagtgagtgtcttccttcatcactctttgtttgtttgtttgtttgtttattgatgcagatttttcaatcactaatcctggatcttgggaggtccagggatccacctgtctctgcctcccagttacagatgtggcgctgctgggaacccgaattcgggtcctcacacttgcacaggaggctcttaactgactaaactgttttcccagcccctaaagcttgccccttgtaaatcgggtgagaacaagaaaggggaagaggaacagggattcgagtgatagggaacacggccatgtgaccaacaaccccacaaagaggcaactcttaccacacccaacatctccccttcctgctcctcctgcccactggcctgacttttggtctctcggctctctgcctggcattactgtttacatagatggagtcacaactgttctttctccctcgatccctgatgcctcccatgatggctctcatgattatatggtaaatctgcaagatag

SEQ ID NO: 30606 - DNA, 1187 bp, Mus musculus
tctaccaccccatgtgatgaggtccaaggccagtaccaccactccagactaattttaatcgttcagacaaaagtttggtgttcttttgggggaaggagagttgaggcaggattacactgtctctggctgaccttccagttagagatctgcccacctcagtgtccccagtgctgaggtcagcgataggcatgggctcagacttagttttgcagtagtaacttgctatattaccattctgaaactgaatccgggactgctgtggtttcataacctcccagaggtcaggcttttctgcaaactgttcaaatagacagaaattgactttcagctgttggtatactgaagtctccatcctgtaaatttggtaatacaaaaagactcaccatgccgaggtttcttaactttgttagtcaacaatcttattttcttgatggtttttcggggtggggggattggattcaagacagaatctgtgtagatagaccttgctatttagacttatagcatccagttgacaaatgttgatgccatcccacaaatatttgtgtcattcctgacctgtgaattgttttgtatattttgtgacagacgatgcagatctttgtgaaaaccttaactggtaagaccatcaccctggaggtcgagcccagtgacaccattgagaatgtcaaggcaaagatccaggacaaggagggcatcccccctgaccagcagaggctgatctttgcaggcaagcagctggaagatggccgcaccctgtcagactacaacatccagaaagagtccaccctgcacctggtccttcgcctcagaggtggcatgcagatctttgtgaagaccctgacaggcaagaccatcaccctggaggtcgagcccagtgacaccatagagaatgtcaaggcaaagatccaggacaaggagggcatcccccctgaccagcagaggctgatctttgcaggcaagcagctggaagatggccgcaccctgtcagactacaacatccagaaagagtccaccctgcacctggtccttcgcctcagaggtgggatgcagatctttgtgaagaccctgacaggcaagaccatcaccctggaggtcgagcccagtgacaccatagagaatgtcaaggcaaagatccaggacaaggagggcatcccccctgaccagcagaggctgatctttgcagg

SEQ ID NO: 30607 - DNA, 1208 bp, Mus musculus
aaaaccctttgtcattttccttgttaggagatttgcacagtcatccaccctgtcactgtgccaaaacagtgagggctgggcatagtgacccgccggggatgaggggattgaggaggcgaggtcaccaatgggatcccagtgtgacaggagccaaagccctgggtccccctagcgcggaaagaaaacagggggggtggggggtggtggcctgactaggggcgccaggccgcgaagccgcagggcgcctgcgccaaggcccgctccggcctcagtgatcccagccgtgttttcgtgccgatcgtctcacgcgcgctgatccctccgcggagtcgcccgaggtcacagccctgccctcccacacaaagcccctcaatctctggacgccaccgtgaaacaactccgtgagagaggtaccttgatagttttagcctgtcgctttcgctgccgagactggacccggcgttacaaagtagtccctgaccgcattgcccgcggagggaccgcgcggaagggggggggcggggcttcggtgactatataaagagacgccgggcgtgccgcagctagttccgtggagactgcgagttccgtctgctgtgtgaggactgccgccaccaccgctggtgaggagaaagccgccgcacccggtcggggacgggaggctggaggcgagacggggcgagaggcagccccgcggcccagacgtttggtttccgtggcccgcgcggaccgcggctgccccgaggcagaggactgggcggcaagatggcggccagatggaagcctgagggggaagacgcggggctctgacgcgcaggacgaggttgggggaggaaaaaggcccgcgaggccgctgccctccggttaagccggggacgtcggagactgtggggtggggactgaattagggttgcgcgccgtaggagcctctgctgtgagagccgtggatattgggctggcccgagaggtcgattggcccggcgttcgtccgttcgtttgctgaaagacggaagtgcgatcgagaccggaagggggttgggcggcggttcagcctgcctggcctgccgccccctgtgacgtcgcgggttgcgtggcctcctaatggatagtgacgtcactatcttgactttagctttccctcggttgtaggacagggtttgggtctcggcctccggtagcctctccagagtaaacaggaaccggaaatt

SEQ ID NO: 30608 - DNA, 1196 bp, Mus musculus
ttacagaccagattccatccacaggtacaaggccagtctcccaacgtaggccctttaaaaaaaaaaaaagttggagatgccggggattgaacccggggcctcatacatgcaaagcatgcgctctaccactgagctacatcccctgatggagagacttactttccggaatagataacagaaatgaaccgcttgctgttctaaggtttggggtttttgtttttgtttttgtttttttccgatcttgatttatgatgttggtgtcatgtgctgaagcctcgggagaaaggaaagggggagaggaacagagagaaggaacgtagaagagggaaggaaccgtgcgcccgtcactatctgtgtctttctttcttttgttttttttttttttgttttggtttggttttccgaggcaggatttctctgtgtatgccctggctatcctggaactcactctgtagaccaggctgaccttgaactcatatctgtgtctttctatagcagcttgtcaagaaacagtttagcacagcttgtcctcgttagtatagtggtgagtatccccgcctgtcacgcgggagaccggggttcgattccccgacggggaggctaacagtggtttttgcgttagcacttttaggaaatgatggatgtgtgtaggaagctctgaaaagacccttaccgtgcctaaacacaatctgctttcaacaactttatagagaccccttggtctcacttaggaaacaagtctgaccctggttatctttcaaacgcgaactccaaaaaccgcaaccctgctgcctaaccaggcagcctctgccgagaggcccctccctccttttcttcccatttttcttaaccatcttactcaatttttgccccgaagatcggtttttatcttctttctttatttttaaaagccaaataaaagcacgcgttgagaaagcatatatcagttgcccatgtctcgccagggttttggtttttaaattcctggttaaccttgtaaccccagcaggccttcatgtcccccacttccattttggtttggttttgtgttttgagacaagacttttatgcatccaaactgatttttttttaaagattcatattattttatgtacagcagtgttttgcctgcttgtgtgtatgtgcactatgggtgtgcctactgctggtagatgtcagtagaaggatggctgtga

SEQ ID NO: 30609 - DNA, 1160 bp, Mus musculus
gcccacaaggctgattctcgtgattccctgctggctgcatggaagaagaaccccaaatgtgagtgtgactcagcgggggtcaggggacattgctcagtggaaggacctaaccaaaccatgggcctgtggcggtacgtccaaccatgcaagccccgggccttgcgctctaaccctgcctgcctcttcccacagacctgctggctgagtactgcgagtggctcccaaaggctatgcacagcgatgttgagaagaactggccccctaccactgacagttgaccacacacccagctgcacagtcaactggctcctaggctgttaccaggagccacgctgtggccctgacagcccttttctgcccaattcagaagcaagctcacagctacactgaccaggagtgcccttctttgtgactgttataagagcagacatggtttgtcttccacattcctactgtctaagacggactcttcaggtgacattagaccctgcagatgcacagagcaacactgaaacaggaaagtggacccttctcccagagccctgtctggcctcatagcatcttggacagcaggtgtactgcagacttctgtgacccagtgactttcctgaaaggttaaccccagatgagggatgatcaccccagagctttgctccacatagatggagactggtttccggggtcctgctttggcatcagtagacagcaagttctgtctttagtgggccttggctggtaaggatcacaaatgcaaggccaacctgagctacacagcaagactgtcttctatttgtttggttttttttttttttttttttttggtttttggagacagggtttctctgtgtagccctggctgtcctggaactcactctgtagaccaggctggcctcgaactcagaaatctgcctgcctctgcctcccaagtgctgggattaaaggtgtgtaccaccactgcctggctatttgtttgtttttcaagacagggtttctctgtgtaaccctggccgtcctggaactaggcctgtagaccaggctggcctcaaacttagagatccccctgccactgtctgccttaagtactgggattgaaggtgtgtgtcaccaccacctagcaagactctgtctccaacagttttgttgagagtaaatgttggtga

SEQ ID NO: 30610 - DNA, 1378 bp, Mus musculus
caggccatggtacgtggaagtcctggagacctgcactctgctgttgccagcttcacaaactctttggacttaagggtcactagcatgaaatgaatgtaaaaatctatttcgcctgatgtggctgggagccacaggcgggggtggggggcgggtacaggggggcgaggtctggggtcacactggtccagccctgttccacagcagagtcctggtggattacaattctagaggcttgcaatgttgagtgtgtgtctgttatgatttacaacacagggtctgcctgagaggatcctggagcacaaagcacaaatagagccataggtgcttgctgaagtagggagatgtgctgtctgaagctgaggggccagcaagagagggcctccccaggcaccctgatagctggatgcagtgtcagtggcttcttggtggcatgtaccctctttattcatttaaggtgggccaggcagcttgtaaaaactgtgtacataactcacaacagccttgtgagatgaccccatgctcatatccgacttatttgtttgtttatttatttatatgcttagttggacagaattgtcactatgtaatcctggcaggcctggaattgctatgtagaccaggctgtctttgaactcacagagatccatttgtctctgtctctagaatactgggaataaaggtgtgtaccaccacacctaactcatacctaaatttttagaatttctttagattcattttattttatgtgcatgagtgtttatatatgagtaccatgtgcatgcttggtgcctagggaggtcagaggagggagtcagaccctctggaactggaattagagatggttgtgaactgctgtgtgggtgctaggaatcaaacccaggtcctctaagaacaagtgctattcactgctcagccactatccagccccccatacctaattattaattaggaatggggcagagaaggtcgttgtttagtggccttccctcgtacggcactgtgtcgtacatggcttggttcacacccaggttgcctgagcccatggtgttggcatgtcctcaggccttgccccagatcaacctggacaattactctgtgctgccagccggcgaaggtgatgaggacagggaggcagagatggacgatgaagaggaggccctgggctctgacctagatctggacctgggtgacagtgaggcaaatgaaggtgcggcctgcagagctatgcgcttgggttcgttgctctctggtgtcagcacaggtctgctgagccctattgcatgagaggccctgttggccactgggaccagaagaatctaagtcctgtcctcacacatgggaccaaaaacattctagcacctactgggatgtgagttaa

SEQ ID NO: 30611 - DNA, 1093 bp, Mus musculus
ccagtcagttggtcctttgagagccaactggccaaggaagcatcttgagagcacacactcccagataccctgaccaagagccagcagaactctaggggaagtggtaggtgcagtgcagccagattgtggtgtgtgtgtgtgtgtgtgtgtgtgtgtgtgtgtgtgtgtgtgtgtgtgtgagagagagagagagagagagagagagagagacagacagacagacagacagacagacagacagacagacagacacgggctttccgcattctccatggtggtggaccagctatcaacccttgttcgtcacttggctacagactgtccccaaggcagctcctggttttcctgtccagtcctctcccgagctcacacttcagtacctgagtggcttttgggaggacagtggattgattggttgattccttactgtcttctcgtctctgcagttactgtccaggctgaccgagcggttcgtgcagggagtggacatgttcttagagacgttatggaaagtttggatggagctcttagaagtccttgggcttgacggtaggtacggggatggttgtgcaaggtgtttgggttgcgagcttttgttttggggggctgtctcactatgtggggagtctccgtgtccttagctgagagaacaccagagggctgagggtatggagcaccatggggaggaaggagcattttacttttaagagctgaacctgtggtctgtgaaacttcaaaagctgtgtgggtacccggtggtggcgcacaccttcaaacccagcacttgggaggcagagacaggcggatctctgtgagttggaggccagcctggtctacagagtgaggttcagaatagccagggctattaaacaaccctctcttgaacccacccccccatctcaccccccaaaaaatactgtgcagacaatggaggtagagcctgcagtgatggtgacctgggccacctggagcctctggaagccagaagagggcagaagaggctcccgagagtcctcacacaggtatgctgtatgcagggctgtgtgtttcagcatgccagaggtagagtcagtagagaggaaagtcactttgg

SEQ ID NO: 30612 - DNA, 1198 bp, Mus musculus
atgtatgcagaacctaagggtctgtctgacattgccctgtctctggagttacagatggttgttgggactcaaactaggtccttgcaagagcagccagtgcttttaaccactgagtcatttctccagtcccataaaaggtgtttttgtgtgtgtggggggggggggggaggggttcgagacagggtttctctgtgtagccctggctgtcctggaactcactctgtagaccaggctggcctggaactcagaaatccgccttcctctgcctcccaagtgtgtgccactactacccagccataaaaggtgttctcaactcatgaggatactaatagtcctgagagaccacctgtgcccctcaagtatttgctttattttgctttcgttgtgtcgggttgtgaccggagcctatgggtccggccccagagctcagctgtccttcctgctttccgagaaggtcccgaccacgtgggaataactggccctgtcctcttttgcagtgtccaacctgtcacagtacttcagcccagcctcagtgtccaacagccccacccgggccctggtgctggttggtgtggttctcctggcctactggttcttgtctctgaccttgggcttcaccttcagcctcctccacctggtgtttggccgcttcttctggctcgtgcgtgtcatcctgttctccatgtcctgcgtgtatatcctacataagtacgagggcgagccagagcacgcagtgctaccgctctgcgtcgtggtggccatctacttcatgacggggcccatgggctactggcggggcagccccggtggcctttgcagccccagtgtggaggagaagctggaacacctggagaaccaggtgaggttgcttaacatccgcctcaacagggtgctcgagaaccttgaccgctccaaggacaagtgaaggtcagctgcctagccgtccaaccagctagtgatgtcaaaagacagaagaagaagagaagagccggcaaccccaccaaatcccaaccctcccaataaactgagcaaaaacgccacgcctggtatttcccactgtgtgtcgaccttaggagccactggaggagagagcactttcgtagatcaccagtgggaaagcagtttttaaacaacggatataccccctgttagctgtgtagtcggataactttacctgtgcatagaacataatgttgat

SEQ ID NO: 30613 - DNA, 1112 bp, Mus musculus
tggggtccagggcattgcttgttaatagctaaacccctgggtgcagagacctctctgccagcttctgtggaaagagagctggcttttgtgggatgtcactagggtcgcccgtgaggactgtggagccactgagtcccaacttgagcttggagggggacccagctgatggcagctctggtgccgtatgtctgtgaagttctgtctttggttacaggtatctgtcacacagatttgggtctttgaggatgtggccgagagagacctctgttctcgaggtgacaggcagtatgggactctcattttcttgaatttcattcccttctggaaccggtactggggaaatctctccacagacattggaaatccacaacttgtgatgtgaaacattccgattttgttgtttagatgctctaggcatatctactcgcggcacagggtggaagtagccgagaaggggcaccttggctgttaatatctttccttccagatgtctggtcatatcatactaaaagattacttttcagatgttggctagggggcagtcactctctgtaaagctaaaccttcttgccttggctcctctcagtggccacttgagatgttgtaggtcgattcctatacagtccactgtagctaagactgcaactccacccagtattcaggaggcagaggcaggaggattgctgctatttgaaggccagccaggtcttaagtggtctatttcaggtcagccagggttacatagcgagaccaaaagccaggtatggtagcacaagagagcagaggcaggcacatcggagtttaaagccagtctggtctatgtagtgagttccaggacaggcagttttaatacactgagaccttgtctcaaaacaatagcaacaaaaaaggtaaaaatctgcaatatttttttccagtctgaccaaatgtagactctaaagccagttttatagttgaatatatataatgtgtatatacatatatatgctatatatattcatgtattatttgtatatatacactatatatatacatacacaagatgccttcattttaatttttacatctagttattatgattttttgagacagggtctcatgtatttaagact

SEQ ID NO: 30614 - DNA, 1872 bp, Mus musculus
cacgtggtcctgtcactccggcctgctcacagatggctcggaaacagcgtgaccaggaagcccgatgtgctttgcaaacccaggactcagtctccagatagataggaaggtgctgagttcaaagccatcctggtctacgtggcaagaccctgtctcagcaaactaacccaacatgttcaagagtcagcacgagaatctttaacaaagctcctctgcatcttgtgcttggtaggcagcctgaagcacttcccttcttcacaagccctgttgctttggtctgttctgagacagggtctcaatctagcccaggctggcctcgaacctagagatctgctcgcctctgcctcccaagtaccaggcttaaagttgtgcaccaccatgcccagaaagccagcattggtgagcctggtgcgcacctggagctacaaggaatttccaaggcgaccctctcagcctctttaccttcaagtcctgggctcctgagctctgcccccagcatgaaagctgctttcaaagcaacctgtgataattctgtaatgtttttgagtttgaccatttatgtacttgggctttgggctcctcacctgtgaattgtagatttctattttgcgggttttaacccaatacccttgtcactggctggcatcagcaagcttcggcctttttgcttccttctgtgttttgctctttggtggtccttccatagctaggacagacacggagaacctgtctttcagtcctgatggcacaaacagcacattgttgctgccaccgggacagctacggcagccagtggcatgcccgactctccgcccgatgtctctgcggatttcaagcttatgctgttgtgtcagtttcctgtctgcatctgtgataaatctctaaatatcctgtaattaaattaatttctagtgacagtgatcaatgtgcagttaaatcccccaagaggtaattatttccctgtttttagctgcagattaaaaaaaaaaaacaccaatgacttcttcacagttgagtttctgttttgtgtctcagcttaggaaattttaaatagtatttagtttgacacagtagaaagaaagccattccgtgtgaacatagtggggtgtgtgcacacacgcacatgcgcaaacattaattgggaagctgattctacgaatatcttatatagggaaaaaaaagcgtcaggcttagtatttttttgcaaagtgatggatacattcctcttatttattaatcactggcttgatgttagaggtctttgtagatcgactttaagaattggattaaaatattgtgaacattgcggcttaataaatgtttactgtggtgatgttcagactcctggatggatttctttactttggtgaggcacttgaggcaacctccagaattagagagtcattttatggctttggtttatttctttatcttaatgtgtatgactgcttggcctgcgtgagtgtatgtatactttgtgtgtccctggtgcccttgatggtcagagtccctggaaacggagttacagatgtttatgagccgccatatgggtgctgggaagtgaacccgggtcatctacatgaatagcaagtgcttttaaatattgagccatctctcctgcactaaagattaatttaaaaaaaaaaaaaagggctggagaggtggctcagcggttaagagcactgactgctcttctgaaggtccctagttcaaatcctagcagccacatggtggcttgcaaccaccccaccccccaacccccgtaatgaggtctggtgccctcttctggagtgtctgaagacagctacagtgtacttgcatataataaataaataaatcttaaaaaaagattaagttatctgtatgtgtatg

SEQ ID NO: 30615 - DNA, 1090 bp, Mus musculus
tgtcacatgcctagtgtctgtcccagtctgacaggggtcaattttctctcatctttatcaagttgtttttttttttttttttttacttagtcagaagtgttgctaggggaagggtcagctccttgggcttggcataagactaaatgatcttgcgtgaggattttagttcaaggcccagccttatgctgttgccatgtgactttaggtaagttgctcagcctctctggctgtttctgcactgcctgccaagtgggactgatgataacacctacttcagggttattgttgggttgagctgggcatttgtgtatgtgtgtgtacacgtgtgtgtgtgtgtgtgtgtgtgtgtgtgtgtgtgcctcagaacaacccattggcacaggaattacgtggacttctccgtcaaggtcctaggttggaaatcagtgcagctctcaatatggtggctgtctagttctcacagtagcttcctggagcatctctagggggaccggatctgaggtctccgaacccacagtcacttccgacacacacacattcagcacagtgctcatgtcgggtttgggcgttgaataccttttgcttcttcctcccctgggttcctccccccacccccaatggtgcagttcagtcggaggcattgactcagcggcccgccagcctctctcttgctcttaggagcactggcatcaacccctcatgcacccgctcctcagacccaggcagatgctggggctgcagccttgagtggtagagacaagctccctgctctcatgaggttgatattttggggcctggggggggggtgaccttagtgctaggaagaagaaagaagatagtctaagaggaggaaggaagatagtctaagaggctgaggggaccggctttagtcagctgcccagtgaagggtgagggcctgctttctctctctttctgagaactcacctcactccttggctcctgtccctggaatcagtcatcctgctggccttggcacttggcatcagcatttgtttgttctttctttctttctttctttctttcttaatacttttattaggtattttcctcatttacatttccaatgcta

SEQ ID NO: 30616 - DNA, 1207 bp, Mus musculus
tgccaggaggatgttgactttaggaggacctgtggtgtctttgccagcggtttcacgtggtgtctttgccagctatttcacgtagtgtctgtgccaactgtttcacgtggtgtccatgctgactgtgtccacgccagctgtttcacgtggtgtccatgccagctgctgtcctgtggtcagctgtttctgacccaggtctgcgtgcctgggctgagcctgggctgctctcctggctcactcttcagggtgaatgcgtaaactcacgtctgctttaaagtgtgtcctctccacaaaggcttttgaggtatcaactcatcttcccagagagaaaagtgtgggttgctcagggcccatcactttggtccatggcccagagagctgaggtgagacctgtgtgcccttttccacttccggtgccacttccctgcctaatggcgcttccggtgccctttcccatacctgactccgggactgtctgggatcaacaagactttgcttagaccgaaactccatgagtgcctcccggccctaggatcttctgtggggttggatgagctagttggggcccatggagtccctgtgggaggttctaacaaggtggccctgggtgctgttctgctagggtccctcaggaaatggctagagtaaggagacagaaaggcctttggtatgagactgcccacccgaggtccagagcctgggatgggtctgggatgggcacccacagtgcactctgggcattgagaggatgggcacccacggtgcactctgggcattgagaggatgggcacccacggtgcactctgggcattgagaggatgggcacccacggtgcactctgggcattgagaggatgggcacccacggtgcactctgggcattgagaggatgggcacccacggtgcactctgggcattgagaggatgggcacccacggtgcactctgggcattgagaggatgggcacccacggtgcactctgggcattgagaggatgggcacccacggtgcactctgggcattgagaggatgggcacccacggtgcactctgggcattgagaggatgggcacccacggtgcactctgggcattgagaggatgggcacccacggtgcactctgggcattgaggatgggcacccacggtgcactctgggcattgaggatgggcacccacggtgcactctgggcattgagaggatgggcac

SEQ ID NO: 30617 - DNA, 1099 bp, Mus musculus
gaggctaggccactgatcttgagtcccagggccaacctgggtggcctgcgcgatgcctgggaaagagttttgacggtttagccgcctgggggtgggaaggcagagagcctgaggtacacactatgggtgtgtgcgtgactgtgcacatgtgtgggtgagcgcgtgagtgagtagcctggccctcctgacacctctctggtcagacacaggtctgttttgacaactgtctcgcatctgcagaaagcagatggctagggacgatctgtcagagggaatggcacctgaggcaaggaccatgtggcccctccagagcacctgcacacgtgcctggtgaggtgcacagcattggagacacccctgtgctcatgtggttttgacccaggcatagagttgtgtggcatggttccgtggacagtgtcagcactgccttggctgtcgtcaccagcgggttccctcaggtgtctgtaggtgccgtggcatgtgttcgaagccaccgcatagctgggtttatggatctttttggaagcgaatatggaggagaagccagagtcagggctgctctgccgtctctggtttaaacactcctttctgtgttctctgtgtctgccccacagtacacactcaatggcaagaaagtggaggtggccgtgaagcaggtgatggctgggaggactgtggagcaccggggggccttctccaaccccgagaccctcgacctgtaccgggacatccctgagctgcaggacttctgagccagcagctcgcactccatccagctgtgcatgtgatggaacttagggacactttagagacaacagctgctccaggtggccctggcactgcacactccacaggctcaggaacagctttcctctttcggagtcattggtgggggccaggtctcccgagctccaggatgtgcctggccttcggagaccctaagcatacactgaggcttgtctcggccctgctgctataggtcagcacacagccttgcaggggcagggctggtgacatttggtgacagcacactggaggagcgatgtggccttcagcctcatgagcccgctgttgtatctcgctctatgaaggtgaagtc

SEQ ID NO: 30618 - DNA, 1059 bp, Mus musculus
tgtttatcataatggtgtaactagaaaagcagatactagactagtatgcctcatggtgaactaactgagccattgtcagctctcaaaaaatgggatttttaaaggcccaaagcctgaagcacatgcaggaggtcactgatgtcaaagggctgacctctgaacctctcaaggagactttttcttattcctctgctctcattttatacatgtccaggctggaaacgtggcagccgtgcctccggtagccatgatgggacagctaagatgttctccctgcctctcccacccccagcactgcaatgtgcttacaaacagggctgggcatgcaggtcctatgctatatcccccagaagtatgttcgcttgcttttgtgtttagaatggctcctgggaatggaaggtactgactaaagaaggaagctggaacatacaggcattgcatgaacttggctgacatatgctactgccaagagctctctggttagctggctgtttctggaaaggctggagcagagctggtagtcccaaaacacctgtgcagagcagcagatttaccaatacgtttcagatcctttttatgagccatttaaagtcctatcttccatcacagaaataatgggaactcatttctgaaagtgaggtccctccctggaagcaaggacacacaaagcagactgcctcctcttggtttaggtggggccttgggttagcctgtaatttagcaggaaattaccaagggtgatacaagtaagcattgcttgtgattgacaggctttcaatgcgggtggggctcagagggcagaggagctgactatggtcctgaagatgtctccactgccctcttagacatactcagtgaattagcttctgtgcacattcacggtgttgttgtgttaggacaccatcagtttaaatcaaagttgagtggcaggttctgatggaaagctcccttttaacatatatgcagacacatatatacagacatatatgcagacacatatatacagacacagatatgcacgtgtacccacatctgtgcgtgtggataccaaggtgtcac

SEQ ID NO: 30619 - DNA, 1199 bp, Mus musculus
tgttgcctgcgtgtatactgcatgcatacaagtctccatggaggatagaagagggtatcagatctcttagaactggagttacacatggttgtgagcctccatgagggttctgggaatagaaccctggtcctttgcaagagcatccagtgctcttaaatactgagctctctctccagccccctgagattttgagaaaggattgaacactgcagcaatcctctggctaccgcctgttgaattctagaatttcaggtgtgagacaccatgtctgtcttgtgacagaacttacgaatatcttacaagtgagagtgccacttttccttgacgtgtttaaagagctctcatgaggatgagtggctacacccaatgctgacttctccaaccacgtgtgtttccaaggacagtcctcctgatagtgctcacaccccagtgggatccatgcatactgggaagctggctcagggtgacatagatgatcttctaagagtgacctccttttctctaggtctggaatttgcatactcagctgcccccaagtccatgcagagcgccatcatgggactcttcttcttcttctctggcattgggtcctttgtgggctcaggactgttggccctggtgtctctcaaggccattgggtggatgagcagtcatacagattttggtgagatttgatgtctggaggggtgggaaaccagagtgcttgctgtgggttgtgtgaaaattcagtctgtcccaagaggcctctagcccaacccctgctgaatctagcttagcacttcctgagagctgggtgagaagcgagacctgcgtgtcagctcctgtgtcagcctgctcttatgttttggttcctgactgtgttgggtttcagattttggaagggtgggtagtgctttgtcagtgaacactgctgctcctggaggaggcttctggttgttgatctgggcagctctgcagtgctgtgtgtgatccagggactacaacatcctttgccttttagataagtacatgttccctatgcagaagtctgtactgtgagcatttgcgcagcttggtggcatttaatctgcttttattgcatagctttgggaaagtcaggaatttttttctagaaattgtgggattcccagggccttgaattggattcctttgaatcttggggtaatgctcagaagcccgaaacccccttccccaacctc

SEQ ID NO: 30620 - DNA, 1195 bp, Mus musculus
aagaagtgttgctacttgagagttctggagttctcagaggtgttcatcaaactttcaagaccagactcctggccttggcctctgttccactagtatatattacctctgtcatttaagcctaggtgtggtggtttgcatgaagtggccctcataagcctcatatctttggttggatacttggtccctagttggtgactggaggaagtatgggtaggcattttatcttaaattgtaactgctgctctagtcagcagtctgtcttgccatgatgaacttgaactgtgagcccaaaataaacccacccttctctaagtggccttggtcatggcatctctcacaataaaggaaaagtaagctacaccctgggtcatagtagtacataagttgtacctgtgactgtacatccctaccttgagcggtttgagctttctgatgtgcactgggttcttgtgagccatcatgtggttgttggaaatttgaattcaggatctctgctcgctccagcctaaagatttattatatctaagaacactgtagctgtcctcagacacaccagaagagggcgtcagatctcgttactaacggttgtgagccaccatatggttgctgggatttgaactcgggatctttggaagagctgtcagtgctcttaaccgctgagccatctctccagcccccccgtacactgggttctttagactttccactcacagccccttttcatctgagaactaagtgactctgagataaaaataaataaatattaactgatgtcaaccaagtcagatttattttaaaacagtccttttaccatttattaaagatgaaatccagtttgtgtagtaatgagatgcatgtttataaaacttgataacagtccaaagacagtaactccatctttgaaagctgaagtgtgatgggtggtagggaaatagcctaatggttctttgaaattaagccattatgcttctataagaacagaaaaacattctctcagctcatagcatgttggcctcaaatgaagccagggtgtgccaggcagcatttgttggtgtcatgaagcatgtcactgtgtgaagtgtaaagttgcaggtggtacttgtacagggtcaggactgccaggaacatcttgggtccactgcacatttgattctgagttaagttttgatccttgtgcactcagaaacctgtcact

SEQ ID NO: 30621 - DNA, 1172 bp, Mus musculus
ttacagatggttgtgagccaccatgtggttgctgggatttgaactccggaccttcggaagagcagtcgggtgctcttacccactgagccatctcaccagccccgtgcattggtattttgcttgcaagtatgtctgggtaagagtgtcagatcttggagtcacagagagttgtgagctgccatgtgggtgctgggaattgaacccgggtcctctggaagagcggtcagtgctcttaaccaccaagccatctctccaaccctttcttacatagagcaagcaaaggacaacaacaaaatacaaagagaatttctcttccccaaagtagtcatagaaatctgagccctctttcccagaaaacaaccataaaacctgaaaattctacccccattcttttgaaactgacactctctgcttgcagcataagaactgactttcctagacaaacgtcacgtctccggggctgggaagatagctcagtgaagaagagtgcttgttgccaaagcatatggatctgagttcaaatcccaccacccatattaaaaagaggggttcaggtatagagaaaaaaaaaagactcaaaagcacacagtttttgcagcagctatgtctagaggctcacagccactggtaagccagatcccagggatccaacactcccttctggcctcctgggaatctgtgctcacaccatccccacatagacacatacaagtgcacaaaatttatatatatatatatatatctccaagcacagtaggatatacctttaatcacagcacttgggaaggcagaggcaggtggttctctgaatttgaggccagcctggaatacagaatgagttccaggacagccagggctacacagaggaaccctatcttgaagaacaaaacactaaagtttctatgaggctgagtaattagaatttagtgattctgagtcctttcattggcttggtgaggactggtggtcatgaatcagggcatcacagtgtgacaaggcagctaatctgcccgagtcagggttgggcatgaggctggaaataagggcaaggtttttgtcacaaaaggccaagaacagccataaaatgaaggtagtgttagctgtaggatggcaggtaagagggactgaacctgtgtcccatgcgttttagaagcaatgggggctgttggtag

SEQ ID NO: 30622 - DNA, 1322 bp, Mus musculus
cgggaggcagaggcaggaggatttctgagttcgaggccagcctggtctacaaagtgagttccaggacagccagagctacacagagaaaccctgtctcgaaaaaccaaaaaagaagaaaaaaaaaatgagtggggctgtgaacagggctgaaacagctgcgctacctctgctctgtcctcttcagggctgcaggggtgcggctgatccgagagatgtgccaggaagatctgcatgcagtggtgaagagctgctttgcgctggtcaacagctccgtctccgagggcatgtcagctgccatcttggaggtaactgcagctcgaatgcccaggatgtggtaccattctttctcttctccaatttttaaaaaggatttatttaaaaattttaagtgacacgtatatatatatatacacgtgtgtctgtgtggtcgtacatacaagtgagtgcagttgccggtggataccagatgagggcgtctagataccttggagcaagtatgaatttgcatcaattgctctagaagtgcatgacacgatcttgtgtcatctttgtgtccggcaaagaagcctgtgttctgtgataactgtcagccttggtcgggtgctcagccccagccactggggtggtttgtcgcccccagaaactaacttttaaaccagagtagagaaggtgcccaattgttcttccatacacattcccctctctgctcctatttcttaagaaaaggccaagggcctgaagtttgctgaatggttttctgagcagcacaccctgctttctctgtgtcgtaactgctgtggcactcggctggcctcctaggaaaggcagctgctagcaattccgatgctcttgaagcgtcgtcgctgtggccttcctttgagaaggcaaaataacctttgcgagaccggctctgaaagaagttgattttagggggagtggtcagcgtgtctcttcagaatcccttcagatggccagcgtgttaatcgcggaacacacgcccatccactgggccaggaagtgaacttttgacctttccgaatctgctttcgggagcaggcaagtacaaatgaccgttggctaaaatacacgcttttcgcagaaaaaaaaaaacgtgtcaagagcaaatgtcagccagatgcacagtaacccggtgattattgctaaaagcccgccaggcctttcccactcaagcataccatggatttgcaatactaacaccccctcaagcccccgcccagtagaattaccttaaaggagggagatggagagatggctcagttagttcagagcttgctgtgctgagtccaatgcccaggacccac

SEQ ID NO: 30623 - DNA, 1194 bp, Mus musculus
agccagggggaagctctgcttgcagactttaaccaagcagggctctcatccacttctcaattgctacagaaaaatgcatgtcaaattgtcaaaggcgacagaattttccgtatgcccggagaagcgtatcagttttacggttcatgagactaaggaattaattcaattggtttgggaagggcagacagaattaataaacatcaaagggctgctccaaggctgtgctttgcaaaagggagctgttttgaaagtgggctttgttgagacctgcatccttttttgggacctgcaagccctaaggatttcagcaagccccacgaggggggcgagagccaagacctgatcatctatgttaatgggagtgccgaggcgtggctaatcccaacagtgcggagtgcaaaagtcaccttctgtttggcccctgaagacattatgttctcttttccccccttcagcagacacaacttcttaattatgtttttcttaagctaatgtaaaaatgaatttgcatgtctgcagcctacactaattgaaggagggaggatgctatgaagattactttgggagacgcagctaaatcaattcagggctgaagcagccatgaggtagcctgggccactcgccaagaggacatgtgggcagccatctttcccttctttgggctggggtttctgtgtgggagaagccaatattctttgctactttctgaacctggactacctctgtccttgcgccagaaaaagtgaaagtcagatgaaggtcttggatcttgaagaaaaggaaagcactctttagactcccattcataatctacatttttgaggcaggcaatccataatagtttgagagtgcccctcacaggcacgtgttatttgaacatcacccagaaggtggcactgtttggtgggggaagttatggaacttctaggaggcggagccttagtggagaaaagggagagggctttggggtcttattgcttcaccctgtgagctttcagcttgttgcagctgctggctgccaggtctctctcaccattatgaactctccctctggtactgtaagcccaagtaaactttttcatgtatacattgccttgatcatggaatttcgtcacaacgcaagaagtaacaaaaataaaacacatgtaaaatttagccatccaagatggctccatttaagctacgcttatagcc

SEQ ID NO: 30624 - DNA, 1195 bp, Mus musculus
tgatcatgacttaaattgacccacttattctgatctacattctgccatgtggctggttacccatgcttagataccttgtatctgtttactcacatcttcctgggcaaatctcctgtgcctcactttatcccagaattctttctggcttccaaatgtcctgccttctattctaccctttcctgtaggccctgtgacctctcccactgtaattctctaacttatttctgggaaaagaagtagacggaacctaatttttcctgatctggagtttattgtttataacctaggagggctacaaccttattttttcatatagtaatttgccaccacaaaggttcattcattcttttactctaggtcccttcttgatatgcacatgtgtccacctacattctgcgaccttccctcccttgtccctgtgatggtccctctgtattgtttgcctgtgtttgacctgtgatatcgtgagtccctccctcttcactccattttctaatcaaccgtatcacacctcgattggtgcatataactctgtaatcacactgtataaattgtttattaaaatgttctagagttttgtaaggagatgctgacctattgttggatgcattggtggggagaagaagggaaacagaactaaaaggatgcaggagggagacaggtcagaacatgacagaagataaataagtggaaattgagatgtgtagataagtattagaaagatgattgataggtgatagataagatggtagataatagatagatagatagatagatagatagatagatagatagatagatagattggtagatgataggtagatgacagacaggtgtatggatgaatagatagatgattgataatgataatgatagacaggtgatgatagatgattatgatgagataaatgatagataggtaggtaggtagatagatagatagatagatagatagatagatagatagatagatagatgatatatatgcacaggtgaaagatagaccctcatccctagtgagttccctgagctaaagacaggctcagttgaacagctggcatccttcagcctttgctacagttgcaagctttcttttgcctgcagcctaagtgtcagctctgggcaggctccttgtcagtgtgcctagaagtttgtctcctgccctcatcgtggtgcttttcagtgttggagcata

SEQ ID NO: 30625 - DNA, 1157 bp, Mus musculus
ccacctatgagcccattaatgaatgaatggatacagaaaagtggctgaacaaaatgaaaaacgtttcatccttaagaaaaggggaagacatgcctcctgcatcacctctgatgaccccaagggacattatgttaaatgaaataaaccaggtacagaaagtaatactatagcatcctgtgcagactctgggtatacagataatgaagtcatgaaaaagaaaacagaatggcgattttcaagaactggggtggggagccaggatggttgaaaatgtaaatcacatacggaatcagttctagacatatcttgaccactgagtcacccctcagcctgaggaccctctgaggtttagcaaatcccactgttggcttgaaatctgctgagagtagatctctggtatttctgttatgtgcaagtgtacacacacacacacacacacacacacacacacacacacacaaaaccagcttctttgttacaaactcgtatacccagggcatatgaaaacacatcacacattttaaatctacatcattctttgtcagccattactttagcaaagctggaagacacgacacggcttctgaacgagggggaatcagaccctctctcgttgctgagcagggagtgactttgccgtgaagttaacaatgatcatcacagcctctcggcttcttcacaggtccctccttcacgtagcacatagcaactgataacttacaatgtgctagatactctgaaattataatgagcccggagccacttcttccctcacaaagaaatctacataatgaaggctataaccacaaagcctgctacacactaatcagagaaaggtatacagcaacaggcattagaaagaaggccctggcatcctgccttatgcctagaggttcagagggtccttggggtgagggatgacacagtagggatgactcagtgggagtcatcccagcaagcgaggtcctcccccgacttcttctgtctttttaataaagcatagccgtgaggtgtgcctatgggtggacgtgggttgtgctcccgctcaggggtgtgatgaagtattgtgatttcatttagatgcccttgttctgaatagccgtggagtgggttacattgtgaattcatggccagctaagatgttagttatgataagt

SEQ ID NO: 30626 - DNA, 1149 bp, Mus musculus
cttagcatctacttcccatacgttgacttgattcaaaggagaaacactggacagttcagaattgcatcatgggtccaaaagtgaggctgtgggtagctaccgatgtgctctccagagtctacaagtcgggtgtctcaggatcactaacacctgccctcggttcctcccaacagtgacggaaggccgagggatcctggagagcattcagcggttctcactactgcctacctacctcccggtcacctaccatatcaacaatgcggatgtctccttcttcctgaaggaggccaaccaggacatcatgcgcaactccagcctgcagtcgcgggtcgagtccttcctgatctacaaatctaggcgactgccggtgctcaacgccagctacgggcccttctcactcgagcaggtagtgccccaggatttgatgttgccttccaacccatttggattcactaacacattctccctcaactggaggctgaaggcctacatcctgcaggagaaagtctacctgagccatcccaaagtgcaggtgctcttccacatcgtgggtcgagactgggatgaccacagggacgagaacttgccttgcctgcgggtctttgcgttcagagagactcgagaggttcgaggcagctgccgtttgggtggagccctgggactgtgcgtggcccagctggagatgctgccgggctggttcagtccaccatcagtggtatctgggcgcaggaggcccacggagcagccagaggggaatcccgtggaactgtattatgctgtacagccaggggatgagcgaggcgactgtgccaaggaggattcgaggaagagcggtggtactccagcaggccacaatgatgttgatgaatccagtccccctttgcatagaattgggagcgtcttccttcgggagacccccagcagtccacctttgaaggaactgcgtttggatagcaatgtggctgttcattatgtccctaagactgtgcggcaaggagatgtactcaccttccctatctctgtctccaggaactgcacggaggatcgcttcacactgaggtgagcaggttcacattctgtctattgcaaccccagcgatccagccgggctgctgtggaactgtctgcagatgttcatgtgctgtgttcc

SEQ ID NO: 30627 - DNA, 1146 bp, Mus musculus
aggggggaaactgaggcatgggtggtcatcacagcttggtaaggctgtgtaacaccaatggagaacaatggctttcatgtggataaagaatgctgtcatcctgacttcccccaaaagacctctctgaactccctctgccaccagttggccttgcttactgtaggccaaacttctgatcagctgatcacaaaatatagcccactaatggctgaaggcaccatattgggttttgcaggttctctgggcactggaagcttcctctgctcctggacatttctagccacagtgtgctctcattctgacgtaagtcccagcatccctggctcacctgtgcccctgtgcctggacccgaaccacagggtaggattgccccaaatcatcagatactgtgtcattgctttcatagtagggggcgacctcatctagggccagctctttgctctttgcttcatttcagcagaggcacctgttcctaaggacccaccagaccgtggttcaggttccatcaccatctgtgtgtctcacctacagcatcttggcattctgagtctgaggaaggtgctctggcccaccctgtgccagggtggtgaccacagaggagttcgtcccatccaaatgaattatcgacacgagttagctctctgttgctgtgacaacgtgcccgagagaatcagcttagagaagagcttttgctgtaactcaggctgtcagggtttgggctttggctttacttgaccctgttgcttttgggcagtgcatcaaggcagagaacacgtactagtgagaaagaggttcagctcgtggtgggcaggaggcaggcagaaaggaaagggacagaaacaggatacacatttcaaggggacatctctctctaaataccctaagtcaagtttccatcccctcccattcagctatggcccccaccgatggctcgctcctctcatgcattcagagcccttatgattcaattaccccccaaaggccctacctcttactcttgccacactggggactaagctttcagcatgctcatctttggagacatcactactactctgttgatctcacagcagatgtgattatcagtcttgcaagacctcagcaagaatgggcctatccatctcttgccatggtgaggagaagggc

SEQ ID NO: 30628 - DNA, 1184 bp, Mus musculus
ggcagctgtatgttatccaggaaggactggagagcacgggctgtaccttagtcttcttggtactttactacttcggcatggccagctctttatggtgggtggtcctcaccctcacttggttcctggctgctggaaagaagtggggccatgaggccattgaagccaacagcagctactttcacctggcagcttgggccatcccggctgtgaagactatcttgatcttggtgatgcgcagggtggcaggggatgagctcactggtgtgtgttatgtgggcagcatggatgtcaatgctctgaccggcttcgtgctggtcccgctggcttgctacctagtcatcggcacttccttcatcctgtccggctttgtggctttattccacatccggagggtgatgaaaacgggtggggagaacacggacaagctggagaagctcatggtacgcataggggtcttctccctcctctacactgtgccggccacctgtgtgattgcctgctatttttatgaacgcctcaacatggactactggaagatgctggccacccagcacaagtgtaagatgaacaatcagaccaagacacctgactgcctgatgaccacctccatccctgccgtggaggtcttcatggtcaaagtgtccatgctgctggtggtgggcatcaccagtggggtgtgggtctggacttccaagaccctgcagtcctggcaacacgtatgcagccgggggctaaagagaaaaagccggaggaaaccagccagtgtggtcaccagtgcagggatctacaaaaaagcccagcacccccaaaaacctcaccttgggaagtatgaactgcccgcccagccttcagcctgcgtgtgaaggcagagctggctgcaagaacaggacattcggagcccaaatgggcagcttttcttggttggctggttgttggtaaatcaaagtaaaaagaatatgtatatatatatacatgtatgtgtatgcatgtgcatatatatgcatatatttacacatacatgaagtctaccttgaggttcagaacagctgaatgtaaagggttctgttcagtttgttgcctccctgaagggtcgctcattaaggagggagcctcttgtgtaactaatttgtggtaaagtagttgattcaaccgccctccagaaaacttttgtttaggcctcaagc

SEQ ID NO: 30629 - DNA, 1099 bp, Mus musculus
catctgtaagttaagttccttaatctattaacatctaaactccctttctaagctagacactgccttgtgaaggacaatgggccagccccgggcaagcatgaacactgccttacagcccctcagggcccttctatagtgccttctggtgaccctgactaggaagtgtgagggtctgaagagccttgaacgttagctcacggaggggacaagcagtcacatgccgcactcatgttactcttccttgttcatgtgagctgatggagtctcaaggcaaggcgacagtgacgatggagcaaacttggtgctcactaaactcaagagaatggtcccgggtacatagccactcctggatggcacctgaaggaccaggtcctcagcccaacacccacgagtgcccagagttcctaagaaaccatgaagtgtgggataaagctgtgcactggtttacacttgtgaatagatggcccagcgaccaagtatgtgaaggataccatgactagtgaactctgccaactgctgactgtgatgagtgctcactctaccccagcctcacttggtgggatatgatgtagccatgccgggtcagaacaccaagtgtgagcaagtgctactgaactatctaaaaaccatgatcctttcagtggtgagtgtgccacactgtcacctcctcacacctcctggtctgacaccccatgtgccgagagctactgcagcaggctgggctgtgggtcctggtctagagttagcctgtagtgcagccactcctggctgatagctcacccttcctaactgggagctcacccttcctgcctggaagctcacacttcctgtctgggagctcacccttcttgcctgggagctcacacttcctgtctgggagctcacacttccttcctgggagctcacacttcctgcctgggagctcacccttcctgcctgggagctcacacttcctgcctgggagctctgaagatgaacctgggcctttgcagctcaccctctctgcatcagtcagtgccatcggatttagctgcagagaccatgcgtaccacccaggctcccaccacccacagccaggtgtccctccagtccagcctga

SEQ ID NO: 30630 - DNA, 2470 bp, Mus musculus
cctttttcttttaaaacagtactatgacatttctgccaaaagtaactacaactttgaaaagcctttcctctggcttgccagaaagctcattggagatcctaacttggagtttgttgccatgcctgctcttgccccacctgaggtggtcatggacccagctttggcagcacagtacgagcatgatttagaggtatttgttctttttttacagtgttttgttttcgtgtgtgtgtgtgcactttgcctagtttctgcagaggttggcattggatctgcccagacatgtggggtgctaggaatcaagctccggtcattagaagagctggctgtgcgcacttaaccagtcctggtggtgctcggcctgacttggtaatggtagttctgatctgcactgttttgtttttgtttgttgctccaggttgctcagacgactgctctcccagatgaggatgatgacctgtgagaaagtgaagctggagccctgcgtcagaagtctagttttataggcaactgtcctgtgatgtcagcggtgcagcgcgtgtgccaccttatttagctaagcagatcgtgtacttcattgggatgctgaaggagatgaatgggcttcgagtgaatgtggcagttaaacataccttcattttttggacttgcatatttagctgtttggaacagagttgtttcctttctgaatttcaaagataagactgctgcagtcccatcgcaatatccagtggggaaatcttgtttgttactgtcattcccattcttttcgtttagaatcagaataaagttgtatttcaaataatctaaacaagtgaatcatcccttgcttattaaagccactaacacgagggagcttgtgccatattatagtttaaaatgcttctgctattacctgaggtctattcagttatgttctccttgtgcctaccttcataaacatttagattgtctgtgactcagctaggatgatatctgccctacctgcatttagccaggtagtttaacctaagagaagaccttgtgtaaaactaaagatttaagtatgtacgcatcagatgtttaaggattgcagttgacaatttctgtaacctaggccttcagaagttagaactgcagttgacggacggaagcttgagggttttctgagatggactacatttcttcatttccatgtctaatgttggttctctaagatgtcctctgctttcaaatattggctcctatattgagtggtagtctcaggaggtagaggcaggaggatctcttgagtttgcccccaaccttagtctacagagcaagttccaggactgagagacctgtctcaaaaaattcatggtaggctgttacagtattacagcagctgatcttttttttctcccacggggtttatataggttgtgcaggagaggaaatgctagggctactgccactgaggagtagggtgggcttctctgatgtgatagtgttagttgagacttaggtgtgtgatcccggcacaactgtgttgctcagatgtatttacagcaagccattccgtgtgctctgctggtccagtctaccaaagttcctagaagggtggataccttcacatagttgttggtgtttgttttgttttgtttttttctccccaaagaaggtagatgacttaaatacagtggggaaggtggaaggaactcatactgtgcattctagcttcagcagactgattgcaagactcaaatttgatgtatgtgctatgctatgatcaggtgaagaccctctcccctgactgggatgaaacctcatttagatgtcttgaattaatacattgtgtgtaaacctggtatagaatgtagaacctttatgactttctgatttttgtaacagttaaatgtgggagctgcttacgtgtgtttaaccagagtgcagagatttacattatttattggaagaacttaaatatatatcatttctgctttgcctcagttttctgagtcatctctagtatttgctgtaggagttgtgaataacattttttttttaagatttgaagtttgatctgccaaatagcgagttctctccagtttttacaagtaggggaaatctcccccctcccttaaaaaagcatccttgaatagatggctccttactaatcatttattacccagcagttatggctgattgaagcagtgtcaccaacagagaagctggggtctggcatttgagaaacagctttattctgtgggctttggatttaaaaaaattttttttatgtataggatacactagctgtcttcagacacaccagaagagggcatctgatcctattacagatggttatgagccaccatgtggttgctgggaattgaactctagaagagcagtcagtgcacttatcagttgagctatctctagcccccatttttttgtttttaatcagtttataacctgattgaaaccctcacttcctctcacgtcagagaaggtg

SEQ ID NO: 30631 - DNA, 1521 bp, Mus musculus
ggcagcggtaaagtacatcttgatctcgtcaggagtcagtgcccgttcccagatgatgaattcatcaaaagctccgttttcgtaacgcttggtctggtcctgctctgaccctatgaccaggttgacgtggggatccccgtaggtgtgtgacactttcccgctggggtccgaggtgctcagagtcccattgacgtagaccttcaggccctccttggatttccacgtgaacaggacgtgagtccagtaaggacctgggggagagtaaagatatatcctgagcatagccaataagttctatgtgagcttcccacattcctagtacatcttcccttcatgtgataattgatcacccttgaccttagtgaatccaactatggattatagaataacctgattccccttagtcctttggatcacatgatctttgcttccacccccaaattccaaaagccttttaagaaaccctttattactttaacacagtggcagaaatgtaaacacatacaatcaaaggtaataaaagacttgtttagccttttccggtcgcagcgctgcgcggtgtggagctcgtgcttgtgctcggagctatgccgtccaagggtccgctgcagtccgtgcaggtcttcggacgcaagaaaacagccacggctgtggcccactgcaaacggggaaatgggctcatcaaggtgaacggacgtcccctggagatgatcgagccgcgcacgctgcagtacaagttactggagcctgttttgcttctgggcaaggagcgatttgctggtgtggatattcgggtccgtgtgaagggtggtggacatgtggcccaaatttatgccatccgacagtccatctcaaaggccctggtagcttattaccaaaaatatgtggatgaagcctccaagaaggagatcaaagatatcctcatccaatacgatcggaccctgcttgtagctgacccccgtcgctgcgaatccaaaaagtttggaggtcctggtgcccgtgcccgataccagaaatcctaccgataagcccatctcaaggatcggggtttacctttgtaataaacatcctaggattttaacgttaaaaaaaaaaaaaaaaaaaaaaagacttgtttaaaaggccctacccaagcacccaccaatcagactccaaccctagttgaaaatctcagtatggtccagaactagccgaggatatcccccatcacaacccctggcagtccccgctattacaatagtcagggaaagaggcacaagggctgagagggacagaataaaattatctttgttattaataataaaagcaactcctgaaatgcacatgcgatagtcacatgattggtgggtaaaggctaagggacagaagtcaaagttgtcttctagattgacagtaatgaacatagggagtgtgtgtatagacgtacatacccacacagtcatgagaatcataagtgcatgtgtgcgtgagtgcgtgtgcatgctcatgtgtgcacgagcatgcatgcacacacatacatac

SEQ ID NO: 30632 - DNA, 1159 bp, Mus musculus
actgggaggggtccaggagctttcccaaggggaccaagctaaggtagtgactctgcctctctcggtcccagaaagctttctgtgaccccaccagcgcaccactcacttcccagttttaatacctgccattagagttagccagtgagttgttgcacttggggggccgaggggtgccattgctcccactgatcatgcctgttcattgtgccctcagctccggggaaggcgtctggtccagccagggctgtgcactcacagaaggaaatctcacttattcagtgtgccactgcacacacctcaccaacttcgccatcctcatgcaagtggtcccactgaaggtgagtgccactgtagaccccacagggtcctcagatcacagccccatcaccatccttgacacacagatctagactagctacaaagttacctcgtatctgggagatggctggacgcattgctatatccgggagacggccgaatacattgttaaagtctttgaaaggcaagctgggggagtctgacatgaattggttcacatagaaacctatattggttaagggagcttaacgggacatgggacccagatcacaagcctaggaccataaaggggaagctgtgagctgccctgggatgctgctctagagttgcaggacaagcacaccaagagccagaagagaaggtaccttggctagtgatgctgcccttggaggtaacttattagtggacagttgagcaagtgagcatccaaggtgctggttgggaacccaagtgtcacaaagaccactcagagggaaggcacaggtgcatccccagcctccctgtggaagacaggagttctcatgccattagggacacttcaaatgacaccagggtggagcgtcttcctctgggtcctccacatgctggaccattgaactgagagatattttgcttttctttggtctacctgggagggtctactgagcagtgcaaaggggcccatactttccagagagcggccactcatgcctggcattcgtctcaagagaggtccaatctacaaagtcaaaaagggaagagaaaatcagaagaaggaaatccagactcatttatatcataaatctgtcaccagtcagtattggtgacaccaaatttagacagcctgtgggtgtcttcgtgg

SEQ ID NO: 30633 - DNA, 1642 bp, Mus musculus
tggtgagggcagcagtgatgtagccctccttccctggtgtggtgggcacttctgtcctctgtggacaccagagtgcagagtagcccatggtgaccactaagaccggacctcccttgttatcgtatgcacagagcaacatcccagcaagcctgcattaaatgacatgtaaagatggggctagaggacatagcctcagccttgaaggagactcacagtcctgagggctactcaatgtcttatggttctccagagggtccacagaggtggtagccgagccatgtaggggaatgaagccagcaccaattggaatgtacatcttcacgtaaggggacactaattgagccaccacccaccctagctgtacagccagttctggactctccgcctttgcccgtttggagtcgcccactatcccttgtatggatctttgtgaagacagtctaaaggagccacttcatgggacccgatgctgtctattctctgcaagttgttccttgatggacctaaagtcagccttagaatattcttttcaaacacgagcctctctactgtccatgacctccttgggggctgagcttccctgctgggtgtccccctgtacctgtatgtcctggctttctgggagtgttgctacccctagggtctgtgttctcattatttagacgtgcctcctccgtaagagccaacaggcatcagacagcttagacattggatgtccctcatgtgacagaccagaccagccacattgcagaggctgatttcctcccagtaaggggtggggggcacaccaagtctctgctgctggccagggtgaccactgtaagctttgggtttggtgtgagtggacagaaatagactcagccctgggaagtacagtcattgtgacaacaaggtccacatggagatggagatccccgaggactaaggagcaggctgtgaagggccaaccagtgtgacaaggagcttaagtgtctgtgacatgcacagcctagatggccagtctggccccaatactggaaaactctcacttcccatgagatccctaacagccctgagccccttcttattcccatgccttacttggctttaggatatgtttccgctcagatcttttcagcttaaatgttctctgttcttttctccactgtaatgaagtagagccaaggcctggcatagccaggcaagcactccacactgagccacaccccagcccctaagtgacaatttcctacaggcgtccagaagccacaaggctataaggccagactttgctctggctaagccaggactgaaatctattagccaaatgggaccctctgacctaccctcctgcagcccctttggccagtgcaggctgaggccatgctgagactctgtatctggtgacaagtcctgttctaaagaatgtgggtggtctctgctcagcatctcatccttcctcaaaccaaacaccggtgacccagggtcccacctgccctgctgagctcctagtagtgagaacactgtatccctcccatgcacgctggactcccactaaagcaaggcagaccaggccagtcctttattcccagtgggattctcagtttctggcttttttttttaatactcgctcttatgtagctgatatatcaagggaagtcaa

SEQ ID NO: 30634 - DNA, 1213 bp, Mus musculus
cctgtggaattaataaatgatatgagtgcgcatgagtgctaatcttagttcaacatctaaagtggatccacttatacaaaataagggaaagcagtgcccatgtccagggttgtggatggtaaaggctcgacaccaaggaagcctgtcctccaagcacccattctcaaggaccagcccagcttagctttccaggtctgggaatactcagatgcagcttcacaaaggagccagttctgggtcctcccccgctctcagcctagacaaccttccctctaggagatactcagggaagacccaggacagggctctcatcctcgaaccccacactctcagcctagggtctcctagggagaccatcctaggacaactgccactggccctcagcatggtgtctgtggtggcttgaatagaaatggcccccacaggctcacatatttgaatgcttggtcataggaggtggcactattaggaggtgtggccttgttggagtaggggtggtcttcttggaggaagtgggctttgaggtctaagaagctcaagtttggtcagcatgtctcaatcacttcccactgcctaccggttcaatccagatgtagaactttcagctccttctccagcaccatgtttgcctgcatgccaccatgcttccccaacatgacgataatggactaagcctctgaaactgtaagccagcctcaactaaatgttgtcaactaagagttgctatgctcatggtgtctcttcacagcaatagaaacccaaactacgtcagtgctcattcaccggctgattaagggaggggacttgctcagttctggtgtcttcagggccttcccgtgtctactgcttagtcaggctgactgcaccactctgccagggctgcagtggtgacagcttgacagcaaataccaacatctcaagccagcagctccgagaacatgggaaaaaggacaaggtcacaagacaggagggcctgtggtcaccactcagcacaagaccctaggaggaagccgaagccacaggtctgatggctcctgctctgtgaggggacaaagcttcctttttctgatggagacctgacctctgagggctccagttgttctttcagagctgtgagggatcagcaaccatctactcatctccagatacagaccgtggccatccgtgtcaacaccaagttctcaggcccattttctcttccctctcttctcca

SEQ ID NO: 30635 - DNA, 1153 bp, Mus musculus
ggagcacaatggagagtgatcagaatatctgtcctaaggttcggtgtcaggcctcattgctattctgaggctaagcatcgtgtgagtgttgtgtgaaagagccaccttcagcaaagaaggctcagcctgtgctgtggtgccctgctgcagactgcattcctcatgtgaagtgagatgcctgcggagtggggtctggtactgaagatggagcttccatatttgagggtgaacaatctatatatatatatatatgctagttcctctgcacatctgtctctacactggtcaatacagatgtggcattttgatgtaataaagtgacaagactataaaaatcagttacttgccagacgtggtggcacaggcctttataatcttagcatttgggaggcagaggcaggtagatctcagatttcaggtgagcctggactaacagactgagaccttattattattttttttttaaatcaacttatgaaccttgtgagcatatcctagaaaacctgggctggaacttagaccatttcttaaatgatggaattgatgatgttgaggggctggctgcatgttccatgtcctgccacctagcccacagcagcagtcacctagccgcattctggaggttactgctggtgcatgtgcaagcttggggaggggtccaggtgcagagcctgcctgtcccgtgccctgtgcaaccccagggaaagctcatgaaggacctaatcagtggcagcaggaggccctgccaagcaggctgcttgtactccagagagggagtgctgtgctcgtacctactcccaccgtatgttgcctgcttttctgcctgttgcctgcttttctggttttgtttttgtttttctaagtgtgtattcatagagttagggagggagggaggtgtatgtatatgtgtttgttcttgtgcgtgcgtgtgtgtgtgtgtgtgtgtgtgtgtgtgtgtgtgtgtatgtgtgtgtttgaagctgtctgtgtacatgtgtgaatgttgggttccttcctggattgaattactctccaccttactttttttgagacaagattgctcactgatttaactagaccggttggccagtaagccctgggggtcctgtatttacctcccaggcacaagtcacagtacccagcttttacatgg

SEQ ID NO: 30636 - DNA, 1187 bp, Mus musculus
ctggggcagtacgaggggggggggaggggggtcacacagcatctaccttgaagctttccataaaccttactattaaatcttctaggcacaaatgagaactcttccatgtatagtattgaatgactacttcaaactacatttctcaagaaaggccagagagattttgtcttttgagacaaactcactctaacctaggccagtctagaatttactttgtagtctaagcaggcttcaaactcaaagcagttttcttctctctgcctcccacatgcttcaatagcaggtttgatccagctcacacagaaggggatttttatatatgtccactgaaaggtcttctttcctcagagacaagaactatccacccagagcgttgtgttctcggttgacgtctacacattcacttttctgtttccaggacactggtgtcatgccctgtcctctgctggttggtggtagaactctgcccatattggaagggaagcctccagaaaggccttcaaacagatgcagagatccaccaagagaagaagaaagagagaaaaagaagaagaagcacaaaaaacggtctcggacaaggtcccgctctcccaagtaccactcgtcttccaagcccaggtctagatcccactcaaaagcaaagcactccctgcccagtgcctaccggacagtgcggcggtcaaggtgggtgtgccggcactcaagccttcttgctcccatccgccctacacactgagccacttcctgctaccctataaagccagcagaatttaaaatgagcacaggctagagtgtgtgtgggggaatgtgtgtgtcttgcagatccaaagatctttttaaaagaacattgttgagacttttcagagctcacctgtcactgcaggttaaatgattcatttatgcttcttatctctgcatagcttacttagacctcactcttcactcaaggtggaaacaagaggatctccagttcaaggccagtctaagctacactggggttgtagctcagtcagtacatcctgctgttgagcatgaggacttgagtgaagaagccaagcatgctggtgcctgcctctaatcctagcataggggaggtgggcacagaggggctcattgtctagccagcccagcctactgagcaaaaatccaggccagtgaggaaccttgtctcataaaatcaggtgaac

SEQ ID NO: 30637 - DNA, 1108 bp, Mus musculus
cattatttataacactttacatcttagtgtctacaggtccaaggaacaaaaccctactacttagtctaattctcagttaaaagacaaaatgaagctgaaatttttctggccattatttcgtctcaatttgaccttcagtgaaaatgttttacagtgtcaaggctggttattctcaaagcccccaaacgtttcggtggctgagggaggatcagaaaagaggcttttggttctatctggttaaataacacaggtactttacctcgggagataagtccatcgctagtgtttggttttacagtttagatagaataccaagacaaggcttgctgcagagtaagtgatttacacagcactcttagctgctgtctgtccacacaacaccgagagctggaacgggcccttggaaggcacagtccctggctgcatggcaggcctcagcctcaatcctctttatgggatagggtcatgttgcccactgcaggccctgcagcgctctcgttcccaggatggaagcagctggaaagccatggttatggaaggggaagtagccatgcctatgctccgggcacccagaccgaggcaggagaagtaagcatgtcttgtgccagcctgccgtacatactaagacagaaaaacaccaagtagaaggttgcagttgtggctgaagcaagagagcaggctccatattactatgagctgttgacattctaaccatagtgaagaaagtgctggtgatgctgtcattatcttgtctttagccatcctttcaggtagaggaacccattaccatggtaacatctacaataggccttccttgccagacttatttttcaggcctgacacagcctaagtggtcatttttaaatgactgccagctcaaagtaaaatgctgcagttgttggcatcctcctgtggtagcatactgcaactgaaatgcctaatcttccctatactaagtggctctggtcccacataaaatgcaggacagtctgattttcgtttactgtgtgatgtgctcgtaggacagaagctttgcttactccatatgtctaaactgtaggtggctttggatctgcaaaggcaagttctccacaataaaactcttcag

SEQ ID NO: 30638 - DNA, 1487 bp, Mus musculus
cgttgcaccttgccgggctgcccaagcccagctgtcacaaccccaggatgccttgtctgcacctgagcggctctgatggcatctgcacgtgggctgatgaggggcaaacaggggttcctcgtggtatccgtaggggccaccatgcctgtttcacaagtaagagagttgatgccccgatgggggaacagggtgggagaaaggcacctacccagaagtctgatccactgccgtttgcagcagccagcgccgtatctgctgggataggggaccagtcacactcaggatctgcccacagattcccagatgctggccaggggccttgctccaaccaccaggagcacagccacctctccccgtcctagataggttagccatggaggctgtgtcctgttatctccctctctttggccaggagagcattgtgggtctccctcgggtgctgttgatgggggtggggggcgcccatagagatatttcttcatctgtcagtacccattgcttcagcaagatgcccccatatagttctggcctgagaccctgcagcttggactcacagctgtcccctccccagctgcagaagggcttctaacacctggaataaaggtgggcgttcagtttagggaaggaggatggttgggggagcccagggtgatagcaagggggagctgcagggataagtgtcagggtcctcggggagtcatgacaatgttaccgcctaacttggagatgtaggagctgtgcacggattgcttctctgggtgacaaacctccatggtccagaaaggggctgaggttgaacccaagatgggttaatgagctccagaaaggaacagccaagttcaaaggttctgggacaagacgggcctgaggaacagggccacccaggtaggcgtggctgtagggtaagcagtttctgtcattgggcacgagatgaaaattagtgatcacacgcacatacccccctccccaactggcccggtcccatctcaggtaagaaaggcttctgtctaccccaggccaggtttgagtgttgtcaggatgagtgagcagctagcggggcctaagtttctaccctccatttcccaagcctggccacaccctagacccacctgtcagactaggcaggacagagtcaggggtaggggcatctgaggtttccctgtcttggaagccaccctactctgccctcatatcaaagcacgctcctatgatgtcccatgttgtccaccagcctgcaggacacagatgtcctatacagcaacagggaagggtccaaaaatctttgtcacatagcactgaaagccaggcccgcaggctggagctgtctagatgctggtgtcacactcattttaaaacccaaactcttaataaaaattttgtacactggacaggttgacagctcagtggtaaggttttggggttgatctcctcctgtacaactcccccaccaccacccccaaaattctctgtacctctggtcttgggct

SEQ ID NO: 30639 - DNA, 1274 bp, Mus musculus
ccccaggtttccccctattttcctaaaggccagaatctttcttactgaatttccagattttttttttaatgttatggccattggattacatgtatctattgtgtatttcttgagagggggctttctgtctctgtttttatctctgtgtgttcaggaaacctccgttttacaatcccagtttccacaaaggaaactcccttgtccttggcaacaagtgggggcaagccatggggcatgcgtagaattacagtaagtgcttcttcttcttcttcgggaaaacaccaaatggcggatgacgccggtgcaacgggagggcccggaggacccgggggcccaggattaggaggccgcggcggcttccgcggaggattcggcagcggtcttaggggccgtggtcgtggccgaggccgtggccgtggtcgaggccgtggggctcgtggaggtaaagctgaagacaaggagtggatccccgtcaccaagctgggccgcctggttaaggacatgaagatcaagtccttggaggagatctacctgttctccctgcccattaaggagtctgagatcattgatttcttcctgggtgagtctctaaaggatgaggttctgaaaatcatgccagtgcagaagcagactcgggctggccagccgaccaggttcaaggctttcgtcgctattggggactacaatggtcacgttggtcttggtgttaagtgctccaaggaggttgccactgccatccgaggggctatcatcttggccaggctttccatcgtccctgtgcggagaggctactgggggaacaagattggcaagccccacactgttccatgcaaggtgacaggccgctgtggctctgtgctggtgcgtctcatccctgcccccagaggcactggcattgtctctgctcctgtgcccaagaagctcctgatgatggccggtatagatgactgctacacttcagccagaggctgcactgccaccctgggcaactttgctaaggccacctttgatgccatctccaagacttacagctacctgacccccgacctctggaaagagactgtcttcaccaagtctccttatcaggaattcacggatcatcttgtgaaaacccacaccagagtctctgttcagaggacccaggctccagctgtggctaccacataagggtttttatatgagaaaaataaaagaattaagtctgctgaaaaaaaaaaaagaattacagtaagtactctgtactcttatctgaaaagataaactcccacatcttt

SEQ ID NO: 30640 - DNA, 1125 bp, Mus musculus
ccagagccacatgtgtgggtcttatcaatacccacgggaggaatcgggtccatgtccacccaagccaaggttaaaagcccactcatctacggatgagaaaatcatttgatcacctcagttaagcgttgccttatttaacttaatcaataggggggagagagattggagacgtactattgaaagggcaagcccttcactgcctcccacccaaataaaaaagccaattggccttgtactacaagagccggtcgaactccttctccctgtttcccacctatcatccaaaaaagcggaaaaatatcaacttagtgttattatagtgtatttcacatttgttcagtcaaacttagccagagttccaacgccctacttaaaattcaactagaaagttacctaccaagtactaattagcattataaagtcagagcctacagctccaggcttttcagttagttgttcactaagataagaaaggacagtcttagccttatacagtttaccataagaaaagttaaggaatcccatgaaagcaagttttttctttagccctagattccaggcagaactattgagcacagataattttcccccctcaggccagcgttttctttttttaaattttgttaataaaagggaggagatgtagtctcccctcccctagcctgaaacctgcttgctcaggggtggagcttcctgctcattcgttctgccacgcccactgttggaacctgcggagccacacacgtacacctttctactggaccagagattattcggcgggaatcgggtcccctcccccttccttcataactagtgtcgcaacaataaaatttgagccttgatcagagtaactgtcttggctacattcttttctctcgctacctagcccctcttctcttccaggtttccaaaatgcctttccaggctagaacccaggttgtggtctgctggccggacacaacatgttgggaagcatcaaggtgttttaaagtgtttttcattgcaattctcatttgtatgtgacaacattccgtgaaatgacagagtccttcagtataatgtatgcaagaccaggtagcagaatgtccctggtcttagatttccaaagccccattatgacttcac

SEQ ID NO: 30641 - DNA, 1131 bp, Mus musculus
tgtttttctgtgtgtgtgtgtgtgtgtgtgtgtgtgtgtgtgtgttctttttgcatcacagatcccagatgggagttactgatctgccactctccttccctccacagtactttaataaacggaaaacctactttgctcacgatgcccttcagcagtgcagcgtcggggacatcgtgctcctcagagctttgcccgtcccacgatcgaagcatgtgaagcacgaactggctgagatcatcttcaaagtcggccgagttatcgaccccgtcaccggaaagccctgtgcaggaactgcctacctagagagccccctcagcgaacctcgggaggagctcaaggtctcctgaacccaggaaaggaggagccagaggcatttctgtctgtgtgttttgctcaatggttttcattactgtttctcctgtgacattaaaagtagtcagcaaagtaaagagcttagtgctccatacagggttgcatcctttttcagattctctgaactgaaggtactgattactctgtatgcctaaggatgcggcatcattttgtgagctctctgtcctggatcgtatgtattgtctcattgttcattgcctcccccaaagaaatcttggactgagcacctttgttttgaaagaagaaaaccttttgataatgacataaaaggctaaacttagttttggcagcttgatttttcaaaatttattgtgtgtgtgtccacaatgcctgtgtgggcacacctgtgccaccacacacacactgtggcagccagaggacagctttgtggagtccggtctcctttcactcttacgtggttcccagtaacacacctgtacccactgagccatcctattgacactgagttttaatgattcatattcaaagtaaattggcctgttttgttgtgttttgggagacaaggtttctctgtgtagccttgactgtcctggaacttgctctgtagaccaggccggcctccatatcaaaggcctagcctctgcctctgaagtactgggatttaaggtgtgtgccaccactgctgactagtaaatttaaattttttcccccttatttcaccaacttgcaaggagaaatgttttaaatgctgtaaagactcttactgtagaaactttg

SEQ ID NO: 30642 - DNA, 1208 bp, Mus musculus
ataaaatctcactcagagcagacgaggggctgggtgggggtcggggtataggatcaggaaaagactgtggcagtagggtaccaagcgtcccaagaggagggaaatggcccttcacaaatctgccggcttttcctggggcgcgcctaggcttggtgcagtcaagatttgattactcccatcgtcatctaagccacagtttctcaccccaccccccccccttgccaacatgactgtctctgtcttgctttcatcaaggcagacagccattgaaacaggcgcctcatctgagtcgcttcaagacacctgccaaccagctgtcttcccgatcatggtcccctctgggtctgaataatctattgtcgtctgaagactaggggagacaagcattcagactacttcagacagttatgagacctgtatataatcaagtaaacaaaactttagaaaaaaatgcttttaaaaaaattatataaatgagggctttgcctgcttgtatgcctgtgtaccacttgcgggcctggtgcccatgaaggccaaaagagggcctcagagcccctgaagctggagttacagaaggctgtaagctgtcgtgtgggtgctagacattgaaccctgaacctctggaagagcagccagtgctcttaaccactgaaccatctatctcttctctaactcaaattcaacaacaacaacaacaacaaaaatctgtgtctaaaacacttaaagccagacgtgagggtgcacacctttaatcctagcattcaagaggcagaggctgctggatctctgagttgagtttaaaggcagcctggtctacacagcaagttccaggccatgcccagaacaacatagtgagaccatatctcatagaacaacaaaaccaagttgggcatagtactaggggatacatacgtgttatggagtgccacaaatttgaagccagcctgttctatataaggaaacccagggtatccaaagatgcataatcagactgtctttgaaaaaaaaagttattgccgggcggtggtcgtgcacgcctttaatcccagcacttgggaggtagaggcaggcggatttctgagttcgaggccagcctggtctacagagtgagttccaagacagccagggctaaacagagaaaccctgtctcggaaaaaaaaaaaaagttatacaaattaaattttaaaaaaatttttatttatatgagt

SEQ ID NO: 30643 - DNA, 1829 bp, Mus musculus
ctcagtttctgtaacatccttgttgatggagttgggatttctggctcggttgctcagactctgcgcttcctaacagcacacgcgtttctggtctgagcaggcgcagtgtccgtctctgcccggtgggcttgggaaggccagggcagtaaccttccgcttcttttcagtcccactcattcaggaaatggagtccaggatcatgatcccgctcaagacctccccgctccagtgacgctgccgtgtgcctacgcagattacagtgacgaatacgtgtcatgatttcatctcacccagtcaccgagtggaaagcaagccgaggtgtaaactgctgtacatagcttgtaagatctctttcctttaaaattgaataatcaagaacgggaactcaggagggttgaactaccagaagcggtgcagcctcagctcaccaaccgctccttagcctccggcccttcaggaaaacaggatcatttgaagccaggtgtggtagcttagcactcagggagctgaggcaggagaattacaataagtcctaggccaatctgggctacatagagagtttcagaccagcttggaccttgtgagaccctgtctcaataaccaaaattaaagtttgaattctctctgagtaaaatcccagctatgaaaaagaatcagctactatttcttgctattaaaaaaaaaatctgttttacaattacagatttttttttttttttttacaaatttccttccttcaggaagaaatacaaatgaagtcacgtttcctgagcagtttttctgagtctcaaactaggaacaaattctgagtgtaccaatggctgcgaatgctatgattttgtgacttctggtcagtcggtcagcaggccgggatgtatcattaccctgagcgagctggaagggtggtcaccctgcacctagccagccatgcaggctccatcaggcaccgtgtccccaggggtgggcatgaaccagtgcgccacatgtgattttgaaataaacacctcaactagcactaattttatttgcaatatttttctataaaacaagtagctcttggaaaagaggttttcttttctaagccgccgttcgtgacctctgacctctggttctattttggtaagctcccagcagacacttccaagtcttgtaccaagggcagtgcacactaggtctaagttggcataaaccttcatattctgtctgtctctgtttggttttgtttttaatatagtgtgccaattttgtgactgtaatcatgtgaaagccccattgaaccgaagaattatgtctgccctacaaattgatttgtgtaaaataaagtataactaaatctcctatcagatgtctaatttttacatgcgaatgattttctccaagaacatactaaagtaaataaaagcctcttacttttcatgtgttgcacgattgagacctttttgttggttcgtttacttagctcgtttgacatttttgaacgcagggtgtaagtatgtagtggagggcagcctctaactaaatcctgcctccaccaggcatcgctaggtgacatgcacgtacagtacaggagctctcgggaccactctgttgtttatgttggggggggcggagcacgggagccacagtgtgcatggaaatccagacaacttagagtcagcttcttccatgcacatccctgagatccaactcagacagccagggttgtccacaggcgccgttccccactgagccactttgtttgctcttgaggtcttttgctctgagcttgtgctgcggaggacttgtactggggccatgaactcaggaggaagatagggcgtagagcagaa

SEQ ID NO: 30644 - DNA, 1099 bp, Mus musculus
aatgcctacatcctcacttgcaacgtgtccttagagtatgagaaaacgtgagtgtatggccctcttcagggtggaggaaggtgacattctttttccccactgtgaggacagtaatgcaaacatgggggcttgggttatgtggagcccactggtacagcacttggttggaatgtgtttagcctgatataagccccttaaaaaaactaagataacatggaaatctcctttgtcttttattttttttaatagagaagtgaattctgggtttttttacaagagtgcagaagagagagaaaaactagtaaaggctgaaagaaaattcattgaagatagagttaaaaaaatcatagagctgaaaaagaaagtctgtggtgactcagataaaggatttgtcgttattaatcaaaaggtaagaacttaaaattgtgaattagtcttattcctttttaaggtgaaggctgctgagaaatgtttgtctttattcaggggattgaccccttttccttagatgcccttgcgaaagaagggatcgtagctctgcgcagagccaagaggagaaacatggagaggtgagtgaggccaactgagagtttgcacgggagttagaattattctcttcgtacttctgcttgctttttcattttactagcatgtatgaattgaacagaatcattgggttgggtttttttttcccccccttatacaggcatttcatacacattccctgtgtgtagctctggttcccttctgtccctcttactgctggctcttgtttgcagatagtctgttcttagctgggcgtaaatcccagcatttggggagcagacgccagatgagtttgaggctagcctgctttacaaagctaattccaggacagtcagggctgttacacaaagaaactgtctttccccccccccccccaaaaatgacctagattacatagactcttggttttattgtaactatctgtaaatttaaaagtctaccttttaagttttttgtgtatattcaggcttgtgcttggattttacataaaatccaaggacagcttacagtgtgtcctaccctgtggatccagggattaagctcaggttgacag

SEQ ID NO: 30645 - DNA, 1708 bp, Mus musculus
ggtaaacctaggtgggggaagatgggtgacaggaggatcttggtaccagtgctgtgggaaaagcagaaagcttatgtgagtaacctaatagaagacatttgggaatgagagaagtcaaaagtgcatgtgttgtgcgtcaacagcagtgtgtcctgagcagagtgtgcagcagtctgctaagcagtgagcactgactgtaaggcattgctaagagtgtttggagaagtcttggttactaatggaagagtactgttcctttgtatttaaagtccctgaggttgacctgatgcagcctgtgatcctttcagaactgaggcaacaggaccgcagcctggatgctgtcttgcgctgtagtatagaaaattcttatcttttgaaaaggaaaaaaaaatatggtctcaattggcccatgttttctgttttagaattggtagggttcataaaatatatgaaaaaagcctttggtgctcttggttatttgcaggtgagccgatggtggctgcagagatgggtgtgtgggataactactgtgtgaagaagcagctgctacactcctggtgagtgtacacgatcatggcggctcgcgggcgggcggcagacacagcagtttgggttgatagctcatctgtcctctcttcctccttttcagtactgtgatcgccaccaacattctcctggtcgacgagatcatgcgagctgggatgtcctctctgaagggttgaggcctgcctgtgatactacaggatgttggggggaatggttatttttgtccaagcttcaagtgatttggaaaaaaattttctcttcctgattggagaaaagaaacgggacatttgacacctattcaaattatactgtaaaattttattttatttttgccttgagtatctgaagacactcaaagcagctctttttcaacccactgaacaagatgttttagctacaccgatacaaaaattacataagataagcatgttgtctacccttgttccgtaagtgttctttgaaagtttgtaatggttttctcctaaataaggcatggtgacacatgcctgtaagcctagccctttggaaatagtccggaatttctatgccaactcaggctacaggagaccccaggtcgaaagaataatttgttgtggatgtatttgaaattatccagccaactccctgttaaacatgtaagatccttgccagtgtaaaacacatctgggtaatttatgggtttcataatgtctaataaatacttaaagagtgaagctactggatcattcacacttgaaatgactgaaaatgcttcagaaaagctaataaagccaagttactccgtggaggctggaaggtcagaactctgccacccaacttccagacatgggaacacaagaggctgagagagttacacatttaacagccaaaaggacggttgttgaagaataagggtttgggtgaaacaagattttttaggctattttctatcttggttttgcatcatacctgtaacagcttatctctttggttttcatgtacttgattttatgtgtgatacttggggagaggggctggctccgtattccacagtgagtgagtgaacagctcaactgaatagaggaaaatatctgggtggagagttggctcagctacgtactactggttctcacagacaggcagttagtgcccagcaccgtgggcaacttctagccagctgaga

SEQ ID NO: 30646 - DNA, 1215 bp, Mus musculus
aagcattcaggccattctcattcagaccactacagctcctctcttctcgacagatccccacccccagcagtatgcacctctcttccttctccatccaggatgggaaacactccagactcagcctcagacaacctgggcttccgctgcgcctccagtgcaggccgaccgaaggaggacctgtgagcagccagaccgagatctccgaagcaccctctcagcactgtacctccgtgaccatgttccagaggcagctggctaccaagctcatgcgtctgagggtggccttttgagcccctcccctctgacagacacaaagaacactcggactgcaagaagggactgcagtagcctggaagatgaggacctggatgaccaaggctgggagctgggctgtctcttaagtgcagtattaaggacaaaggaaccaaaccctccagtgtccaaaagatgacattttttaaactctctccctttttgctttctccctggctggttcagctttcacttctgggaaattctgcagaaggaaaatgcttcctttgtgaggtgtgccaaagccttgctgccagaacctagcctcgctggcctctgaaacgagatactcaatatgtggcaaggctggtctcgaactctcgatcctcctacctcagcttcctgggtcctgctgggattacacaccacgcccactatttaaaagccccagtaaagcaaatgatttatgaagtgaagatgtgcattgtgggagaaccaaagtcagtgcccctctaggaagacaaatgccagaaccttctctgagagttagctaatcatgtagggccttctgtgtatcctgcagacatgtccctgaagaagaactggatcttatgaggtcaataaatccttttttttttttaagatttatttatttattatatgtaagtacactgtagctgtcttcagacacaccagaagagggcatcagatctcgttacggatggttgtgagccaccatgtggttgctgggacttgaacactggacctttggaagagcagtcgggtactcttacccactgagccatcacaccagcccgaggtcaataaattcttatgtatatcaggaagcacaatataattgttgtttgagatagggtttcatgtagcccaggctagcctcaagctccttgtgtagccacaaatgaccttgaactcctgctttcacttcctcaaatatccata

SEQ ID NO: 30647 - DNA, 1287 bp, Mus musculus
aatccactcaggaaacaagaaaaccctgtctctcaaaaaagctaaagttcatgaagttctctgcctgatagaactgatatcagaccgtcccacaacagggaagacccaggcctgaggccgatcctcaacctgagaactcccagacagaatgctgtggacgaactggtccacgaaatatctatttccaggacagggttgttaggtaggcactacactgccgtgcccatcgaggaaaccctccccttagcttctgacagagggttagtaatagaattgagagagacagagataagatacttgtcttaattcatagcttcttgttggtttaacatctaccaaattggctaaccctctgcttcgggccgttgtagacacatgcaccgtgtcttagttatggcaaagatagaatggaggtttgattggatgaaccctgaaatggtggtgttgggtgtcttctaacttaaacttgtctttttttttttttttaataggtttaatgtaatcaagaaattcaagctgaagagatgtaacattggttctgtataattgatagtacaagtgtggacccttatatttctaacagttcattgctttggaatggccgtgaaagagatctaactgtggatgcttactgaggcttgtatgtagtgttggttactggggaagtgtttggcctccttggactgtgttgtgattgtgagttaaaaaaaataaattggttattctgaagtgtgtggtagcgtccttattgtgtgtgcctggtgaacatagtagcatcctaagagaagccattctctatgcctgtcattcgtctagtccagaggtgctcagccttcctagtgctctggccttttaatacagttcctcatcaaaaacacagctttctgatctggaggcatcgaatctaggaaaagcttaggcccaggtaaagtggtacatgcttttaatcccaggagacagagatatatatatatatattttttaactttgatcacatgctaattgtgatgtgtcagggagctggtgtgatactcagctgcagcaggcttgtctagtattcaccaggcttgagtcctgtcttcagccatgccaacaaaccaagtagctaagtaagtggtaagcaggtagacattactgagacctccgatggccacgtgacactgcgtgtctgcatggaggcagcgtacgcaagccgttgggtctccctatatagtccagatctgtgtaaatggcctatcctgcctcagcctcccaagtgctgggattagaggcttgtgccaccatacc

SEQ ID NO: 30648 - DNA, 1233 bp, Mus musculus
gggcctatcctcaatatcaacttctttctccctacacaatcttttatgccagggttattgcttcatatttgatgatttctgaatgtctgacctggaaaaaagtggcttttaatactactttaagaccactcttctaactccctctgcagtattcactgcaattcctgtgaattgtttatggtaggtaagtctggctttggttagtgtttttgttttgttttgttttttaaattgggttttatgcaatatcatatcactatgtagtcctttctggcctcaagttgtggtcttcttgcctcagcctcctgagcgctagaatttataggcatgcacccccaagccttgctatggcagggtttatggatgggtatggaaacaaaggaaacagttaaagactgaggcttattggagggctgtgcatcattagaatgaggggagggggaccaggggctagagagatggctcagaagctcttccagaggccctgagttcaattcccagcaaccacatggtggctcacaaccatctataatagggtccagtgcccgattctgttgtgtctgaagtcagagcacttctgtacattaaaaacaaacaacaaaaaaaaactcaaccaaaaacaaaaccccagaacagtgggtctgtagcagaggcaggtggatctctgagtttgaagtcatcctggtccacaaaaaagagttctaggacaaccagactacacaaagaaactgtgtcaaaataaataaaacaataacaattaaaatacccagaacaggtcatcttaacattggaaaggaattaacttctggttatttttctggttatgtatatagtaaaaaggatagacttgattttttaaaaaactaattgattacattctaaagtttgtttttcttctctgtgctgttgctaagtgaagaaatccaaggcactaaggcactatgaaggagagagttcagtattagacatgaaagtggagcaaatgtcaggagaaaggagggaactcattgcttggacattacaaagagggtgcattgggctgagtaagacaaaggctttagatgtgaaccgaaggcatcaccatttgacttgcaatattctatctagcaagagcagaaaaactagggctgaatctaaccccctggcttagtttccagaaggaaaactgttgtggtgccaagacatcctgacaaaagtgacttaagggagaaagggtttattctagcttatagt

SEQ ID NO: 30649 - DNA, 4312 bp, Mus musculus
ttgttttttgttttttaattcacaacagacactttccctcagaatcttaaactgattttttaaaatattgtaaattagaaggggccctagctatttcctgtgtcggtcttcattttaaatctggatacaaaaaaggatacaccgagccaatcaaagacaagctttaactttaccttgaagatgtttctgagataataaaatgtagccctagcccccagtcctcaactaaagtgagcagccattgctagtaattctttaatgtgtataaattcaatttcaggtataacaaatgtgatcatgaacatgaaaatattttagaatagatactgtattaaatattgccatgtttacaatatgtaatatgtttttagccgatggatttaaacctgtagattcaattagagtccatttgtgtgatatttgtaaataaaggtagaaacattgggatccacccctgcagaacttactgtacagtttagttgaagtgtagaaaggaattgtcagctcatcgtgactgatacatagtgaagaaagtacaggcaaacagaacatcttgggaaatgcgctgacagccctggtgcagtgttgacagcagaaacagggtggttgattcccttccatctcccactcagagaggaagaaacagtctgaacacccagctcaagtctgactagtcagaactggatggattggaactctacaggatgtcacgtgactagacctttcatttcaaggctctcaggacactgatgtgggaagtggatgtagtctttggagaaaaaccactatggcgtttctgggcaatgcctcttaaacagtagctgagctctcaacacatgtgttcccttgattccagtgccagtcagctcagcagtattatgactgaagcaggcacaagccaagtgctctgaggtcggtccatagtgtttccccttcttgtttcttcttgcactaaggatggtcagtaagtgtttcagaatcacatactgaatttgtaaaccttaggactatcgggagaaactgtttgctgactcagaagaaacacaaacgtagaaagacctggaagagaaacatggaagctttgtcccactccagtagccacacagaagcagtgagaagaaacccagaggtgatctaagtacacaccccagtggcatggcgactgtgtttctctggttagcatcttacaggagatgttaaaagtgccttctgtcttaaaatctcaaaccaaatcattctgtgggtagaactggggcagaagtatccctccttcccttccttaccacgaagcagagaacttgaacttgcattctaccaggaaggtctgtgcggccattttattccttgggtggagaagtggcagtgttttttttatgatttggttaatatgctaaaaaataggcaactagacagggtactctgagacagcaatggttgagtggtttacgactttcagtcgaaactgatgcaccataggatttctggcctggggcaggtataaaatgggaattgtaatgttcctttaggaggctctaaccagttccttaaaagaccgcttaattccaatttcatcaaaggttgtgtttccccgtgaatgtgaacatttctgtgactatcttactgtgtatgcattgctgttgtcttctgaagtagttagagaacgtctagaaagtactgaatggtctttgtggtcaaccaagtcctcgttcgagaactgtacagtgagctcatctcatagccctgtgtccaggtctcccaaggcagtggaatggctactcgctaagacttctgctgcttacatatcaaggctctgctaaacatgtcccttgggccccatttccaaatgaccttttctgtcttctatcactcagcagagtggagttaaagcttgtcttgacattgcagatgtctccaacccttactcaagaaaatgtgagagggttccctccaccagacccctcaaggcttccctttgctttcctaagtcttgggagtaccaccattactgattgtatgaattgcttgtttgtttgtttgtttgttacattcctgtgacctaataggatgaatacccctttctcactgagcgttaacaggtgctgttggaaataacagcatttgccgaacagtgtgctcatgcttgcctgcagtcccatcacttgggatataaatgcaggaggatcaggaattcaaggtcatccttgactacatagcaaaatagagaccagcattagctacaggagaccctagctttttaaaaaaaaattttttttttttttgctaaaatatatgttctctataagtgagcctgttgtgttttatttggtagttttgccctgagggaatccagtcttcttctctaccatctattaaaccttatagaacgggggagaaaaacactgtgttataaaactgctaatattgttatgactgtttcagacagagtatttaaacactgaagaagcagggtttggctgggcctggtgacacacaccttgagtctcactcagtacttggggagcagaggcaggtggatttctgagttctaggccaccctagcctagataaggagctccaggacaaccagggttatatagtgaaaccctgactcaaaaagcctacccacaaaataataacactgctagttgatttaacaataaatacggaagggcagaccagggggaaaatgattcctgcagtaattctgggcttcatgctttcgaagtgattcataacagtggaagcctcacttcagattttcgggaggaagagaaagtctggctaggtgtgctccagagcctgtggttggcttatgggatttcccttgatcctttcccacagctagttttgtcagggagggtaaacttctggtacaactcaggtttaactagttgcactagctatattccaagaattattttttgcttcatctgtatagcctctccttcagctcttttgttgtggttgttgttttgttttgtttttaaagagacagataatctttctctgtagcctaggctgtcctagagctcagtacatagcccaggctggcttcaaacttgacattcctcctgccttagcctcccaagtgctcagattcatatacagaaggaatgttgaaaagcatttgagttttttcaagtaaagagacaagttctgggggctggggagataggtggcttagcagttaagaacacttgtaaaggacccaggtttggcgccaaccacccacatgtctgcttaacctttagctgcaactccaattcctggggatctgaccccctctcatggctcctgaaggccctgcatgcatatggtgtatagacatatatgcaggcaaaacacccacatagatatgaaagtatttcgtttgctacaaaagatccttgtacctatgaggtagaggacaataaaattaatattgttgcttttttgttttatttataattatattcaaaagactaaaaatgcagccaggcatggtagtacatgcctataaacccagcacttgggaagtagaggcaggaagaccagaagttcattcaggggcaatctgggctattttgagaccatgtttctagaaaagcaaaaactcaaaacacaaaaactgctcagcagttacttgctaagctctagttggtgccaccagttgattctggtggatactggcaggtggtgggtgacctgaccttaaaagtcagtaaaatgtcagtaaaatgtcagcagagtcccccactgttctgtccaggaacttgtttggggctgtgaacttccccgacttcttccagtgcgtatacatcagtgaagccacccctctccaccttttagcattttaggcagtatgtgtatgaatcctattttgtgagaacaaccttgtcataaagaacagggtaggaatccaggcaatgtgatcaggccctcccttcccccttttaaaccgattggcccaggagaggtgaagtgttatgaggctgtactaagataatagcatagataataggtgtctatgacctgtgaagtgtggtccatctaaaatactactcctgcttcgaaagctcctgagtaagccttcatgtaagaaggagttcaccggggagattccctctttaatatagatagaaatattctttatcagagatttaggatagcattttgctaactggtaaataaaaacagatgtacatatgtaagaatgtttatttgttgcacataacttttttggtataaaataaatgtagacattacctgtggatattgtgctgccatcgttcttacttcagtgtggagtcttcagaaatgaagccggaggaaa

SEQ ID NO: 30650 - DNA, 1388 bp, Mus musculus
actaacacacacacacacacacatacacacacacacacatatacacatacacacacgcacatacacgcacacacacacacacacacatatacacatacacacacgaacatacacacatattctctctctctctctctctctctctctctctctctctcatgtggtgtttgggatggaagggacctgaacatgcagacagtcactctactaacaacaaagctacctgtcagcttatttttccacactttttttttttgtttttgttttttttttgggacagggtttctctgtgtagccctggctgtcctggaactcactctgtagcccaggctggcctcaaactcagaaatccgcctgcctctgcctcccgagcgctgggattaaaggtgtgcgccaccacacccggctccctgtgccttttaatatatggtctactatatagtcagagttgggaaactggacctcttcttccttttacagctagcacttagaaaggagaggcaacagatacataacaagccagcaataggcttcagatgagagtgcctgttggctggctgtgaggtgggagggagctctaggtgaagtgttcgttgacttcgatgccttctgttttctggtatcaaagggtagcttttcagaacatgaattgatggcatgctgcttttaagcttagaaaagtttagcaattctgttcgtcactccgtccctaagtcaggtgtgtggcaattaataggcactgctcacttgtttggtgtgtgcttgtgtgtgcttttaaggaaagagtgtcaatagatcattttgttctgtgtattcagaactctgttttccaaaatgcctgtttacttctgttgagctgactcagcaaactttgcagggtaaatttcaaatggcaagtcagcttcagttcactaaggagttgctcaagggcactgaataaccacccacctaccgcacagactccacagtctttaaaattcactcggacccagggtcgtgctccttaggagtgggggcaggaggagcacaaggccgagggcagccgcagctgcagagcaggttccaggccagcctgtgagtctgtcacagtgagagcctgtctcaaaaacacactgaaaaggcccaatctgtactgaggcgatcctgcctccaccgccctgtccccttctgcgctggcttgagttgtccggcagtgacttggaatggccaaggtcacgtttctcaatcacgaaagcagagagccgtgggatttggaaatgacattacctgtgactcagatagagccattggccctgaagagatctcccaggagccgtgttcctctgagagcgcagcgagtgtaactcaatttggggcagaaacaggaagcctgtgagctgctttcatga

SEQ ID NO: 30651 - DNA, 1374 bp, Mus musculus
cctgcagcaccgcgctcaactggcttgttcttgctcacatttgtggctattctgttcttatggtcgtgaagcatccagcttgcttcagcggctttcgggctggtttgtcccctgggaatgtgacggtgatctgtgcttttccaccaggtgccgatccccttgccacagtcgagtctccatggcctgaccgtgtcttgacaataattttgagcaaaatctatgtctaataagaagataaccacatcaagatggttgggaagctgaagcagaacttactcttggcgtgtctggtgattagttctgtgaccgtgttttacctgggccagcatgccatggagtgccatcaccgaatagaggaacgtagccagccagcccgactggagaaccccaaggcgactgtgcgagctggcctcgacatcaaagccaacaaaacattcacctatcacaaagatatgcctttaatattcatcgggggtgtgcctcggagcggcaccacactcatgagggctatgctggacgcacatcctgacatccgctgtggagaggaaaccagggtcatccctcgaatcctggccctgaagcagatgtggtcccggtccagtaaagagaagatccgcttggatgaggcgggtgtcacagatgaagtgctagattctgccatgcaagccttccttctggaggtcattgttaaacatggggagccggcaccttatttatgtaacaaagatccgtttgccctgaaatccttgacttaccttgctaggttatttcccaatgccaaatttctcctgatggtccgagatggccgggcgtcagtacattcaatgatttctcggaaagttactatagctggctttgacctgaacagctaccgggactgtctgaccaagtggaaccgggccatagaaaccatgtacaaccagtgtatggaagttggttataagaaatgcatgttggttcactatgaacagctcgtcttacaccctgaacggtggatgagaacgctcttaaagttcctccatattccatggaaccattccgttttgcaccatgaagaaatgatcgggaaagctgggggagtttctctgtcaaagtgagtaaatgtagtgttttctctctctctctctctctctctctctctccttccttccttctttcctttcttcctttcttttttgaaccctgcattcagctgatgaagatatggacctgtgccacttatggctgctcttgccagcacttgggaggcaggagcaaacttctgtgaattcaaagccaaccaggtctatgaagtgttacgtgctagtcagggctacacagagaggacctgactcaaaaaaaaaaaaagacaaggcatgacaagacgtacacccg

SEQ ID NO: 30652 - DNA, 1106 bp, Mus musculus
taatcccagcactttggaggtggatcaggagttaaagggcagggtctgctacatggagcggtagagactgtgtctgttagggttttattgctgtgatgagacaccatgaccaggaggaagttggaggaaagggttcgaacatttggcttgtccgtccaggctgctcttcttcatagacggaagctgctccacagctgagacgttttctcaattgagcttccctccttcacgtgactttagtttatgtcaagtatgacatgaagctacccataacacaaacccaactgggctgcctgagaccctatctcaaaagcacaccaaacccagggaagtggtgggaaaaaaatggctcagcggctaagggcgagtccggcttttgcaaagggagagccctagtttggttccttagcacccatgtctagccgttcacaaccatcggtaactccaaggatcaattatgtgtggttttaatgtcacaaatttcaattaccacaaattagactcacctgactaggtagggagcctcacccgaactgttctctttgccctgattgatgtgggaagacacccccccacaccccccgccagtgaaggtggcaccatctaataggagctcagatacagaaagtttgtgaggagggagactttctgcttgcatggcctgggtggctttgctctgttgttgctgattccttagatgatagcagagccagggatccaagctttcattggggaatagaccaggagcgctccgggaagcttctagcttcaggcactctgaattaccgaagcactctcctcgtaggatgagtgctggttgttaccctccagcgagagacagctactgagcactcatcctcaaggaccaagtaacctacctggttctcagcttcctgggtgtgaattggctgctgttactattttaacacttacttaaattcagacacacacaacacatgcacacacacaacacacagcaggaccctgacttaaacaggatctgctacctctgatccctataggcacctgcactcagatgaacacacacacacacacatacacacttacaaataaaaatatatagggctggagagagctcagcagtt

SEQ ID NO: 30653 - DNA, 1220 bp, Mus musculus
actatgcccctcatgcctgtccctccgaggcttgtgcctggtggttgtctgtcctcatgcccctgggctgcaggagcccactcaccccctggcacaaacaaggactgaggcgggagatacaggagaggcagctctgatccctgcctgtaaccacgtgctgtgtgttttcctagggacgactgctgccttgtctacagaagggaaatctcgggaacggctgtctgctgcgacaaggagtgtctgtgcccatcgctcctgttcacctgccagcctcctgtccccagggggggtgtcacacacccgggcctccccaagtgatggctcttgagcccaggaacatgcatggccctcaggatgaggagcccagcagggacacagttctgtcacagctcctcttgtccttgtctttccttcccaggttccagtctttaatttcaaggaaaggagagtttgaagttggcattctgttaacaaaatcaggcagtctcattccgaataggttctatgtacacgttccgatgttttgtagaacactcgtgcctgttgaaacgtatcgatgtggataatagtaaataccttaattatttaaataattcattgtattgtttcagagacgtttggaaattactgtatacatttacaacctaatgacttttgtattttatttttcaaaataaaagcttaaatgtgaagcactcaatggtcccgttttcagtgctgtcattgagagcacagacctgagacagtgctaaaccgactcctgtgggctgtgctatagctgccccgccccctcccccggaacagtccccgcccccccccaacagtccccgctcgctttccctgccctgttgcctcccttactctcactccctttcttccctctgtgtctgtgtgtgcgcgggcgtgcgtgtgtgcttgtgtgtgtgtgtgtgtgtgcgcgtgcgtgtgtgggttcacgtgtgtgtgtgtgcacgtgggtgtatgcgcgtgggtgtgtgtgcgtgtgtggccataggttgatgtccggtatcttatgtcaccctctaccatattttttgagacaaggtctctcagtgaacctggagcttgtgttttgggctggctgctagactagctggccagcagccctaggaatctgcctgcgcttcctctccagcattggggttgcagaggctagcacagccggcatgcctggcgtttttttacacaggcgctgggat

SEQ ID NO: 30654 - DNA, 1726 bp, Mus musculus
gaggattttgaccggtacatgtctggccagacatcccccaggaagcaggagtctgagagttggcccccggaggcctgcttaggtgtgaagcaaatgtataagaacttggacctcctgtctcagttgaatgaacggcaagaaaggatcatgaacgaagccaagaaacttgaaaaagacttaatagactggacagacgggattgccaaggaagttcaagacattgttgagaaatacccactggagattaagcccccgaaccaacccttagcagccatcgactctgagaatgtggagaacgacaagctccctccccctctgcagcctcaggtgtacgcagggtgacggccctgtttatttggggctggtttctgggagctgctgcgttccactgttcaggtccggaatatgaactgactgcttaaagtttcaaagtgtttttaggtacagatttagggattggttattctcttttttcttctctagcggggaagcttagtaaataataatgtactatttatttgagctggtggagtaggtttgtgtgaattctgtgtcgctcttttatgtcctgcctgatttcccatgggcttcctctgtgtagacactgttgttggttttgggcaaacactgccttttaaaggataaaacagatgctataaagtctatgttgaaatgaattctatgttcccacactcccccagtgtgaaataattttgtaattgtaaagatagaagataatgttaataagtaaatatgtaaaattgtaaatatgtaaaaaaaaaacacatagggctggggaggggtgtctcagcgtgcatggcatttcatgagctgatgttttttttttttttttaggtgaaaatgaaatttattgaatgtttgcctttagcgccattttatatggtttgtcccactaaaaagaatctaaagaatttgagctttaacaggacattggcactaactgccctaacttgagattctttctggtacatgtgaagaagttgtaacgccaacttttaggtcacatacagaattattctgggaccctggggtggtggctcagtcagtaaagtgctctccatactgatgtgaggacctgagctccctgtccggccccgggtgaaaagctgggcatggtgacactcacttgggacagctctgctgggagccagagttcctggggcagggggcatcgctgtcaatgagacacctcgtgtaagcaaacaaatcaagatggacggctcctgagaaatgatagccaaggatgccctctggcctccacatggccacatatgtgcctgtgtacctctacatacatgtgtagcacacacacatgaacacacagttgctgattagtacagttgacttggaactgtgcttgcagcttcctttccctgtttatccaataaacttcccccacagtgctgtggggctattgccttttttatctgattggttttgttttgtttctgggtctttggggacgggctgttgctgtgtaacccaggtagccctcaaacttgtgatcttcctatctcagcctccctcccgatgttgggattaggggtctcttaccaccacactcagctccttcacacaaatcatcccagaattctgtgatacaaagatgtgctcttagatgggagttgtagggaatgaatgaggcttctggaagttgatgggggaacttctcaaagcgtgaagcaagcagatgccttgcgctctt

SEQ ID NO: 30655 - DNA, 1102 bp, Mus musculus
tccgaggtgaggtagtttccttaaagtcttattaattccctcactccccaaaggtactagatgctgatagtcagcatgacctcgcagtattgttctcggtcccagtggctccctagttgactcagttgtctgcttgctctcttctaggtggctctggctgacgcctaatcctacagctccccattttctgagagaccaagaaccatgatcattgcctgctgaatcggccagggcctggccactctgtgaatacatgatcttgcaatgttgggttattccagccaaagacatttcaagtgcctgtaactgatttgtccatatttataaacactgatctggaaattggtcctgtgatgcacgtgctttgccctggatgcacctgaactcgtccccctcgtcgaggggcaggagggcatggacatgggcttcttcacggagagccagggcgtgtggggatcttgccagagctgagctgagcagctcgtgttccagcgccagtggggccgaggtttgctgtggttcttgtttcagactggcgtgctgagtgctggaagctgtttgcacctttgtcaggacactgcgtttcagaagccactgttccctctggtggcttttacatgtcggtggctggcataccatatagtaacagcagtaattctgtctcagtgtgcttgcaaggaaacttttcttataaagagaaaaaaaagttacaatttactactgccctagttaggacagacatgcttgtctctcctaggtaaaaggtcaggtccccgagtcatttctgtagtgaagagcagagttccgtgtctacactggcaactaggaactggggtgctctgctcccgtttgctcctgggaggggcgttctcctggcttgagaagtagctgtgtagtgaaggcacagggttgtgtgggtgactaacttcacacggcagaagagatgttgctctaatgctcacaaacagggcttgctcttttttttatttttagaggaaatacattttctttttaatttttttttttttgcattcatttctatacatcacacatctccaggagaatgcacattataggtatgtaatgtggaaccgacactggg

SEQ ID NO: 30656 - DNA, 1265 bp, Mus musculus
ctagtcaaaactggaaggattttccttaggacaggtgtgaccttctggtccctctgtcccattgccctctcgtattccatttaaaaaagtcattcatgatcctttccacccgctctctgtattttcaatgtttttctctcagcgccttgccttaacaatccccagacagtgttctctcaagcagtgttccagacttgttgggtgtgaagataaatgcatgtaagagcagccctttggaggctgaggcaggagaatctcaagttcagggccagcctgggccacatactgataccctgtctctcaaagggagaaaaattacttaggtatgtcagcacttttgtcctgtaactgtagatctgtctcaattgaagttaactcactatattcggaaacttactggcctagagaattttatcccaggcattcttagatggaaaacaatacttttgttttttcttctaaattgaagcttgttaaaataatcactgtagttatgtggtacactagtatttcttaaagcagaggtgagttgcggataaggtggataatatgtgactttagtctagtcttctctgagactttgagacccttggcttggctggtataagtgtgtcatccggaccaccaaacttcagattaagctgttactgagtgagacacgagaagaatggtgttcgctggtctgtcggctgtgttcctcttagtcatccttgtgttaatgacaggcagtggctgggatctgtagagggtgggaaggaggaccatcacaagacctagggagaggaagtccccaaaatgcttgggacatgacccatcctgaggccagatacatactttaaaattcagatattcaccgtagcaggtagacagatggaggatggctggggaagggagttgtgggctgaagtttaggggactgcagacacatctgggcccagtcctcagctgttccttgctggtatacctcagaagtggaatgtcagagtgggctactagagacctctgaccccagcagcactggcttgccctcatatgtggggtgtagtcacgtcagtgacttcctgggaattgcttgtttcagatcatattgatctctttccttttgtctctcaccgtatggtatgacttgaatcagttttgattctatgtgtaagttctcatcgtttggaacctggtatttctgttgtgttcttggcagtgcataggaacccagcctcctgtgttttgaccctcctgcaggcactgtgggactcgagggcagcaga

SEQ ID NO: 30657 - DNA, 1414 bp, Mus musculus
aagtgtaaaaagagattgcttcgtgagctgacggttcatatatgcaaaagagaaagacaaaagctttacttgtacagatgtaaataggtaaagagtaagtaacataatacataaatacttcctcaaatgtgctatttacaagtctaatatcagtgaacccggccctcggaggaggaggccgcgttcccatctgctaaacccttcaactatgcaatgaacacgagggcttttccccgaagcccggttaactcaaaggagccttttcaaatccatttacaacatacttaaggtcatattttccctgaacaagcgcttacctgagatgttacacaactgctttccttttggtttggtttttgtttttcaaatgaagaaacacctttctttttttcttttcttttttcttttcttattttaatctgaaacccaggctggaactttgcgtctgaagttgctgcttgtggtcttctggggagaaatggggaaaggtccaccccctagaaagtgtagctaagaaccggaagtagctttgcccagggaagatgggattgctctgccaataatcaggggcaggtgggctgtgtctgccagcacaaaccggtcaccagaatttctggtcacctttgatggcgtaatgttgcaggcaacttcaagtgggcaccgtgcctccgcagcaacccatgtcctggctcatgacacggaggacacacttcctcgttccacagtatgatttaaggacactcacacgggtcctgaaagaaagctgtctgggttttctcaggcgttggatacattgccacagtaactgaagaaggtacccggagcccagtgtgaatcgtttatattccaataagaaatgggaaacctgggcagagctgagctgagcaggtagatctagtaagagccatcagaaattaccgagggcgaaagaaggcagagagagagagagagagagagagagagagagagagagagagagagaacatgcatgcacgcgctcttgtgtgcacttgtgtgtgtgtgtgtgtgtgttgtattttcttcagtcttaatgtcttcatgacacttttataaggacattaaccctcttgtctacatatttggagagaatatgactttactagccgagaaaatacactatatcttgtctactggcctgtaaaatacatgtaagaaataaaaattagccccatttggtcctctagtatattaaagtgctatctgacattgttatcctgttttttgttttgttttattttcaaaaaaaaaaaaaagtgtaaactacagaccattgtttctaaaagcagagagatctattttagtagtcaacagaaggtttagttgtgaattccgattttgtggacaccagatgtgtgcggtgttttgttttctttctttcgttttaatttttttt

SEQ ID NO: 30658 - DNA, 1143 bp, Mus musculus
gaggctgccatcccctctgccagctgccatgtgccctggagtttgtactcagcagtatggagagttttgtcacagctgcttgccagctagagaagtttcgtaacaacgtactttggtgttcttttgcttctcctttgttcttatttatggtgtatgtctttctgtggtgtgtgtgcctgtgtgtttgcacctgcaagctcccgtgctgaagcttgaacaggacatcaaatgccctgtgctagcactctcttccttagggccttcagacaggctttctcactgaagctccggtcaggctggcagccagcaagtctcagacataaagcgccaaatttttttatgtatggaaaggcaatttattcattacacttacacattcataaattctattcctgcagcctcatttttctcaaaaataactttattgagacatggtttgcataccataaaattgaccttcgaagttcatcttcctgtctctgtctcctacaatgccaggcttgctaacaagtggatcccaagccagctttgtatatgggcacgggatttgaactcaggtcatcatgcaagggcactttcgtactgagccatctcttgagccttaggattagatagactattctgtcttttgatattggaggctctgaggcccatggtagaacctaagagtttacatttgtgaggtatacaaccagtcctaagtgcgacttgtcaggatgcagtattaattaaaattctgcacagcaaagctcaacccagcaaatggtccagtgcacatgctgccatgggtaatgacagggtcctctgactcctcctctcccttctcctcagacagactgcctttaaaatattgttatgtgttagatggatggtctgaggagtcttcaaactccttcaaaacaaaattttgtgtatggaaagaaaactcattccatatatttacactttcataataaattctacccctgaaatattattttcctggaaaatagctttattgaaagatggctcagatgccataaagttcgccttttaaaaacacacagttgaatgactgttagtatattcagacatttagtagctcagatgactgtcactgctacttactgcctgccatttccatcagtgacaaggaaacactct

SEQ ID NO: 30659 - DNA, 1235 bp, Mus musculus
gattgctgacatacactgtaatatcgtgtgaataattgatggaaggtttgctcaagacaagctttttccttttgatttgaggatctgggggccagggagcgggtagaggaggaggactgggaggttcggtaaggaggggccagaacagatgagcagacccaagtgtgtggggagtgaggcatggtggatgttaaatgcctctctgctggtgtagtccactgcgttggggatttcagggcgtttgtacaatacagccttattaatgactattctgtcaagagagctcccaattaaattgagtttggcttattcctccctcttggtttcttcatatgtgcggatatgaagtctctccaacaggagtattagataacaagggtgggtgctttcttgcccttggtgtttttttttttttttttaattttgtggagccagaggatagtttggttttaatgacttcttgttctactgaggatttgcttgtttgtgaatgcaagacctagcatcctctccttctgtccccccacccccaactgtctgctcccctccagctcttacccttgtctagagaagatggaactcctatcagtcggcagccatcgttgtcgtgggagtgtttttgctggacagctaagagtctagaatatcacctaattaaggcctgggggagaacccactccctctcagcaacgggccttccttcttattacaaaagcggtaaatgataggaagaactgggagttagaacaagggaactgaagccacgatgaggtcactgtggtttttgcttcctcttcgtccttaattctattgccagtgaacgtgattgcagtcataggggttgtctagagctcaggtgttttcccctgctcactgttacctcctgagtgctctcctttgtaaacattctaaattcaaataatcgaagggttttcgaagggttgttgaggtgtgtgcaccagccatctaggacctcactcctctctttacgttaaaataaagccttgagggagtctgagtagatggctcagtgtctaagcacacattctgctcttgcaggagggggattctgtccccagtgcccacgtcaggtgtttcaccaccgcctctaactctggatctggtgaccccttctgggcttctctgtcacctgctctcccatcagtaacacacacacacacacacttataataaaacatttttttaaagtatactttatgttttaaaatcaactc

SEQ ID NO: 30660 - DNA, 1205 bp, Mus musculus
ctataattacaagatgttgtgatgtaggtgcttagaagatggtggaaccaggatccaggtcccataatctaaaaaggccttattgtcaggcaaggcttcagggtacagctgtggacctggcacacctatgaccagtcagagacctgttaggatcctggaggacaggtggtctgctgcccattcaacacattttgcaagtggaatcatgggatatttgactcgctgtatttgactactttggcttgtatttctctcagtttaaaatgttgtgctatgggtctgcactgccatcatagcttatcatttgcatattatcagctacttttaaaatggttccactttacatccctgccagtgtcctctctacttttctagtatcttcaccagcacttgctatttacatttgattgtagccattcttgtgagtgtcttttggaatctttttgtggttctaattaggtgtgtgtggtggacggtacatttacccataagtacagttgtccatggaagcaggaggggagctgtatcccctagagctggagttacaaattgtgagctgttcaatatgagtgatacgggctgaacaccagacttgtgggagaagagtgggtgcctctaaccactgacccatctcatcagcctttttgtgccttttaatctggttctttgatcagaatcaaaagttaattttcaagctaagacataaaatagcccattttgagtattttgacagaagatggagatgcagatgttaaggtatcatgagcagaagggtaacaggaggtgaaaggctggaattgccaatggtgccagagcctgtgaggtctgtaatgctgccccatcttgctacagacaatattctggttgctcattcattctaattcctcctcttagcctttggtaccactacatttacctttaaaaaaaataccaatgttcaggacttacttttggccaactgaatcaaagcagttaaagaccagtatttgtaattttaaagtctctgcactcctcacatgattcgcttcacagtgagggtcgaaaggcactgtggtaaataattcagcaggattaaatagcagaatgaatttattgatcatctgcgacactcagataaccatctgcctttcattttgaccgtaagcattcctgatacacacctgctaactgaacttgatctaataagcacgaagcgtactctcaga

SEQ ID NO: 30661 - DNA, 1170 bp, Mus musculus
caatgccagggtcctggaagtccattgactagccagctttggctatccatccttcatggtcccattagagacaaagtggtgacaagcagaaaggggaaatgtaatcaatataaacacattgggaagagagccaaagaagattctgtgacaccccccaaacctatctttggggtcctaacatgaagtttgggttcacatagagaataagaggtatacgtgagctattaagcagggttggccaaagggtggtctgcccatcactcacccatcattgtctctgctccgctctcctgtgcagtggtctgacaagctgtcagactgtgtgaagtctcttcctgggagacaagttccttctttgaatgcatcaggcttcagccctgtcctttcttccttggggaattccattccttggaggctgtctcaatagtcttgacagacaaaaggagaaggacacgtgtgtcttttgaaggatgtcttcactccaggcaagacagttccgatgaagaaagtattctatctgcatctcataatccatctcagtgattattcatgaccactgagaaacttagtgaccccgagcaacggaacttttccatttctgtacattttagttaattgaaactttggttagacccatgtggctcgtgactactgtatgggacatgggggatggggtaggtttcttgtaatccctcatcccaactgcatggccaccatgcctatcattctttgttccctcttgaatttgttttttgtgcgctatggacatcagcctgattttgtactatccatacatcacatgtattccagcaagctaatgctttattataaatgtggaattgagagatctggaaatgtctcagtagataagagtgcttgccatgcaaatttgagaaactgagttcagataaccagcacccatgcaagtctaatggcctgcctttaaccacaggattaaagaggtggggataatgaatccttagcacaagttgactagatagccactctgaattgttttgctctgatttcatagagactctgcctcagtctataaggcaaagaggaactgaggaagagagtggacattggacccaaatattctcatgcatccacacacgtacatttaccctcacacattaggacatgcatgcacacaaacacatataataa

SEQ ID NO: 30662 - DNA, 1149 bp, Mus musculus
tgtgcttcatactcctaatgactgtcctacagtccttgaataggaaacaaagcaaacaagaaccatagccttctctacttgagactgtgggtaataaatcatggtgacttgggaataatggctgttttcaagtaggtgacaactgtctatcagggcttgtaaactgtcaccttggtgtggtgttataaagcaaaatgacctcaattcaaaaagctgcctcagattttcaaggaacacttgaaaaacataggaaaacccacaggaaggcccatcagccctggtttgtgcagcactcttaatatttcctgtattgatcacagctcataaactcttatcaaggctgagctctgtgattgttctaagtgtacatcagaaggaaatcagaacataaaacacagctagcattactgttgcgcctcaagaacttacctcagttatatacagatttccaccatgcaaagtatcattcatttccatttttaataaagaggaattctattttaaatattatgtatatcagtacatgtgtctcgttacctgaagaggccagaagaagatgttggattctccagagctggagtgacacagttgtgaacatcttttgtgggtgttgggaactgagtttaagtcctctgtaatggaagtaagtatgcttaactactaagccatctctctagatcctttattccaattgcaatccccagtgagggtatcttccttttacatgtaggtagagggtcctacagtagtcgcaatactcgtgatacatgtagaattgctaaggaaaattagggccatcaccatcaccgtgctgacgacatcacaggaagttagcatctcaactctaaacccttttcttgatgtagcatctcacccatcccaggctggcctggaacttgctgtgtagctccaggtgaccttcagtttctgatcgtccctctcccttgagtgctggattgcaggcatgtacagaaccacatttggtgtatgtgggactaaaagtcaaacctagagcttcatgtatgctacgcaggggctctaccaactgagctgcatacccagtcctttttacttttagagaaattttgaaatacgtgtttaagaacattgcaagacaactgtattgtgttggttttattatctcctggg

SEQ ID NO: 30663 - DNA, 1169 bp, Mus musculus
acacacacacacaaaacaatattatgagaactgaagagatgtctcacaggttaggaacacttattgctcttgcctgatactgtctggttaccagcatgcacctcatgtagcctatgactacctataatttcagctctatccaaagccctcagtacacattgactcaacacatgcacccacttccccatgcaaacccacacacttagatatagttgaaaatagaaataaatagtaaaaaaagaagaaaagaaatagcttagcaaagtagaattgggttgactatattatatttctggaagaaggcagatagggttttggtttcaatagtaaatgtttcccaaaatgctcaatgcattgaaccctgggtcacatgctatttgtgctattttggaaggttctagaagctttaggagccgaacatagctagaagaagtaaatcgtgtctagatgtatacttgggactcctgtgtgcttatgcctgccttttgcttctttgtctctgtccctctccttcttgtctgcctgaaaggagctgctccttccacacactggagctaatgtgatgcacaagctcactccagacctagatatatggtcaagtgtgtgaacttctgtaacagccagtccaagaaaacccttcttctcttaagttactctcctgaaatgtttgatcaaaacagtttactcatgagagtagtatacacaggccagtttgcagagcagttcttagcatgctcaaagccccgagttccagccctcagaccctcaatactgatatgttgtcacatgcctaggatcccaacggttgggaggttgaggcatgaggttcacaagctccaaaccatcgtcagttacgtagagggttcactgccaacctgggctccatgatacctcatctgaaaacagaacgacctaactggtcggagtactgacagacaagaagtgcttgatgcagtcagggggagccagtgagtggaaaggagatgaggaggaagtgaatttactgacctgttaaataaatgagacacgtgaaaccaaagcacacttgactgcattggtttttcttacaacccaagaaaaacataacaaataatagagaaatagtggccttaagtttaagtttgtagatgttaatatcacataagtattacataagttgatatgaacta

SEQ ID NO: 30664 - DNA, 1163 bp, Mus musculus
acaaggaagaactgttttgttttgttttgttttgttttgtttcgtttttaaacactgtcccttgcttcagtatccctcctccctccagaaccttctgtttgctcccctgtcctatagtggagattttagtaaactaaggtgaaaacccagaagttgtccttgttcatgaaactgatactgtagtccatgcatcacggagtctgtatttgcatgcaggtgaggtatgtgttgttacctgcagttgcccattcttgggctaatccaagagtgcttgcatttgcctctcagttcttcagctgtatctgtctcactttgctgaagggctttgaagaaacctttgtttttgatccggtgatatttgtttatgtcttcctggttttgtgttccaaagatgtctgcttaggtctgtcagttttccaatctatgcagaagatttgagagatgggaacagcagtgaagagcactatttacataagcagattgcaaaggattctcaaagtaggcaaaatagagaaggattggaacaaactttgcacgtttgggggaggctttgaataccatgagtattacacacacatactctctctctctctctctctctctctctctcacacacacacacacacacacacacacacacactccctccctctctctctctctctctctctctctctctctctctcattgcatacgcataccctgctcagctcatattctaaatataaatgaaattataggcaacttggaatcaatttgctgggtttttctttcccttttggcaagcgtactgaaacttgttggagtgtgtataaggttttcttttttgttttttaaacgtcagctcactgaatacattttctgttttgatttaaacagttctggatctctttccttctgagacatgcagtcaaaatttcactctgaaatatgtgtgatgaagtccgaagcggcagaatgattcatgtgactagccgtgtgaccttgggcagggtgtttgatatttctgtttctacttcaccacccgccaaatagagttgtgaatattcaaccaaatgacataattaatgtgcacagagtagaactgttaatagtaagcaataaaatgtacctttgaggtttttttctaaattcattcttcttgtttttaattatgtgaatgt

SEQ ID NO: 30665 - DNA, 1120 bp, Mus musculus
gatacctgataagcctatgctacctgtcggtttgtatacaatatgtgtgtgtacatatgcaggccaaagaacaacccgtgcttccccaagctccattccctttgtatccttaagcaaagtttctcagtagcctgggactcacaaaatatactgggctatccggctcatgaatccctagaatctacttgtccctgcatccccagatcagaacatactttatgtggatattcaggatcaagttcaagtccttctgctttcaagggaagtactttgacaactgaggcatctctatataccaattgttattatttttgcattttgaaattttatacaaaaaactaaatatattttcaaagaatatttactatattttaattttgctataaaagtatataactacaagactatttaaatcgtgtaaaaatgatttgctttgtggttgtttttttttgtttgtttaaccagaacatctgtagacttaatcgatcgatttaaattttgagaattcatacgattttgtttctgaggtcattgtataatacttggtattccttctgacatagaatatccacagtagtgacagcttgttaggacattgtccttagcatctgagtggatttaatactgaatgcagcttatcagaagaaaggcagtcaaactgagaaagtgattaagtcagccactgggcatcctgtcacatctttgcctgacaagctttcttaccaaagcagaggtgcttaagtagccacagagaagtgacacacatgtcagggggagatccaagccatcactccctttgccttgggcatgtgcactttctgaagaagtgggattctcagcccgagacctttcagtaagcagtgataatccacaaggattgaggcagtcatcctggactagagagttcctttcagcgctgagacatctgactgccgttcacatctgaatggcttccacgtctttttctaaagcatcgggggctaaagctaagtcctatacccttttaagtatgtggccaacttaacccggggtctatcaaggcttcagggtgattagagtagttgtgtaggcaagagagggaggacatatctcagggacgggggttgggaatcgacaggct

SEQ ID NO: 30666 - DNA, 1153 bp, Mus musculus
agtgacacttttaaaacacaaaattaaaaaaagggacagacagttgctttcatatataagacattccttgagaacacacaaactgtatgcagaatggtaggtgcttgttgtggctttaattttttttttttaaattacattttccttttcgaagagacaggttggaactagtgagctgaacccttctctgagctataagttccctaaacagctgtagagaattaatttcagagctagctgagatttaatctacactttctgctcagtgtcatggaaaatggccagtgtctaccagctatggaatgttagaaaaatcagatgaacattgggttttttttgaatgttttcctagtagaaaaagcatgaaaaaccctttagtgaactggatttttacagtgtacctacatagtgagtatctgtgatgtatttgtgggtttctttttatgggtgacgtgtaggttgttaggttcttgtttctagtagaactgaagcacactgtattcaacaccaagcttcattttctctgtgaggggtgaagtgtttcaagcagtctgtgacatctgtctgtctgtcctctctgtctgttttccatcctgtcacttcctttcccttccttcaccatcccttcaactctctgtccagaggaagcctgtggctagagcaggtaagaagtgttctctctctatttgagatcccgtttaataacatatatacatatgtatgtgcatagacatatttctatcaataacattttttaaagagaaaaactttttgaggtttttttttttttttggagaaaatatattttctattttcaggcttttagaatttacctgcactgtgaccatttctcttagggtggtgtagtcaaaacatcaaaacaagttaggttagtgtcttgtttaagtatttaaagagctagggcaggtgacacatgcctctaatccagtacttagaaggctgagacaggaggatcaccatcttgggttatggagtgagttacaaatctgcctcagctggcttcatagcaagacatcaaaaacaaaaataccattcctcccaagtaaagcagaagtcaaatccccccaagttatcttctatagtgttaaattatttcataattggtaacttaatggcaagaggttagtacagt

SEQ ID NO: 30667 - DNA, 1138 bp, Mus musculus
tttggctcatggtaaaaacttgttcctctttctttaaatatcctgaatatccttacccacttgtctagatgtgcctttgagaatctccagcagagaccttgggcttgcttcatcagcgcgcacgcatacacacagaatgaagcctttcctaaatgactttcatcttcagctgtagatgaatgcagagtgacctctgctctgccccaagagcctgaccttcttgtcactttgtgtagcattaattttctaatgtgttctggtcagtgtgtaagatttttttgtgtttgctattggcttagatttgatatttccattggttaaaatatgtatgcctatactgtgagcagggagaaacagactaataaaaacccctgaaccagtgtggcatatataattaatattactagaaaatctagctcatggtttattcctatgaatttaaaagtatttggagttatattattcacttttctgaccagtgagtagcaggaggaggctgtaacattgtgtgtgtgtgtgtgtgtatgtgtgtgtgtgtgtgtgtgtgtgtgtgtgtattgtttttcaagcctttcctgacatgtgactctcctgggaggtagattaaagatcatcaggaggctgcagagatgactcagtgattcagtgtttgctttctgcttttccagaggtctgaatttggtttccagcacccatattgcgagaatcacagctttcttgtaactccagcttcagggcatctgacaccttccttgccttcacattcacttgcacacacgtggcatatgcacattcacatacatacatataagtaaaatgaaattaagtcttgagagtccgtgttactagacatcatccacagttttaggaagcctgtatggtgcttgagaatttacatttctagtgtgtccccaggaaaagtaccattgctgctctgtggtctttgctgagatccaccacttaatctttgtctaggaaaagcgaacaggattgaaaatgctccccttttcacagaaacatgggctgctccaagcaattattgaataaatatttatattttgcatgcatttttctaatgtgttctggtcagtgtgtaagattttttttttctttgctgttgccttagctttgatatttc

SEQ ID NO: 30668 - DNA, 1148 bp, Mus musculus
aatgctaggtcttcattttttttttccttcttgtttcccagtgccatctagatctccccatcttctattgacgacttccagtgtgtgtgtgtgtgtgtgtgtgtgtgtgtgtatgtgtgtaagccactgccagggcatacaggtagatttaaaggaaaaattactttcacttttatttcctgctactaagtactggttctaaacactgagactttgggtctggctgggagagagatccagtgaggcagaggttatcttgatgttttgaatgctctccaggtgattttggggggcaaacatggttgggaagcagtgtgctagaggaacaaagagcagggcactaatcaacctctttaggtttccctaagtagtggaagtgtggctttgttgttctgtactcgggcactcagtggacaggattatctaaaagaagtcattatagttgcagggccaaccctcagggttgaaagtagattgaaattcattatttaacaaggtgcccttactatttatagttggagtgtaggtatggcagtgagagataaaattacttttttttcttgctttgaaaaaagacaaatgtctttgaaattaagcataaatggggtttgaagtatatgctgttttatacagcaagaatgccttgctctactgaaccagtttgggtgtttcctgaaatgagtttgcctttcatgggagggaaagtggttgcttgtgctacacatataccatctggttaattatccttaatatactgacactgaatatattgttaggtggacaatacagaggagatactatatctaattttttaagtttcatacaagttttcaaagaatttttttagatttattttatatgcatgagtgttccacctgcatgcaaaaacaggtacaccatgtcaattcctggtgcccacgaatcagaaaagggcattgggtccccggtactggagttacccttggtgtgaacaaccatgtaggggcttggaatcaaacccagatcaagcaacaagtatttttttttatggggtatttatttcatttacatttccaatgctatcccaaaagtcccccacatgctcccctactccctaccccacccacccactcccacttcttggccctggcattcccctgtactggggc

SEQ ID NO: 30669 - DNA, 1186 bp, Mus musculus
taagtcgtggatggtgtttttgtttttattttgttttatttcatttcattttataaatgttcttttcaggtgagcttctgtgctgagtttagcaatcagcagttagaacctaccaatcaccccctgttttcctggagtgctttctctgagatcctagactgttgttatcccatagcaaactcttggggtgaggcgggcagtgatactgacgaattgctttctcaaggtggttacaattccacaatgctgtcaggttctcaagctaaaggccctcctgtggaaatgtgaagaacttagaggcctctattcttcaggcacaggaaaagcagttgcctctaagaggaagccaggactaagggtctgggggctgtgttcttataacttcagcctctggtgagattgtccagaacttttctaagggaatctagtatggttccttggctatctacagcctcttgaattgacttctgggtgttgtagatgggaccacagagggcaaaatcataacatctgctctatttgtgtctcaacataaagttgatggtaactgcggttcctcttattgggtttttgttaggagttggacagagatgatgatgaaaccggcttcttgcctaaccagattgcctcatgtgcggacaagctttgcttgaagttggcttggacttttcagaggctcaattgtggccttcataaggctgtgcctggggttgtatttccaattcctctcaacttttgtccctgtggaagggaggaagtggagttgtgatagatatattgccagatagcacacaatagcacaaagaacgagacagacgtggcgcaagccattcacagagacagatttatgctctgtgctgccctaaaccgtagatccatctatttcaaagaaacaacctgctcactgtattatatttcagacagacacagctttgagatgttgacttctcctgtttagctcttgccagcaacgctgcacattttgctgcagtcaattacttttgtggggacaggaaagtttatttggcaaagccaatcttgtgtctagattagaagtggaaagatgaagatagtatttggctgagctgtcgccttggtgacgtatatatgtgtggagttttgtcttgctgctccttagccaactgcattatcagccatagaagtattacacttatttcgccattag

SEQ ID NO: 30670 - DNA, 1164 bp, Mus musculus
atgcctagattgaccgctaagcaactgagctcgattcttcttgtttcagtttgtttttttatttcttaaaaaaatttaaacaattaatttattgtgtgtgtacgtatgtatgggtcttggttgcatgcatggatgacagaacactccttgaagggattgggactctccttctactctatgggtcctaggaattaaactcaggttgatgacttggcagcaggcactgtgagcctgtgagcctctggcacttttgtttgttttcagtttgagttggtcatagtaacttttataagactcttaattagctggccttcttgccttagccccttaaagtagctgcaattctagacctgaaccgctatgcctttcttgttaaagaaaattgttcctagtaataataaaagatattggggtgccttgtttgctatatgtgacttttaagtgttgtgtaggtgatggaaacataattgcttcctgaggggtctgccatttattacatgggtcaaggatgctcaaggatgctcttaagcctgactttttatgtgttctcagggtctctggtggtagtgataacctctgaagcagggtgctctgtcccaatggcatgccgagctggacaactggctgcgtgggatatactttgtgctgtagggatattgagcagcatcctggctcatttaacactgtagcagctcctactgtgtcaaccacaaatccatccagaccttgccgtgagggcaagattaccttggctgagaattattgccgtagactgtaggggatggtctgaaatcagaagtctgtcatgaatcctaagggtcagcgtctgcattcagatggtttgaccctttaaaaacatccctcaaagcaatgactagagcatatgtagtttgttgaaattcctgtgcaatctgtaagtacctttttagcctcagctcacattgaaaaggaaggtatgagattttcttatgttagaaatgaggttagtagtaaaatgtagaaatttcccatgtttctcccaagcctcacattttatgatattagttgtaacaggcatctttatagaattatagatcttaagagctgaaagtttagggctgcaagatggcttagcagacttaaaaagggggagacttttaatgtgagcctgacagtgtgagttca

SEQ ID NO: 30671 - DNA, 1194 bp, Mus musculus
agtaggtaaatagtaaagagtaggttagacttggggtaggcaactggaaccttagttgcttaccctttttgtttctttcactgggacttcttgagttttgcagccatgttttgtgtgtgtgtgtgtgtgtgtgtgtgtgtgtgtgtgcatattcagtagtgtagttttctgtaagttgtcaatggagattccaccctgtggggcagcttttcatgacacacccattctgtggtggcactcaacagatgcactgctagtttttctatcaggagtcacttatggcatacttctgtggtgtggctctcaaaagttgtccaggaggcttctcactactgaaaatacctttctttcagttgtagataacctcagtaaatgcagtggctcaccaagctggattgtcagtgcctttgtttaaaatgatccatactggtaatttcagattatttacagaattgatttaagaaagtgatgagacccaacttggctcttctatgcctgttgaggacacagtttattgcagtaaaaagagcatagttttccagtagtgctgtctcagggtctagactttcaattccaatcaaacccactgatcatactcctgggttactgttatctgggcaaataacaccactgatagtgagtgacctctggttactctgcatcctgaagagagagtgcttacgtgggttttcaggggagagggttttgagtgatgtctatacagttcaaagttcagagctgcttcttgtaaatttatctttatctttttaactactcagttgtgggtgttgtttagttcacaatcaccacatgttttgttattctggttgtttttgtcaccatgactcaaacctcaacatacctgggaagagggaatcttaatggagaaaatgcctctctaagattggcctgtaggcaagtctgtggggggtattgccttgattagtgattgatgtgggagggtacagacagaccatttggacagggcaggtagtcttgggttgtataagaaaacaggctgagcaatccaggaggaacagcagagctccatgatttttgcctcagtttccacctgcattttcctgccttgaattcctgtcctgacttcctcttgtgatagactgtaatatggaaatgtaagcaaaatgaatgcttttctccttaagttgctttaggctatggtatttattgcag

SEQ ID NO: 30672 - DNA, 1178 bp, Mus musculus
ctctggatgccttcattttatttgggagggggggcactgatccagaggagggattgggtttttttgttgttgttgttgttgttgggttttgtttttggttttggtttttggttttgttaacagtggctccctccctcagggttaccccaaaacctttgtctggtaaacccatctgtcccagcctgcctccctcccaagtcccttctccatagaaagctatagacctggcatcttacctgacttttgttgttattgttgtattgttttcttgaggcagggtctctttagatagccctggctatcctggaactctctttgtagaccaggctggccttgaattgataggactctacccgcctctgcctcccgagtgctgggattaaaggtgtgtgccatcacacctaagtttttttttaatattattattaatattattattcctgcaagcttaggaatctcaggttctcttccctgctctcttcctaggactgactccataaggacccagaccaccacacatactcccacggttgtgtgtccagaaagggctgggcctggcttctgccggccaaccttttaagggaccgcactgctgttcagctgcagtgggtccttggaggaagctagctctgtttctgtgttctgtgggtagatcagcatggtgtggtgtcttcagttctgggggatgtgacagtccctctactagtagaggccctctactctcgtgttttttagcactgtctgctctcttttcagcatcttctggttttatgaatatgaaggatgactccaccccctgctaacccagcctcagaggggacccaagtgtcacaccactccgaagtcagggttccctagaggatttcttttgtgtttttctgcagtgctgaggaatgtaggcagggcctcctgcgtgagaggcaagtactccacagagccactcccagatcctcgcagcagagtctctcggctcacagggagggtaggagattgggctgttaagaaggtaaagttttaggaaccgcagtcaggaaccccctgggttgggctaccaagtcccgaactctgggggtactctatcaggaaagcgcacttcaggagttgctcagtggatagggtgttcccatagcattattcccagcactcgggagatgaaagcagtcagatcacaagttaag

SEQ ID NO: 30673 - DNA, 1157 bp, Mus musculus
cacactcacagaaggcaaagaaccttctaagaggaggggctgagggtgaggctcaatgggtagtttgcttgcctaacacatacaaagcctgagagtctgtctccaataccacgtaaaccaggtgtggtactacatgtgtgtaaacccagcatttgggaggtagaggcaggaggatcagaagttcatgatcagcttcagctacacagggaattggaggctagcctgggttctgtgaatcgtgtgacccccattccctcctgcagggctccagagcctggctggccttccctcaccgtgtccgtggcttctcttccaggtgacgatgcccggtgagcctgtggatgtggcgtgtggagtggatcacatggtgactctagccaagtcattcatctgaaaggccctctgggcccagcctgggagccacaccacagcagcagcttggcagaggcagggggtggccaccagcagagcttctgagggtactgggagagggccagggcctctggggtgcaggatgcttgctgtgtgtcctcagtggggacattctactagaggtgtgtggacaaagcccttcccccgctgaggttcctgctgctggcctcagctcaggatggctacagttggcttgccgtgtttctgaggagcaccagggcgtgaagaccttgggtggccaggcagattccttttccaggtaacacatggtagcatctggggatgtgtcttgtctgagacactattcttagagaaagttcactgctcatgacacatttgatattaagagtttagagacatgacaaggcactcagaagaacttgtagtcccctgtcacaggaggataaagttggcctcagctcagcaagaagccagctgactgcctgcagctagggcctctggtcagctgtcatcccaggagtcccgcagaaggacagtccaggagcccaggatgccttggcttgagactcttgatggagctgccagtgggagccagcctcccgctcaggcctacagtatcccagccttggaacttcctcactgcctggctttgaacagcccagaagcccctgaagaaagactctgcgggccaagtgcttgtgggctgagggccgtggaatcttggctgaagggctggccttggagtaggaggcctcagaaactgg

SEQ ID NO: 30674 - DNA, 1860 bp, Mus musculus
agaccctgtctgtcttggggtggggtagggtaatacagaggtagtattccttaaagggacatgtttgttttgagtctgtatgccaaggttgcctcctctctggctgacctctttaggccggtcacaagcccagccccatcagttgctgacttgccaccaagaggtgggctgcagtgacccgcaagtgaggagactgcagtctgctgtgatgggctttgcctggcagccttggtgatgtgcctgaccgtgtcagatcacaggcttaggccttgccgtctttcacaagtgcacttgggcctgcatgtctgtcagatggaacagggtgtgtgacaggaggttgtcatgcccctgccatctgactcacccactgcctgcgtgtttgttctctctgcagttcgtccagtgtccagcgtgcgtggtggagaagagctttgggacccgttcctgccagctctgtaatatacttgtataacagaaataccttctatacaaaccttcttttctacttttagatagaaatgtctactttctcagcagttctgtgaattgagctacacagcgtgatgagatgcgcgtgcctggtggcttgggaacgcactagaagggtcttgcagcagtgctgaaagaggcgggaatggcagggacgactcgtagggtttcttatgcatcgggcagagccttgggctgtggtgcgtgttcccgtcagtgagatattcctacagggcatcttggcttccgcagcaaaggaagtccctgtgctagtcagtgctttagtttttctattgaagaccagttccgtggtcttgcactcggctgcccctcctgccaggggagggctgctgtctgtgtgtgtgactaagcctcttcccaagctccatcacgattcctttgtcctcactgccattcagagcaaagccggccagctcgcctgaccgccagtgagcagccagtgcatccgtgcagtgcagctggagaggctagcctcagagcctcgctccggttactttacagcaagtagatttctgggtgtgtcctaaaggtcagaggtcaggtctgcatgcttgagcaggtggaggatttgcccctccccaactgggacccacagtggcctcaggggctctgggccgcagctctgggtctgggtcgagtcaggctgggctgtgtgtctgcctggttggttagtctctaaccacctgtctggcctctgcgccagggtggggagtgaggacattggtgtcccgccctatgtgggggctcacagacgatgataaggtaacagctctcagcagttaggcacgtgagggcacggttctcggtagtcaccacaatgttcacaatgggaaattatatcacacggtagcagagataggcattttatgtgttccttatattttacctcaaattgtagatatagggtaataaataaaatccatccatgcctttcacatgcaaactcattcttttcctgctgtcttcgtgagcgcctggggaggcgggacgggtgtgggctggtaggatgttcacctcagtccctcacagatgggacacccgtattcctggtgtttctcaagaagtcactggtttgtggagctggagctgtgcccagcccccaccggcctacatcttacgtgcgttggagacagaggagaactctgaggacacagccacagcacaggggagtccctgagtccctgctggaggatgtggaagatgatgcccgcccaggctgcggccagggatcccctggtaacatgatgcacaggagagtcagtcatcgggcagaagcctcctcggctgagatccgtcaggcagtactcagtgacagggcacagaggagaaggggcagctcacccgctgctc

SEQ ID NO: 30675 - DNA, 1157 bp, Mus musculus
tagcgtttgatctgtgattggtggtgaggctggggttaggcctgtcacgaggttagagtgtaaatctttcagcttgtgtgggcgtgttcaagaccttccttctgggatgagtgacggagtcttggccaggtagtggagttttactccattgagagcaggggtccctctctcccacaggcagcctgttttaaagtgaccttcatctgttcagacagagcaaggtgaggtagccacgtttcttccctccctcttaccttttcccatagagctgattgatttttgcaggtcagttgggtctgtctgtctgtctgcttgcctgtcagttgctgaaactgtgccatggtttgggttgcagatgacctcgttgagcatccacctaatgaacgtttgccctttcagagtctttaaagtgtgtgaggccttgagtgcacagtgccctggagctgtgacacaccggagcctgtcacttgttttgtaggcatttctctggaaatggccgctgtgacagtgaaggaggagtcagaagaccctgattactatcagtataacattcaaggtaacgatgttccctgcagtctctgttcctgacactctgtggcagttaaagctctctgagcacgttcacactctgccatgctgcctgctcctggttcccatttcagtcgggaggacgtgagctggagctcatcttcacctgtacggttgtctgggtcatcttagtgatttcatcttggcatggtagcacatgcttgtattctcagcactcgggaggccacggccagccagagccatgtacatacatacatacatacatacatacatacatacatacatacatacacagggaaacgccgcctcaaacagacaggcgctttagtggctacttcagtgtctctgattttttaattttccacaaagttctggattgcccttgcccggtagacttgattttccttaaagtaataagccttattggacatggagtcttttacaaatacctggaataatttgttatggtcctttagtgagcagagagctgtgtacatttatggctgagtgtcagtgaaactcattaaaaaaaccaacacccaacctagtgcacatgcattgaagtgaaggcactttcatgccatcactcctgggaatcgaacttggtt

SEQ ID NO: 30676 - DNA, 1174 bp, Mus musculus
ctatgttggggtgggaatggggtaggaggttgtgtgcctgtgcctgctccaaggccagaggaggccatccactgtcttctactctaactcttcctttgaggcagggtctctcagaattcaggcctcgagcttgaaagctcactgatctgtctcttgtttctgcttccctccgagctgggctgcaggtaatggcaggcttggttcacttgtgatgggaattctgagatacaagctctgatgctcaggattgtggggcagatggttaaccactgagctagctctctcaagctcccttgctggggttgcagttgttgtttcctcatggggatgatgctgaacgtttctttcatgaacttgccagtgtgtgtgtgtgtgtgtgtgtgtgtgtgtgtgtgtgtgagagagagagagagagagacagagagggagcagagtatgcatatgtggcatggtgtgcctgttggcatcagataacctcatgtgctggtctgagcatgtggctactgcagaagctgggctgtctgaccttcgagggcccaggaattctctgccttccatcttgctgtagagagctggtttacagacatgcaccaccttggcccgcctcacttgggtcctgggagttcagactgcagttctaggctgtgtggcaagtgtttgacccagggagccactttcccagatcctgttttctctcttaacctgtgcttactgttttgttttttttccattgttgaaagttctgcctatattttggatataagtcagaaatatggtcttgcagatgtttcttatggcctctgcttggttttatattgtctttgaatcttaaacaaattttagtttctgtattttcaaggttgtggatttttaaaaaaggttttaaaacattttttaaaaaaaatatttatttatttattttatggatataagtactctgtagctgtcttcagacacaccagaagagagcatcagaacccattacagatggttgtgagccaccatgtggttgctgggaattgaactcagggacctctggaagagcagtcagtgctcttaaccactgagccatgtctccagctcccatttcaaaacgttttttactctttaattatcatttttttccttcctttctccctctctccctccctcctccctccctccctctctcctt

SEQ ID NO: 30677 - DNA, 1210 bp, Mus musculus
tcctaatgcagagttaacaatcatagcagggaagggaagattacagcactcggtaatgtgaaaaaggaggtagaagaagaaagggaagggagatgcagccggccaggacactgcggcaggtgtccctaactcctgacctagccctgtgtaatttgagtttgctgcatgagaagagccaggatctagcactaggtagcttccaggatgcttggcctggagtagcaggatgtgggctccagtaggccgggcagggactctctctgtatccagcgtttgcttagccgccctggcctccaccctggtcccctacttaggttcgtgtaacttctgtgtgccttaataatggccacgaagcttaagagtgctgccctgctgcctggctgtgccagggaagcttcaggggcctctgtgaaaaggtgaaagtttctcatcaactcagaatgaaagtccgactacaggaggagcagctctgtcattctggcaattgaactgatgaaggaggaggtggaaacccacaccgtgtgtttgtggctctaacaaatgccaatgccatgggcacagtgtgggacaggggcctggtgtagatggagaaggcactgagctgccggtggaggacatgaccctgggccctggtgcatggctgtggtggccaggccaggtgtctgtcaccccagtaaggactgctgcagaggtgacaggcactggctatgttttgtgcacagtggtggaagtgtgtcagagcaagcttgccacccacccaaggccagtcttcatttccatgacaatgagtaagtgtcctaagggtgagtacaaggagaacatcccacttggctgtcaccacagagccttgtgataattgctgtgtttgcctcactgagcctggtttacaatgaaactttgtcctaggtgtgtgaacaggaacaaaccaggatctgcagggttgggccctgtccccagtgatggtgacgagaaggatgagcctggccagcttttccatccctttgtcatgagcgcacggcacggctgcctttgccttatgagaactgtccagtttgcagtgggctggtgctgatcacagcttgtcctgggtgatctattgtggctagcctctgaaattggctaggctcctgagaaatagatggtctttgccgtaggatcacagtagaagcactggcaagtttgatgcctgagccttttggatatgcttgtg

SEQ ID NO: 30678 - DNA, 1145 bp, Mus musculus
tctgtatctgcctctctggtgatgggattacaatttcacactatcgttcataacttttaatcgagggggtgggggagaggtagggaaaagaattgtttgtgagtgcaattcctttagagaccagaagatgtcaccagatcccctgctgctggagtttcagttttgagctgcctggcacaggccctgagaactgaactcaggtcctctcaaagaacagtgagcattctaaaccactgagccatctctccagccctaagccttgctttaaaaaaaaaaaaagaattactacatagtgtgtgtatgtgtgtgtgtgtgtgtatgtatacacccaggtcttcaaccttagaggcaggaaggtgtttttaccatctgagctacttggctggcttcaggccctgcttttacagaggatgtggggctcagatcttatgtttccaagctaaacactttacccactcagcttttgtctgttgtggttattgctgctgtgttttggggggggggggattctttatctgtttgtttcacctgcacgtgtttatgcgcaccatgtgtgcctggtgtctgtggaggccagagaactagagatgtaggtggttgtaagccacaatgaatgctgggaaccgaaccttgttcttttgcaagagcaaccatcgctcttgaaccactgagccatctctctacccccaccccaagcccagtttcttcttttttaaaaaaatatttatttatctatttatgtatttaatgtattcgagtacactgtggctgtcttcagacacaccagaagagggcatcagatcccattacagatgattagagccaccatgtggttgctgagaattgaactcaggggctctggaaaaacagtcggtactcttaacctctgagcccttaatctctccagtcccccagtttcttccttgaaaaagaaaaaggttcttttttgtgaagtagaccaggccaacctggaacttggtggagtttagctgagaatcatctggttttttgtttttggtttgtttttggtttttggtttggtttggtttggtttttcgagacagggtttctctgtgtagccctggctgtcctagaactcactttgtagaccaggctggcctcgaactcagaaatgtgccttcctc

SEQ ID NO: 30679 - DNA, 1148 bp, Mus musculus
ctctccgactgcttcaggccttttggtatccagatgtgtgtgtgagctcccagagctccgggaagagcaaggaacccttggtctctcagaggaagaacaggaagccacgttcatgccctgagcttaattcagacacccaacttagtctacccttactggcttgtttgtttgtttcattttattttaatttgtttgtttgtttgtttggagagaaggtttccctgtgtagttctggctggaacttaatacgtagaccaggctggcctcaaacttatcagacccgcctgcctttgcctcccttgtgctgggatcaaaggctcgcaacaccactgctggctgttttagtttgggggtcctttgttttgttttctgggttgttgtttgtttgtttttgtttttgttttgtttttaagacatgcatggtctgtgtactgtgtagcccaggatgaccttgaatttctgagtcttctttttccaccgggattacaggtctgcatttctgtgctctacattctccatggcttcctaagttatgtcagacgggttggctaaaatagttggttttgtgacgtttccacacattcagatcaggcactctgatcctagtgtctgagtgtctgtctgtctgtctgtctgtctgtctgtctctctctctctctctctctctcacacacacacacacacacacacacacacacacaccatttatacactcatccccctgtcccagtttcatcctgtcacccctgtgataaacacaacgactgaagggaagcaactttggggcagggaaaaggtttatttccacttctgggtcccagtccctccttgaggaaagctggcaggaactctgcagatatcttggaggaatgctgctcactaactcactctctgcctcagcccttgctagtgctgggctttcttacacagcccaggaccacgcccattgagggcaccacccacagtgggctgagcatccgtttacaggattcctcacagacacgtccataggccagtctcctgtgggcagttcgctcctcagagggccccactttgttgttaagccctgtggtggtagcagcacacacagcctcccaaatgctgggattacaggtgggtgggtacctccatgcctgtccttcttggcc

SEQ ID NO: 30680 - DNA, 1178 bp, Mus musculus
tgcttgcggctaagcctcttgctctggaacccacatgatggaaggagagaaccgactcttgcaagttgtcctctgacctccacactcaggctgtggcccttagccatgactcccaataaataaatagtgaaccttctaaagtgtttgaaaaaggatgctgggccaggttgtggtggcactcagaaggcagtttgaggttagccttgtatatagagtgacttataggatagccagggctacccagagaaaccctgtgtgtgtgtatttgtgtgtgtgtgtgtttgtgtgtgtgtagctgggggacactgttctttaatgcctacatttggggagcaagacaaatctttgagcttgaggctaacctggtctacatagtgagttctgagtcagccagggctacatagtgagactttgtctaaaaacgttgaaagaagcacacgcagccaacagtgttagatggactgtggccaacaccgtatccactgtgacttgtcccttgcattcacccttgttcttacccttccagcggaagccctgggcctggaccacatggtccctgtgccctataggaagattgcctgtgaccccgaggctgtggaaattgtgggtattccagacaagatccccttcaagcgaccctgtacttacggagtgccgaagctgaagaggattctggaggagcgacacagcattcacttcattatcaagaggtgtgaattggctccgttctatgaaagaaaggcttcctagaatccctcagtgaggagctgggggcgtggctcagtggtagagcccctgcctagaatcccccagtgaggggctgggggcatggctcagtggtagagcccttgcctataatcccccagtgaggggctgggggcatggctcagtggtagagcccctgactagaatcccccagggaggggctgggggcgtggctcagtggtagagcccctgactagaatcccccagggaggggctgggggcgtggctcagtggtagagcccctgcctagaatccctcagggaggggctgggggtgtggctcagtggtagagcccctgcctagaatcccccagggaggggctgggggtgtggctcagtggtagagcccctgcctagagtcccccagggaggggctgggggcgtggctcagtggtagagcccctgcctagaatc

SEQ ID NO: 30681 - DNA, 1176 bp, Mus musculus
tactccgccatatttctaatccagctccacttgttctgcccatcccaacccagccctgcttcatctagccctgcctagcctacccactttagctcagccctgcccagttcactctccttcagctatgccctgcctcactcagcctatccaaaaccagtttacccctgcccagcagtgccctacccaggtctgccctgcccttcccccacccagccccaagcctagccttgctcactatgcccagctcctgcactgtgggtaacccccatccccgaaccaaacaagaaccccaagacatggctgtccccattccagcccttttccagcccccaactccccggcatgtgtgtccctatccagtcgcctgtcttggacagccacatcttaccatcttcccacctgtattctgcctcctgattattctagaaccatagttatattcccaaaagataagcctgaggttaaaatggagcctgccatcacctgtgaagttttgtctaccagcctggcacataggccttcctgttgtctccctccagccctcagatgtacatagtggggctctatgtacgggctggtgtcgttcactctatagagtatgcatctggagaaatgagggacccagagcccctctccaaaggggagtcacctcacattgcctggctcccaatgtacctagccaaaccccagccagtactgagcctcactgttcactctctgacaggtgaggctatgggcagggccaccgtggtacctttgccctatgagaggctgctcagggagccggggctactggcggtgcaggggctgcccgagggcctggccttccggaggccagcagagtatgaccccaaggcactcatggccatattggagcacagtcaccgaattcggtttaagctcaggaggtgagtaagccctgtcctggtttcatttccttttgctgtgttaaaaataccttgacaaaagcccattaagggagaaaaagtttatttggctcccattcctgggttataatccatcactgtaggaaggtcaagttgacaggaatctgaagcagctattcacattacctccacagtcacaagccaaaagcagtgaattcaggcacgcctgccagccctcagcttgctctctctattcttagacaattcagaatccactgcctagggaatc

SEQ ID NO: 30682 - DNA, 1139 bp, Mus musculus
gtgtccctgcacatgtaaacaatgtgtggaagtcagttgtctctttccgccatgttgaatcccggggattccactcagacagtcaggcatctctgccaacaaggacgccatcttgcctgtccaggccttctgtcttgagatccactctgtgtagcctcgggtagcctgcacctcacagtcctcctgcctcaacctcttgagtgctaggattataagtgtacaccaccacactggtgtttcacatcccttctggtggcctaccatacttgttttgggctggttccctccctcccctgcccttcccttgcctgccctgccctccctttccgtccgtcctctcctctcccatcttctggacccctaatttgcttatcatatttcatgcttcctgtttttcatcccttaatactaagtaaaaaaaaagtcagtttttactttacctggcttatttattgattaaaagtcaattttttaaaattagtgttctgtatgtgtgtgtgtgttcacatccgtgcacgtgccatggttgatgcatgcgcagatcagaggtcagtcttcaggagttggttgtctccttccatgcaaatcccatggatgcaacctggcattcttggtggcatacaccttcacccatgagccatcctgccagccctgtttttgccttacctttgtgctcctgacatatctgagcctggggcttctcgtggctcctatataaataaagcaggcagcttcccaagtacctcaccgggactatgctggagacaggagggtcctgtaagccgagctagctagattttggatagccccacaggccagctcccttccgtctcccggggcctctggctcagagtccctgcttctctcctaagtagattaggacctgggccaggaggagtcagaagagtctggaacaagctggaggtcaagaatgccagctactgctgcctgcctggccctgatctgatttgggtctgggcagctgggaggctgggactggcccaagggctcagaggacgatctggcagccatagccgtcgggctcccaggctaacggatgtcttggctgtgagggaatacagttatccagcagtcgttccccccccccccccagcaccccatcagtggtgacttaggat

SEQ ID NO: 30683 - DNA, 1296 bp, Mus musculus
gtgtgtgtgtgtgtgtgtgtgtctgtgtgtgtgaattgctatatatccaaagctaggtggaattcttagtacatcttaggttacagtgggccttgctatgtagcccaagctagcctggagcttgcagcaatctttctgccttttttcttgagtgttgagataacaccttgagacattttccatggcaatgggaatcctttgcctgcatgtgtgtatgctcacaacatgtgtgcctggtgccttcagaagtcaaaagaaggtatcttatcccctggaactggagttgcagatagttgggagccaccatgtgggaacggggaacagaacccaggtcctctgtaagaaaaacaggtgctcctgaccaccaagtcctctgagctactccatccatcaaggctgcctggcttgtttcttcctttaggctctggtgaacgctgctgcagtgaacataggtgtgtaggtctcggtgagactgtcgttatcttcctggaatatcagggttgtgagccttgtgcagacccaagaagatggccgtcagacctttatccagcatttagtgtcagtgcatactgctcatgactgtagacagagatctgtgctatgtgttcattgcagaacccggtacagcgaagacccagccaccttgtcatcaagggcagctcacaacacagcctttgggctccctgattaccaactagaaacgggctgggtccgttatgaaatgcgccacgggacaaacttgtggtgctgagactcaaactcaggacctccagaattctaggcaaatattctaccaccaagctgcatctctaacaaaccaattaattatttgagacagagtctctctttgtagctcaggctgatgcacaacttgctatgtagccgaggacagccttgaacatctgtttctcctgcctccatcccagcgatagaaatgtaggcccgtgccaccgtgtctggtttctgtggtactgaggaggaaacctgggttgtccaacacccctcctcagccccgcaggcattgctggagatcccctgaggtagccaggcacagtggtggcacacacctttaatcccagcattggagaggtagaggcaggctggcagagaaatcctgtctccacccacccccaaatcaatcaattaatcaatccctcaggcctaggcagatgtgactgggacgcaggcccgtggactgtgacattctctcccagctatgggtaaaacacagacggcgttctgaaatccagggccctgggcaattccttcccctctgggcagctcataggacaggaa

SEQ ID NO: 30684 - DNA, 1139 bp, Mus musculus
caggggaccctgggttccattcacagcaccacataaaccaggtgtagtgtcatatacctgtgaccccagccctggtaagggggaggcaggaggatcaggagttcagggccatcctccactgcattgcaagttgggaggctaacccgggctagttgaaaccctgtctcaagcaagcagtcaatcaaagctgtttgacttagcactgctgcgcctgtctggtttgttgatgtgtacactgggggtgcacacaacacaggaattggccaacagcgcttttctctcagtgttttgtggttgtcccttgatgtgtgagtacctgttgtatagcagacactgttgttggtgccatctatccgcagtggtcagaatgagaagggaggtcggttgggaccaccatctctaccacatcaagcttttgggtcagaccaccacactgctttcccatcagatggaatgtaggagaaactggccatgaggtgctttgaggtggtcacctgaatttctaaccagtgtctgggcccgtgaaaagggagtggagtccaggcgccccactggacgtgggtcttcaactcggcgtgtaggaggcttcaggaagcaaggtcctcttaaccctgggtggtgcgtgtctcattaaaccatgcttttcttcctaaagaaggaagctccgtggagcccaccatgactctcacagcctctaccgtccactctgttgacctctcaagtccctgtccccctagggttttggtgtcctcacatctttcctgacctttgacctgccattccgaggctctcagtggccagtcttttacctgcctaactccaccttcttgttctttctatacctcggccgctttctcatccatcccttgttctccgcgataccccccatagctctccagcccagggccctgcccggaggccccttagccttgggcatccaatcagaggctcagcttctccccttctgccttctttctttcccagggtattggtatccctgtgaatgtttgagttgggtgtctcaggaccccgtgtacccctaaaccaccgtcctgacgtcttcctgtctgctttaggcttggcatcatcctcgcttctcttctcaggcagctttacatgagccatgacccctcagtcct

SEQ ID NO: 30685 - DNA, 1347 bp, Mus musculus
catagtgaggccttatttcagaacagcaacagcagaaacaacctcctggaggtggaggcaggagcatcaagagctcaaggctgccctctagtacatagggagtttgaaagcagtctggactctgagactaacagacggggccttagctccaggtttgctccgcaagcttggaacgtgcttttatagcatgagccaaacttgagtgaagccaggtcccgcctgtcaccctgcattgtgaggtcctcgtatctgctttgaacccgccactagttaagctggttaggaacaacgagtcccgcttacccacctgctgctcttctcggcttgtctttcaggagattggatacactcacatgaaagtggcggaaggagtgaactccctgctgcagatggctgggctcctggccaggctgtgtcagaagaccatggctccagtggccagctgacttgagacggcctccactgatggaactaggagagtctttgttgtgggagatgtgcctcagctagaacatgctcactttgtttttcttctgtgaaaatagtctcttgtaccccaggctgaccttgaactcccgatcctgccgagtgctggggttggaggtgtgtgtcatgtgtgctttctgcggtactacagatggaacccaggactcgtgcgtgtcagacgagcactgccagctgggctacagtgagatactgagctctggaagtgacacacctctgctcttctgtgtgaattcaagccctggacatggggcatgctgggaaagctctgacctcctcagtcttgtagccgataaagcctttggatgttcgtcttgctatgcttaattgcttgcggccttggggaaaaccagcgtctttctcctgcctgttgaaccccaatattagaaagggtgccctggggccagtgagactgcagcagtgtcggccacacacccggcctcctgagttccatccccagaacccacaagcaggtggaagagaactgactccacaaacattctctggggagcccgcctttaatcccagcacttgggaggcagaggcaggtgctgtctgagttcaaggccagcctagtctacagagtgagttccaggacagccagggctacacagagaaaccctgtctcgaaacaaacaaaaagtagtcttttgggtcctgtatacatgtacagataataagtaaaattataaaaatctttaaaatttaaagaaatgaagccaggcacagtagcatacaccataattttttttaaacaatgatttgtttatgagtgatttttttgttgttgtttttattgttttgcctgcatgtatacctgctcactgaacacatgcagtgcct

SEQ ID NO: 30686 - DNA, 2228 bp, Mus musculus
cagcttaaacctcggacagtggcaacgcccctcaatcaagtagccaaccccaactcagccatctttgggggagccaggcccagagaggaagtggttcagaaggagcaagaatgagcttaggttgggagggaatggggcgtgggggagctggagcaagaccacggcctggtggcagccggtcgccctacaggccccattcccgcctggcactgtcctccttacagcggaaacacagagcttgtgagtgcatgtcagctgttaacaagtggtttctagtacattcttggctttgctatatctatctagtgcctgttttgtgctttctttctgttttctttctctcccctctcactcctgccctctccccgcccttcccacgtggtgtggatgttggtcacgtgtggaaggtgggctgaggtgcttcatcctttgctttctttctttcctttacacgccctggccacactccgggcgtgctgtcctctgctttttctcagagcttctctccaacctgcatgtcgagttctgtgttgctgtggcttctgggaaagagctagagccactagctaggtggctggtggtgacttgttggtgtccagctgggatgagcatgcagaattgatgcaccttggggtagaacaaagaaactgcctgctgctcctgagaggctgctgtgtttggggtctatcacccgccccagcagcctgatcagccgtagcaggctcctgtcagacagtgaggccagatgggtgcaggggagtctggaccttctgcactggtggcgacctgggtggcagtggccatgtggctttgctcctgctcgctcttaagaccaagtggaagctcattccctgctcttcctgggccatggaggccgcttgggggtgcaacccgctgcagctcaatccgcttcctgcagctgaggcctgtaggaagcaggggtggtgctggagctgcaccgggcagctgtgctttgcactgagtctgcgctctttcccttgtgtctgtctgatccagggcgcttagcccaagaggctgctcgccaccacagctcaaggcctagagtctggcactttctctgatcagttacccagctgttgagaccctcagtacctaggtgtctagaaacctctaggtgtgctgcttcctctgtggggcagacccctgctcccgcagacagtatggagcactcacttgagagagagcaaaggggatcaaccaggtttggcttttggcttgaacagttgtgtgtgaacaatggaaaaggattggcacccagtctccgtctgctccaattggagcagtaggggtcagccagccactagagccttggggaaaggggctgagaggtgtgcagcttgcttggtagccagcagcttcctgccagcctaccccttggctcgggattgtctttgttgcaaggtctcggcaatttacagaactctcactccttccctcgcctgccatcttctctgcttctgagataagaaccatttgtgtaacaccaatacctaacttaagacagacatgcattgcgtggttgtaatcaaagctgatgctttcagatgatgtaatccatctccaatgcggaaaagacaggcccgtccatccacattgctgggcacccagctgactgtaagaatggaattccaaacacttaacacattcagttctatgacagaaagtgagtctatggatatggtattttgtgaatgatcttttaaataaaagagaaccttacataacacttatgcttgtctttctggccacttgggagctgtgaaccttggggtgctacagagaagcatttacaaggagttaggctggcgtgttgaccatggtcctgctgcgcacactgccactgagtatgttgtgtgacctagtttgcagaatcctgatcttggaacctctaaagaagaaactggaggtaggctagtcatctcggcactaggacatgtgtttactgtgtaagcatttccagcatccatgtaaaacgtcatgtgtacccataatcccagcacccgggaaatggagacagaaagatacctggacttgcttgccagccagtctagccacatgtatgagctctggtaagaggagggcttcgagaagctagagatggttcagtagttgagggcaccagtttctcttccagagaacccagattcaattcccagcatctacatggcagttggcaagcatttgtaactccagcccaggaggttggg

SEQ ID NO: 30687 - DNA, 2227 bp, Mus musculus
cagctctgcagtggtcccggaaaggctttacaattgaagtaaaagcatcttaaggctgtgggcaaggttggctctgtggctgagcacttcccttagtaatatacatgaggttcttcatccccagccctgcaagaagggaagtgagtaactgtaagaagaaataagttccagtgcccattgagttagcattctctacctgatggaatagagctaacagcttgcaatgtggcttagctggtacagtgcttgcccagcacggtcactgctttggattctgtccctggcattacataaaccaggcctggtggtatgtgcctacaatcccagcatttgggagatggaggcaacaggatcagaagttctggttatccttagttacttagcaagtttgagggccagcctgggttacaaaagattttggggggtggagggttctgggatctactgtaacccaaatgggacaccaccaactgtggtgcttagtgatactaatgagattccgacaggcctagagtccaggatgactgtatgaggtggcttctgtttttttcttccagggttctgctatgtagaatttgatgaggtggattccctgaaggaggctctgacttatgacggtgcagtaagtgccctcaacttcccttgcccagacaaccatgtgttcctgttgatatataaactgtcttttccttgtcctcagctcttgggtgaccggtcacttcgtgtggacattgcagaaggcagaaaacaagataaaggtggctttggattcaggaaaggtggacctgatgacagaggtgattagctgtcttaacactgaacggaacttgctgtgtgcacactgcttgccacccctgtgcatcatttactgagcattggtccctgagagcttgggttttgtcctgtttctgaagtgacttggggtttctattgtgatgaaacaccgtgactacaagcagctcagaggaaaaggcttatttggcttaaacttcactgcactgctcaccattgaaggacgtctgggcaggaacctggaggcaggagctgatgcagaggccatggagggtgctgcttactgacttgcttcccatggcttgcgctcagcctgctttctgattgaaccacaaaccactagcccagggatggccccatccacattaattgctaatgaagagaatgccctatagcccagtcttatgggggcatttttgtagttgaggttccctcctctcgtgactctgacttgttgacatgaaagtgtccagcacagacaacaacatggcctcgtcctagataggggtctcttgctgtgtgtgaggaaaggcatcttgaggaagagagctacagtccatcatctagggaaggaggctaaggcaggatctgaggcagaggacactgaccggggaatgctgctccctggccgacatgctcagtccgcttccttagacagcccaggctcgcctgccctcaggtggcattacttacacactgtttcctgggccctcaagagaatgttcccttagatgtgctcacaggggacacattagtcaggccaggttctcaatcaaggttccctcttgttaaattattacgcttgtgtcatgaaaacagagtaatgagcacagccctcaacttgatctctttgtgtgtgtgtatcctcaggaatgggtggctctcgagaatctagaggtggatgggattcccgggatgacttcaactctggtatcagtatttaacattccactcttccctcgtcccttgtttctcaggatgttcaacctagacaggctttgaattccttccaccagtgagactctccacaaggtctccagccatacgcttcgcttcaggattggtagagaggccggccaggcccctcttcctgctttcccctgagcctgttgctggggctgtagctaggacaactcttgtgtttcatatgtggtacagaaagaattagaagtgtttgtagaagtaacacagcaaagaggctccaggagtgcccaggtccctcagtggtgtggaccctggcggctggtattcctcttgaagggcgtggagctctggttccttcacttcagggtagataggctctgctttagcatcccctcttcagccaacccagggtgttcagaggatgtctgcatcagtagagatgaggggcacaggcatgcaaatgccaagtcctctagcaaccagaaatgaacttattcatgaaagtacagta

SEQ ID NO: 30688 - DNA, 2226 bp, Mus musculus
gctgccagtcaactgagccacagccccggtgcctcggggctcttggatcttaatagaaccatgctttccctgcctgtctgtcacagtgcctagtcctgcatccctgctgatccttgctctctgtttaggtcgtagttatgatgaaaaggtggacgtgttttcctttggaattgtcctctgtgaggtaagtcacatagccgcccttgtgcccagacccagtggctcctctccactctctccaaccctcccatgctccagcctggatgtccacagggtcctcaggcccttagaacatggctccccaaagcagagcacagcatcagtggggtatagtttagtccctggctattcctatctgaactgtcctcagagcatttggcaggcttccagaacccccaagctcaggggtcctacactaaccagtgggctctgtactgaacagattatcgggcgtgtgaatgcagaccctgactatctgccccgcactatggactttggcctcaatgtaaggggtttcctggaccgctactgtccaccaaactgtcccccaagtttcttccccatcactgtgcgctgctgtgacctggatcctgaaaagaggtgagttgggtgggtcagggggctagcctgaagcagccttgggatgggtaggtctttgggaaagccagactcactgtcccctgatactaacctgtctatcaccccagaccctcttttgtaaagctggaacaatggctagaaacacttcgcatgcacttgtctggtcacctgccactgggcccacaactggaacaactggagcggggcttctgggagacctaccggcggggcgagagctcactgcctgcccaccccgaggtccctgactgagctcagcgggccccaccatctgcatccctacctttggagacgataccctcaccagatttctcagcaggggtggcctaggcctggagccctcagccagggccgtggtgcccacacccatcccccagacccaggccctgacctgccttttcccctcatgcagggtgccccccagcctctctctgcctctggcccccaagtcaccaggctgcacacacacgtggtcggtcacattgccctgccttacctcccaggggccaacccctcactggtcttgcatgagctagagggttgggaagctgggctcattccacgcattgcctgcagccatctgcacactgcacctgctggcagctcctccccagcaaggctgggctagaaggcagctttagaagtgagcccctctaatgccaagggagcggctctgtgcccaggaacccaaggggaggctaggatccccttggggaaatccaggtagcatcaggtattgacagggatctgaatcccaaagcagagagagaggtccaaccccgtgtggccaggcagtggcccctcactcttgcttagtgtccatctcatttcttgatcaaagccactttagtgagaaataggtaccagtcctcaggacgagccaggatccctcaggggagagggcagacgatgcctgggatccagctgacaggagggtccagcccgcactacagaggctgggcagagggaaggaggcagccacccaccagcaccccagccctccagggtcatctcagcacccaggcctctccccatggctggggcagccccgccccctccctgggtgcatctgccctctgagttctttctgtgtgatctattttttaagaagagtttgtattattttttcataacggctgcagcagcagctgctgggggtttagggggatggttttgttttgttgttttgttttggtttaggtgggtgggggtgggagggccatgtcttcactccgcttcagttgaccatctagggcatattaaactgtgaagctttcccagtgcactttgaatatggaagagaatttgagcagacccccgcgggaccaagactgaaagaggcaaggtctccttgcctcggcccagtgatcatgacaggaatgaacccaaactcagaacaataaaatcaattctgtgctccccacgcggggcttgcatcctcgtgtgtgtgtctgagagctccaacggagcaagcaagaagagagagcgagctgggcgtagtggcgcacgcctttaatcccagcacttgggaagcagagcaggcgatttctgagtttgagaccagcctggtctacatagtgagttccaggacagccagggctacacaga

SEQ ID NO: 30689 - DNA, 1188 bp, Mus musculus
gcctccatcacttgtttttggttttctgagcctgctaggtaggtgctctaccactgagccacgcccccagcccctccatgggggattctaggcaggggctgtaatgctccaatttcttgctgggaaattctaagccagaattctattgagccatactctaatcccttactggaagattctaagataactatgaaaccatgcttcgagccccttacaagggacttgggggtatactaggcaagctttctacctctgactcacacctctagcccctcactggaatctccagaagttttaggcagctccatttgcaaagagctgggacagacggaggtaccctcctccacacaggtccctggtatctggggtgtattctctgtgccctctatgggattatatggaaaggatcccaaatagaaccaaacagagagacgaccaggtctcagcctgccttatgaaatttccagaataggaacgtggtggtggccgactttgggctggctcgactcatgatcgatgaaaagaatcagtctgaagacttacgcagccttaagaagccggaccgcaagaagcggtacacagtggtgggcaacccctactggatggcgccagagatgatcaatggtgagtggttgctccaggagtcccagggggaggagcagcagctaccccacaagctgcctctctgccggtttacttccctaggatcctgtatccccttctcttgtttccctccagttgacaagggtcagctagggttttctgggcttgtggccgcctccctccagcctccacctcatctttacattaccacactcctttgtttagtctcgggtgggtgttgggtgtggttttcacactgtgtgcctgcacacacgcacatcaggagacaccttgtaggaggaagttgtttgccctcatgtgggtcctagggctgaactccaaaatcgtcacctagcgggcccttttctcatttagcacaggctagcctccaactcactatttagccaaggatgaccttgtgctcctgtcctcctgcctctggctgcagagtgttagttaggattgtaggagtgagccaccccgtgctgagtctgtggggtgctgggatagaacccagggcttctctgtgtcaggtaagcacactggccagggtgctgggattgtgagcacgccagctcctctgcc

SEQ ID NO: 30690 - DNA, 2064 bp, Mus musculus
ggctgagcgatggcgtctatgggactacaggtcctgggaatctccttggcagtcctgggctggctggggatcatcctgagttgtgcgctccccatgtggcgggtgaccgccttcatcggcagcaacatcgtcacggcacagaccagctgggagggcctctggatgaactgcgtggtgcagagcacaggtcagatgcagtgcaagatgtacgactcgatgctcgccctgccgcaggacctgcaggccgcccgagcccttatggtcatcagcatcatcgtgggtgctctggggatgcttctctcagtggtagggggcaagtgcaccaactgcatggaggacgagaccgtcaaggccaagatcatgatcaccgccggagccgtgttcatcgtggcaagcatgctgattatggtgcccgtgtcctggaccgctcacaacgtcatccgcgacttctacaaccctatggtggcttccgggcagaagagggaaatgggggcctcgctttacgtcggctgggcggcctccgggctgctgctcctgggaggaggcctcctctgctgcagttgcccacctcgtagcaacgacaagccctactcggccaagtactccgccgcccgctctgtccccgccagcaactatgtgtaaggtgggccactctgtccacattgcctttgttatctttttttcggattgagctcataacagcctgtggcccctcacattctccaggacctgccctgctatgggccactaactgcttgctggggacaggcaaacccggactgtgcaaagttactagcccgtagctcttgggctgctccacatggctccttacggccggcaagaatggatgtaaaaatatcttgctgcttacatccaaattgctggtggatatggggctgaaggcagaagcagctgggaagggcagtagaggcgcaagctgggtcctgctggccggggtagctcagctgtgactttggactctggagtggatgtcctcatgttagcaaacgtccactgtcctttctctatccccctcactcagcctacacgttactccagcgctactcttgccattacgccccgtgtttccgagcacagctggtcctaccccaagtcatggtgtgctgagtgactgactgaggggccattgagagccggtgggctctgccatggaacccttccgttgattagcaatgactgtgcttgacccacccacctaccctactaatgaatttctgtagagtggatggacgggtttgagggaagaagggtggaggtggattaaactggtttggggagggctggggacctagaagcagcccagtgtgtccccaccccttttccgcactgtcttgctaatgttctgatcactgtgcgccccctccctcttcagaaggaccctgggcctcttgagttggcccctctgagttccctccctttgcccatttcaaggacaccggccagtctgcggaaggaaggtacggggggggggggggggggtgatggcattgtaccagggagtctcctggactcccctgccttctctgtggtttcttgttttgtaatttaaggtctgttcacagctgtaattattattattttctacaataaatggcacctgcatacaggaaaggtttgggctgttctctatctgtggatgggactgggctggaggggcggctaagggttcacaggagaccttgatgttctaataagatgaagtggtggagctgttggtggagagtgtgcctggcacgccagaggccccgtgtcccacactcatccccaaatgaaggtcaccccccaccccccacccccacacacactaagctgtaggttcaaggctagcctggtctacaggaagccctgtctcagaaagtgattcaggagttctcactgtaaaaatgagaacttcctctatcctggaggaccatgggctttgagacctttatttgcttttttttttttagatacagtataaagcccagactaacatcaaactcaatgcaattctcctgcctcagttttgatgagattaccatgatgacaatctcttcatttgtt

SEQ ID NO: 30691 - DNA, 1123 bp, Mus musculus
caagagggggtgtatcagtaggggaggctggaatgttgtcttctgttgtcaggtgagatggtagggaacctggggttggcttagtctcatctagtatgcactgggacctggcctccatctgcatccctgagagagaagagttaaggcgatgtcaggcggtgctgatgctgcctagtttcatagcccaataggtagataggagcaggtaagaggacctcggcagctctctcctgtgtggcataggtaagggattctgtagtaacagaactaagtctgctctagttgcctcactcatttctagttgggttgagaaatgggtccctggaccagatattggaaatgaacagaattggttgtttctgatacttcctcagggtgcagctgctgagactggctgcagcctgaattctgccatggtgactttccaggcctcgggagtgggaaaggcctagttagagagcgctttcgattctgaccaacgagggctgaggatatctccagcttttgtccttttcttgtccctcttgtccctctgtccattccctgactcctctctccagctggagctgatcacaacccaggccacgagggcaggcttcactggcggcgtggtggtagacttccccaacagtgccaaagcaaagaagtaagtgccgggactggtgatggctcagtgggggaagtgcttgctttgcaaggatgagggcttgagtcccttttccagcactcaagctaaaaagccaggtgtggtgcttgcttgtaatcccagtgactgggaagtgaggataggcagatctctgggaaatcgctggccggccagcctagcctacttggtgagctctcagatagtgagacaccctgtcaaggaatggggtgggcagtgacttgaggaatgacagctgaggctgacctctgccttcatgtgtatgcacatacacagcaggcgctgggacgaagagctgtctccatagctctgggccctttcaggctgctgagtagacagaggaatgctgggtaggtgagcagggccataaaaggtgtaagacaaagactctgtgctgctaggcctgtgagccaggcttcctactgcccccttgtttcaggttctacctctgtctgtttt

SEQ ID NO: 30692 - DNA, 2047 bp, Mus musculus
tctccttctaccactgctgctacatgcagatggcctgcagcatctgcagctctcccactcttctgttaccatcccggtcttagccactgtcccgtagtatatggatagtacctctgtttccaaccacattacttcaagtcagttttctacatagtttagcctgctttgggaaaacaaaaatggtattttggatcatgccatttccaaaaggcttccttctctctacacttggaattaaaccacaaactctctttgtggcctgcgtagtgttgtgaaatttagccactcctgtgatctttctttgcaatggtccaatcccattcttcctattctttgctaacccaggcatttggcaggctctgggtgtgggctggtccctcttgtgctgcaagcatttttcctttctgttggcagacttgtcagtgcgattcagtccttgtaagtttcactggaaaacagttgccacctcaccaactccctccgaagtagccatttccaccaatcctgtccctcctggtgccctgccgcttttccttttgtatgaattggtgctttctgaagccatcttgtctggctatgtgtttactgcagtgtcagagaagggcagtgagtgggggttaagagtgggaattaggcccgtcacctggttgtgctatggaaggaaacggtagagactgcactgggctggtggccgtgtgtcctgggtgcacagtgggagggagccgctactgactgataagccgcagaagttgccagttgcagagaagttagatgctggcactgtactttgcaaggaggcatccttgtggactgcaccaaaccctgacgggggagggcgcagctcatcagtctcattggtgctgaaggattcttccttacttttccttttgcagtcctgggaatggaagccagggtcaggtagacaaatagctctgctggtgagccatgcctcaacccctcactgggagatgctagacgaagactctcctcagccacagccctagccctcactggacaaatgctttgcctccaagcctctttgcagcagtttgtgaaattgctgaagaatgcgttggaacagaacccttgttggtctgctttgctctgggtcccgagtcaactagccaggacaaagtaagctctcaataaatgggactctgactagaagtaatgaccaagcttttgatatactttgttttctgcactccgctctctattgtggattcaggtttctgataagatcagccatattgaagaccatgtggccacacacggatttgggcttctgactacacagctgtgcctcaggcttgtgtgtgcgtgtgggggtctggtgggcatctgctctggttgtcggaaagcatctgaaaatgcgttctcttgcttctgcactcgtgtcttgagaagtaactggtgccgtggctgcacagggaaggcagtgaaccctagcaagaatgctgagctgctgaagtcagaagtctgttcccaaactggccaattcactggcctgtggcctggagtcctgtaatcacagaggctgccagagttcgtctccccacttgtggaatgggaataaatgttgttctgttaccgcgcatggtgattctttgcttgtgtacatgcttatgggttacactgggggttagatatgtgctcttgccccaaacccatttttttttgtgtgtgtatttgagaaaaagactcactttgttgtcttggctggcctggaatttatagaaatccacctgtcttggcttcctgagtgcttggttttaaggcatgtgccaccatacacaggtcctttcgcctgtgttttgagctaatgtttcactaagttgcttttgatcttgagattctctagcgtgtcaggcctacatctgcatgcctgggagctgtgagttctgaatgagttgggagcactacaaaaggtcattgcacagactgcccaggggtaggctagagctgttcgtgttgccctaggaaaggtgtctggctagtactacaggctgccaagcttttctgatcctcgagagtagaggcggcattg

SEQ ID NO: 30693 - DNA, 1139 bp, Mus musculus
gaactgacagaaccgtaaatcacaaaacctggcattaactttttacccactgaagatgggaaggagcagaaaggtacattgatggttctggtggccatttatttcctagagaacacagaagtttgacacttagaagtttcatttttccgtctttttttttttttttttttttttgagggagcgcttcatgtagcaccggctggcctcgaactcagagaggctggacactgcattcccgatcctgtctgtctgtctgcctgtctctctgtctctcaatctctctctctctctctctctctctctctctctctctctctctctggtacgtgaaactggtgttttagaatacaaagtcagcatttccaatcattactttaagatttcttgaccaagcatagcctcttagttaaaagttgtagtacttcccccccccccccccccgcccccggtagggggaatgttgaatcttttaaggcttatttgttttttaaaaagctaagtttccttaccaaacttgcctgtcctgctatctttaccaccccttttcctttggaaagattaggtaagagcaggaaggattcaagtgaagtatttcagtttgctcttggcctttgcctctttcctgctttgttttttgttgtttcatttttaattgtcttgtaacctaggttgatgtctaaggtaggtgttggaagctaagtgtgacgttttccttcctaacttcccaagtgatggaattgccgatcacctgtgtagatttaataaaatgttctgaatatttaggatacttttactccccttcctttcctcaatatttggggaatttaccgtagggccctgcactattagtaagctccatcctgggccctctggttttttattttgagtcagggcatcattaaaattgctgagactggctgggaactcaccatgtggcttaggcaggccttgaacttttggttctcctgctttagcctccctagtatctgggattaatagacctcaggaccagccagtacagcttcagcccttctagcatcagttctgaaaggcagtgtccacctacagagattattttccaccttttaattttgtctgtatagatgtttccctgcctatgtgtctatggagcactgtgt

SEQ ID NO: 30694 - DNA, 1146 bp, Mus musculus
ccctaaattgtccaattttcagaaagtaaatgcactttttaaagagcaggctgcaaagatgttcaggttggtaacatctttgttacaaagttgcacacaagcctgaagacctagttccattgctcacctaagtaaggaggtggagacagggggtttgacagaaccagtgtctagctctgggctccagtgagagactcagtatgctgatgtggaaagctgtcaaatacagcaactaatgtcagcctctagcctccatgtgcatacagagaagcagcagggggtgctgggatgtacctgtgattctaccacttggggggcaggggcaggaggagctccccggattctaggccactgtgtgctatacactgaatccttgtcttgaaagaaagacaaaggagctggagtggtgctccacgctcacaagtgcttgcagctgttctagaggatccgtgttgggcagctaggactccagctctaggggatccagattctcgggcacacatgggcgtgaataaggagagggagaagtgctgtgctgcgctgtgctgcgctgccaacagtgctgtgtgcgcctgtctttgcaggtgaggatgacaagctgatcctgtgtgacgagtgtaataaagccttccacctgttctgtctgaggccggccctttatgaagtaccagatggcgagtggcagtgtccagcttgccagcctcctactgccagacgcaattcccgtggcaggtgagaagtttttaaaagtaagctgggggctggagatctggttaatattcacttggcatgtaaaaaggcctcgatttgatccctagcactgcagaagtcaggcatggtgctacaagtctgttatcccaaacactaggaaggtggaggcaggaggatcagtagcactgggtcatccttggctacaaaacagttcaaagactttctgggctgtgtgagaccattagataacttcgttggaaaattagtttcagttactcaaaactgagcgtttctaaggagttaaagcttattagggtgcaaagcttggtcatttatggtacagatacaggagcttaggtgctatatgactctggtttagggtgtgactgtgcgcgcgcgcgcgtgtgtgtgtatagttttaattgtatctctctc

SEQ ID NO: 30695 - DNA, 1083 bp, Mus musculus
aagccctcaaggggtgtgggggaggcaggaaagctgggaggatttaaaggagaagtaactggagcatccagaaatgcctgtcatgccaagcttgggcttctcctgcagttccccatggggcctttttccagcaaaggcaagctcttggggagcatcatgctagcctgatgagccctgcccagaaaagctcgcagcagaagtaggtctccccctgagagttggagaagcctaggcatggattctgtgagctctgccctgctctcctcctctccctcctcctcctgcctcattacagcagtgccaagccccctggcctcaaagagggtgctgtaccccacagtaggaaggagcgtcatctggccacgctgggtgaggtgtggatcttttgaatttatatttatacacagtcctatttctttacgtccgcactgtctcttcctcctcctccctctcaggtgacagtatcagcgagtgccatacagaattccgtgttcaccagcatcttgggacagtgtgggctctgagttgatcgtggcagagtagagggacattttctggagctgttcctgaggactctccattgtgcagcccttccccgccctcacccagctcactgcctcataaaagacaaagcaaactaaggcacttcccatagactggggtcctgcttccaatcatgctatgacctaggctttaatggctctggccagaggggtgttggagcccagcccacccacaaaccagacaagcccttagggagccagaaaaagagcaggaagaagttaaaatgtttaattttttaaattgacttttgtagttattaaagttgcttgtttccgcagtgatattgtataaagaacatcttgtaaaatacttgtcatcttgctttggcacatgtacagtacagtttctatgatatgtgttcgctttactaccctcaaagaggccagcgggcagcaggatctcgggttggcaccatctctgccctggcggcactctacctacctgtgggtgcctgttcctccagggcccactctgcagacctagagctccttccgagggcttctagcggagtgtcagcat

SEQ ID NO: 30696 - DNA, 2233 bp, Mus musculus
gttaggctggagaactgaaaaaacatctgtacatattgtcctcttgctgccccagcgcttgtttagtgtgtaacctaggcagcctccccctttccttggcaccatctctgctggcacctacttggatccctaatacacatgaggtggggttgggggaaacggaatgtccctaagctttgcctgcttggtttggccataagaagtggttctcttcctctgattccttcagggtctctccctatttcttgctgctttgtccttcaccggtcctctgtgagattcattccttttaaatggcagtgaatcttgctttgccttggagaccccagtgggcacggttccgcctcttctgcccagtctgtttatctccagccctctgctgatatagcctcgaaagggttggtggctcaagactgttagcctggcagagccaggggagggagacgtttgctccaggaagacctggggcaggtagaccagaccgcccaccactgcttctcgctgcctcttcacctgcccactaccccccgggccagtttgcctcttcgggattgtattttccaagccttgtactatgttggtctgatgttaatgtgtgttgctccttgaatcgagtttggaggaagaattgaattgtatgtgtggcggcatgttggtaatgccggacttaatgtcacctgggccctcctgggcctagctaattgaatgctgaaagtggcaccgcgtgacagccacagtgctgactcctgaattctcaatagtgttttgacttaagggctggcagcccaggggatggagcctgttgggagcaaagacttccctctgttgatcctccccacgtaacccacccaggccagggcagcttctgcctgtgtttggagttctacattaatgaactacacttaatatagtccttagttgtattctcaaaaggttcctacctagcctgtctttctttccaaaaccataccatacccttcagccccagagcctggctgccatgtccatcctctttgggagaagtatgaatgcgtgtgtctaaattaaaagaaaaaaatatttaaacattttttaacaaaataaaatttatttttgtatttaagctaaattgcctttaaaattccttcaagcttggttcactgaggtggttaagtataaatgctattgaatagtagaattagctgtatagttatgcctgtgtgaaggaggggctcacagctgtccccagcagctcccctaagggggcagagctccttctagacatgtcgtataagtgtgattcttcttttataaacagtgtgatgtagctgtccctggtccccttccctttgtgactgggattgaatgttttatggcaggggttaggctgggttgtgtggagctggagaagagcttgacctcaggtcccaaatgcctgtgaggatggggatgggtgggggtctgaacacgaagcctctacctgtgcctcaggtaaggaaggggcctccctgcaattcagtctgagctaattacctcagctccacagcaggcctgtatccagggcccctgcggaggcatcctggagtagcctcggtgtgtgagcacatttgtccgtgctcacgctggacagggacagggaggctggggcttcccaccacagactgagttcctgtgagtgtagctgagatttttagtatgaatgtgagattgttcttgcttatgtcattaaaaataaaactgtgatctgtcatagatgtgagtttgccctttatttgtgaagcgaagaactcgtgactggtaggactgggcccagtgagggacacagagtgccaggacatcatcttcccttcccagaagagcagggttcccacagtaagcatggttctgctggctgtggggcactcagtgcctatgtgcttggctgcatgctggcaccaactgctgctttgcgtcttctctttctctttgggacttggctgagaggttctggatccattgcatcggtctgtggggctgggctggaagaagaggccagaggttagcagatgtgctagcacacaccttagctcaggaggcagaggcggatctaaaaaggttggggccagcctggtctacctagatagtaagttctaggtcaaccagggttacacagatactgcctcaaacaataacaaaagcctgagctcctcactcacgttggtaccacctctgcacgttcaaacacagcaatgaagaagccaccagtgagcgtggt

SEQ ID NO: 30697 - DNA, 1169 bp, Mus musculus
ttttattttgttttagacggggagggtctcactaagtagcccaggttgacttagaactcgggatcctcctgccttcacctcccaaatgccgggattacaggcgcgtgccacccatctccgttctgtgccttgatttctaacatcactcctctgcagtccaggagcgtcagggaaacctccagcgtcaaaaaccgggctgtacttttcttcttttctttctttctttttttttttttttaagttttgctgttttgagacaggctttatgtctccatgtcgcgctggaactgtctttgtgaaccaggctggactcaaactcacggaactcctcttgcctccgcctcccgcgttctgagaggcaaggcgtgcaccgatccgcctacctaagctgtaatttttcaaactagggctctcgcgccgtgctccgcacgcggcggcggtttcccctttccacccggcgcgccgcgtcgacgacagtgacgtcggcggcggcgcgcggcgcggtgtaccctgggatatttaagtccgctccgcggcgcggagccgcgatgtctccggcggctgcggcggctgacggaggcgagcggcggcggcccccgttgggcggacgggaaggccggagccgggcccgcggctacggaggaccggcgggtgctgcggccctcggcctagcgctgctcggcctcgcgctctacctggtgcccgcggcggccgcgctggcctggctggccgtgggggcgagcgcggcctggtggggcctgagccgagaaccccgcggcccgagggccctgtcgtccttcgtgcgcgacgcgcgccgtcacccgcggccagctctcaccgcttcaccgcctccggccaagtcaccagtcaacggtagcctctgcgaaccccgcagcccgctgggaggccccgacccggctgagctcttactcatgggcagctacctgggcaagcccggcccgcccgagcctgccctccggcaggacccaagggagaggccggggcgccgcccacccgcacgctccccgcctccggcctcggcggtccagcgagtccaccacgtctaccccgcgctccccaccccgcttttgcgaccctcccggaggccgccccaccggtaagccccggcgatcttcccagggtggggtctctgcggccgcggatttgac

SEQ ID NO: 30698 - DNA, 1251 bp, Mus musculus
gggtgtagctagatcctcaagggagctgaggggctggagaggtagctcagcagttagtactccccgctcttacagaggacccccaaatcagctcccagcacccacatgtgaccacgaccgccttcaactccagcctcaagggatccaatggcatctgctgcatgcgttcatgcagaagtgcccacatacttttagagaaaataactcctgaaaaaaaaaataactttaaaggcagaaaattgacaaaataatgacttagggtggggtgaggaagaaactcaaatccagctgtgacttatatttagataatgcagtttcctggtgcctccaaggctaagcataagtgtgtgcataggagatctacttctgtggggttaggtcatagctcaaaaaggaatttaaatagttatgccaggtttgtcaatgcacaactataatcccagcatttgggaatccgaggcaggaggaatgtgagttcaggtctagcctgggctatatactaagaccttgtctcaaaaacaaagatcaggctctaatttaactggcttattgcagtactgtccccagcactatcctcagattcctgttttgccctgggagaatcaaacacatgcagggcaccctgtctcagaactggtgtggtaagtcagggtcacaagtgtttatcattctggtcacattagggtgctatggcctctcatcatcggaggtattggtcctcatcctgtgtctgggggagtttttacttcttggtcagtgacttagttgtagaagggtccctggcactgtttgaccctgaattttaatgctgaccaatgtgttactcccggttgcctttccatatctctggagaccttgctagaaaagcaagtctatgggcgcaacattaacctgccaataagagtggccctgccctctgccgtcttggatcatctgtagtagccttccaaccagagtgggctttgctttctctctcccatctttgatcatcttccaagttggcttccaacaaggatgagctctgctcggtcgatcttcatcttggatcccctacattggccttccaaagagaggggctttgccctctttccacctttcaggttctcagagaccacactgtaacattggaaactaccatgacagcacttgccaggcattcacagtgacgcagaagagctatttgactcccaggtccagcccaaacccacgaccagcaaagcagtaatggagtgcttcccctcccaggagcca

SEQ ID NO: 30699 - DNA, 1188 bp, Mus musculus
ccccagagcgaacttcctgtgccatgtcatttgggtcacctcctgtcaaacctagacaaggccccaagagggacaaatataaaggaaccggaagtggttccttctccgtctgcctgcttctgcatcctactgaaccagaaagcaatggttccgtgtgctacttacccaataggcccactggatcaggaaacgagcttggctcggtttaagactctttatatttattactaacaatctttatgcagcacatgccccagagatgcttggagcaatcaggaccaagggtaactaaacaggcgtgccctccgctatcaatctccacagatcatcatagagctaacgtgccatccctgggcatttccaggcttggattccaaagcaggcaggttccttaaagcactgaggagcagggcagaggagaaaggggaccactggctctagcacagtccccatcaccacccacccactctggctcccatgcagacaggatggggacagggggcaccacgcctagccacaagcagggacagcactttgcaactccctaatggacccctgatctaagtgaccttgtgggccaggggggtggtggcttctttatctgtagtaacacataggtggcagccagcaagcacttctttgagcctgtccccatggggcagagctcagcttcgctgggtgatgggttgtgagactagtgcttgatcactgtgaatcaacctcctccttcctgccccactcacccccactctgtccccggtgggcactccaaaacctcccagagacccagatgatggctgtgacatgtgacctccacactgggctgaaggagttttctgcagtagaaacgggcccattctggtgccagaacaatgttttttgggtccaaggaccagaacactcgatggatgagtggcattgttggctcatttgtgccaatgcagctggtccatgtgttcactgccagtcagcttttcctacggtggccatagagtccttgtctctagagtcactctcatatgtcccattgagatgacatcaaacacagcaatagatgggggttttctgaataaatgacgaacccatatgaaaagccactatcatttttaaaaaaccaataaaatctgcctggggagtgaaacagtgaaaagccccagctcgaggtaaggcagcagcacagaagggtcc

SEQ ID NO: 30700 - DNA, 1521 bp, Mus musculus
tgccagtggccagaaactggcctcctggcctcctggccacatgcccagcctacctccataccagcctgcgtccggcctgtgctatgtgcagaaccactttggtcctaaccccaatgcctccagtgtgtacccagcttctgcagggacctcccagggggtacagcctccctcccctatcagctgtcctggcactgtgtattcaggggccctgggtaccccaggggctacaggctccaaggagtcttccaaggtagccatgccctaaccagtctgcagaggcggcttccaccttgttggacagaggaaggttctgagaatgtaggaattatttattgaagccagggcatgccggcctgtcattccagctgcttgggggttaaggccaataggtaaaaggtcaaggtctgtctgggctccagagtacgtccaaggcaagcctaggatatgtattaacaaaaccctgtctcagaatgaataacaatgactggggctctgtggtagaatgcttacttagcataattaaggccctgagtcctcagctccacaaaacaaaaaagaattactaattagatacctctgtgtgccagctctgaagagtactttgataaatgtccctgtatctgtgttgtttcacctcaaggcagctctagaaagtagaaactggatggtaagacaggcctgtaatctcagctatgatcaaggtcagccccagctacagagcgggttttaggctagccccccgggcaggtatatcatggggtcttgaggctcctgggcttcttggttcctaatccagtgtcaagaaggtgcggttatcggctgccagggactcttgccgtcctacccatcctgccctgctcagtgcccatgggtccttacttgtgtctggtgtgactgtaccaggtagtccttgtaacatcgtcttccccgcagccatggctgatgggacttctgcctgactggtgacctgcagcagcaggctggtgatccgccctgtgagtcacctctgtataaaaaccagcctccaacctgccagtggtgtgtggcatactgtgttcagtcccgggcaagcgtgacaccaaaaagctgtgaggagccagaatcacatccagtctgtgctcagtggtctgcagtgaggacctgatggggtgggtggggacagcgaagtcaagagttgataaacccagagatgggtacagcaagtgaatgagagactgtctcataaaagaattttctttttagtaaaaataagctgagcatggtggcacatgcctttaatcttatcatgtaggaggcagagacaatggatctgagtttgaagccagcctggtctatgtactgagttccaggatatccaaggctacaaagtgataccctgtctctaaaaataaagccaggtatggaaatagtaaaagaattttctttttagtaaaaataagctgagcatggtggcacatgcctttaatcccatcacttgggaggcagggcacttaggtagatctctaaagtcagcctggacca

SEQ ID NO: 30701 - DNA, 1204 bp, Mus musculus
gggatgctctgggctgcctctgagggcctgtattagggttctctagagtcacagaatttatagatagtctctatatagtaaaggaatttattgatgacttacagtcggcagcccaattcccaacaatggttcagtagtagctgtgaatggaagtccaagcatctagcagttactcagtctcacacagcaagcaggcgaaggagcaagaatgagactcccttcttccaatgtccttatatggtctctagcagaaggtgtagcccaggttaaaggtgtgtgccaccacacctttaattccagatgaccttgaactcgagatctccctgtcttaatctggaatccatagccactatgcttcaagatctccataccaagatccagatcagaaacttctatctcccagcctccaggatagggtcactggtaagccttccaattctggattgtagttcattccaaatatagtcaagttgacaaccaggaatagccactacagggccctaagtattccaatacaggtgattcctgaccccaagcccactcctccagagagggtagtctgaagatgggcacagccaaatggtctttgaaacccactggcaagcaagccagtatgacatgagtaagattggcactgcattagagacttgagtcgatagccaaggaaacaggtgcatctaggcctcagtaaggacacggctggaaactggtgggacccggagctttggactgcagccacgcctggcatttcagtggcacttcctgaatacagccagatgtgggctcttaggcaaggtccttccactctgtagataggcttgtgtgttcttggtttcttcctacatagggtggctcactggctagagctgtgaatgccaaacacccaggtttcctggcgactgggctgtgagaattgtcaggtcctcctgtgtgacctagttgctgcctttactgatgggctccaaggatgcagaggaattgctaacagacaatgcagagctggattccagcttcctactgccccacactgatggactgcccctagatctccattccctgggcctttgtgtgatctggaaccagtgcacaggcagcctgaagctacactagagtggaaccatctgtttctcagcgcctgctttccttgccttcagaagcagcctttgcctagtaggtttcgctgcagatcaacctccctagggct

SEQ ID NO: 30702 - DNA, 1101 bp, Mus musculus
ttcaaggtcagcaagttccaagtgagccagggctgtacattgagactctctcagtaaaactgaagagagtaaaggcgggcatcctggctagtggtattgagaactgcgctggtctttgtaagccaagtggttatctaacctcggggatttgttcttaaatacacagggcataattcctggagctattggtagctttggttcattaaccacatataaactctaccctcatcgattctctgttgatctttgccttgctagtggaaaaatggcttagaaagcacaaaagtaccaaaccagtgaacacagaatggcccaccgtggtttggttgttattccagtggctcctttaaagagatttcactttctctcttttttttattttttagatttatttatttattatatgtaagtacactgtagctgtcttcagacactccagaagagggagtcagtcttgttatagatggttgtgagccaccatgtggatggttgctgggatttgaactccggaccttcggaagagcagtcgggtgctcttacccactgagccatctcaccagcccgagatttcactttctttggagagtgagtggctcttaacttttataccctctgatactggaattggtttcattgagcacattgctcaatcattatcaaaaagtggccagaaaacaggcccacgttggagaggatggaatattatcgtataaccctcacatctggcatttagaaagaggtatatgtagactgcagaagatgccaagatggactttggtacctggaaatcacaggcttgatggcagctaggatacctcaagtgaagacaccctggtagtaggagtttataaataaacatccacaggagatgtctgtggcctgagaaacctgaaattataggcccactcgctctccgtggagggtttcttaactccttgccaatcaggatctgcattcgttaggaaggtctctgtgtgcttagcagctagactgtttgaaaaggacttcctgccaagagcaaaacatttacttactaaatccatgggacatgttaacattgcagtattaagtctagttgttttgagacaaggtctcaggtgt

SEQ ID NO: 30703 - DNA, 1189 bp, Mus musculus
gaagtaaagctgaagacaaggagtggatcctcgtcaccaagctgggccgcctggctaaggacatgaagatcaagtccttggaggagatctacctgttctccctgcccattaaggagtctgagatcatcgacttcttcctgggtgcgtccctaaaggatgaggttctgaaaatcatgccagtgcagaagcagactctaggctggccagcggaccaggttcaaggctttcgttgctattggggactacaatggtcacgttggtcttggtgttaagtgctccaaggaggttgccatcatcttggccaagctttccatcatccctgtgcagagaggctactggggaaacaagattggcaagccccacactgttccatgaaaggtgacaggccgctgtggctctgtgctggtacatttcatccctgcccccagaggcactggcattgtctctgctcctgtgcccaagaaactcctgatggtggccagtatagatgactgctacacttcagccagaggctgcactgccaccctgggcaactttgctaaggccacctttgatgccatctcccaagacttacagctacctgacccccgacctctggaaagagactgtcttcaccaagtctccttatcaggaattcacggatcatcttgtgaaaacccacacgagagtctctgttcagaggacccaggctccagctgtggctactacataaggattttgtacaagaaaaataaaagaattaagtctccttaaaaaaaaaattgacttaactggacatctgggctcactgagacacaggacgaagatgggcaatactcttgggaggatgatgcaatgcaaggttcattcactctcatctattcgcgtagttataccagtggagtgcttatcactggcactcttccaagcactggcttctcctcacagaaataactcgactcaccttccattccaactacactgccacagtggtagaaggtacttcatttcattttctgagacactggcacgctatgtagcccaggatagcctcagacttgagtcctcctacttcagccaaggactaggattacagatatgagctgcatgcctggctaggctacttttgttgctggctactttgtagaacataaacaaagaagaaaaatatttactcaagagatacggagggtagttccaaactcttgag

SEQ ID NO: 30704 - DNA, 1850 bp, Mus musculus
ccatcgaccacctgtgcgagctcctcccgaggctgcaggcccgctactattccattgcctcgtcgtctaaggtgaagggcaccagctctgccagggagggcggtggccaccggatggccgccgaggaagggcctctcgggggttgaagccccgctcacaccagcccttcctccaggtccaccccaactccgtgcacatctgcgccgtggctgtggagtatgaagcgaagtctggacgagtgaacaagggggtggccaccagctggcttcggaccaaggaaccagcaggagagaatggccgccgggccctggtccccatgttcgtccgcaagtcccagttccgcttgcctttcaagcccaccacacctgttatcatggtgggccccggcactggggttgcccctttcatgggcttcatccaggagcgggcttggcttcgagagcaaggtaaaccatgggggcgctggttcgtggtcagcccgggccgggccaggccagagctccccttaaccatcgccgcacccccgtccaggcaaggaggtcggagagacgctgctctactacggctgccggcgctcggatgaggactatctgtaccgcgaggagctggcgcgcttccacaaggacggcgccctcacgcagcttaatgtggccttttcccgtgagcaggcccacaaggtgagatgggcggctgcgcccgcgggctgggccgccccaggaaggcggtgctgtggggtcccgaccctgctcaccgccgccccttcccccaggtctatgttcagcacctgctcaagagggacaaagagcacctgtggaagctgatccacgaaggtggtgcccacatctatgtctgcgggtgagtacaagggacaggggaggcacggggtgctaaggatccgcctatggggtggctccacccacaaccttccgccacaccttcttgtcccctcttctccacctagggatgctcgaaatatggccaaagatgtgcagaacacattctatgacatcgtggccgagtttgggcccatggagcacacccaggctgtggactatgttaagaagctcatgaccaagggccgctactcgctggatgtatggagctaggagctgccgccccccacccctcgctccctgtaatcacgtccttaacttccttctgccgacctccacctctggtggttcctgccctgcctggacacagggaggcccagggactgactcctggcctgagtgatgccctcctgggcccttaggcagagcctggtccattgtaccaggcagcctagcccagcccagggcacatggcaagagggactggacccacctttgggtgatgggtgccttaggtccccagcagctgtacagaaggggctcttctctccacagagctggggtgcagccccaacatgtgattttgaatgagtgtaaataattttaaataacctggcccttggaataaagttgttttctgtatttgcctggtgttgattgagtttttatatggggtcagtcttgggatctgctgcagttagacaccccaccccacccccctcagaggagccaagagtcagtgccttgctggggccccaagccttgtgtcccttgcgcaaacacatccacagtccatcagatatctccatgcctctcttcctttattgaggcctagagcccgaatcctgcaagctgggctccaggcccaggccttcctcagggcccacagagcccacaaagctcagggggcacagaagggaaccccctacacaaggggtaaccccaacctgctgccccacctggcacacaggtcaaaaagcccctttggggctggcatcagatctagctcagtccttc

SEQ ID NO: 30705 - DNA, 1285 bp, Mus musculus
cgctttgtcttctccctcgtggacgccatgaacgggaaggaaggagtcgttgagtgttcttttgttcagtccaaagagacggaatgcacttacttctctacgcccttgctcttgggggtgcgtatccagggcgagcccacatcactgcctggggacctgcttggctttaggggaggaggaacaatgtcacttagagcagagctgtgcaagtatagcttggggaatgtggcagctgtgaacggctgtcaaggccaggccacagttgaaagaaaagggcttttgggctggtgtgcagctaaggtgcagtccttctgcttagaaccctccagtgagggactggccgtgtgacctggtagagctctgcgctgccaagctagaatgtggtttcacatgtcaccgtttcccttctcattcagaaaaagggcctggagaagaacctgggcattggcaagatcactccttttgaggaaaaaatgattgccgaggctatccctgagctgaaagcctccatcaagaaaggcgaggactttgtcaagaacatgaagtgagaggtgtgagcctcgagcagcagcagcagcagcatcctaacttattcagcatcatgtctttggaaccacttgagaatctagtttgcgttgatggagggtgttgagtcagcatcagcatctcttccaaattatgtctggtctgttgataatgacagtaaagcaggctctgattttctttttcaaggtctctgtagatttccttttccatcagctcactaatcaggaatagagtctatggttgggtgtggtggctcacaccttgaatcccagcactcaggacacaagatgatctctgatttcaagtccagactggtgtatatactgaactacaagccagctgaaactacatagggagaccttatctcaaaataataacatcaacaagaactagcggctattcccacgttaggcagaggcccctgaagagtcagagaagtctaaggccagcttagcggtgcatgcctgtcaccccagctactctgtggagggtgaggcaggagggtctaaaggccaaggcctgcctgcactgcagagttaagagcagttccaggccgctgagggagggagactgtctcagaacattagagcagcagggtagagcccagctatagagcagtaacctatgattagtggcatggctggaatagagtgcttcctagcatgtctcttaagatctgtcatgcttttaaccatcaatttgacacagcctagagtcacatgaaaggggagttttccaa

SEQ ID NO: 30706 - DNA, 1103 bp, Mus musculus
tgtcgctgtttttctctccttccactctattggttctgggaaatagaatgtaggttatcagacaatgtagcatgttctctttgttttgttttgttttgtttttgttgttgttgttatttgtttttgagacagggtttctctgtgtagccttggctgtcctggaactcgctctgtaggccaggctggcctcaaactcagagatccacctgcctctgcctctcaagagctgggattaaagacgtgtgccaccatgcccggcacatgttctcttttttaaagactaatttatttttatttatgtgtatgaatgtttttgcctgcctgtatatatgtgtgcgtgtaagtataccatgtgctgagaaggccagaaggctccaggtactctggaacttggttttagatggttgtgagccacaaggtggatggaaaccaaaccttggtcctctgcaagagcagccagtgctcttaacctccagccatctctccagaccctgcagcaagtgacttttttccattgagtcacatcaccagctcatattgtagttttggagatgggggtctcactgaatcgttcaggctagctttgaactcactctgcagcacacgctggccttgaactcgctgtctctctcacttagcctccatgaagtgtggattagaagtctgctgcaacagctgagttcagcttcctttcgtgttgttttatttttattacatgtgtgcgtgtgtgtgtgtggccatatgcactcgcacaagcactgtgggggtcagagaccaactggtggtagtcggttttctccgtgaaaaccaactcttgacagctagtgccttcattggctgagtcagccctctagtacccttttgagagagaactgagtttcctatatatctcttggggtacagctgggtcactagtgtgaggtcacttcagaaagcctttgagttaccagaggtctcttaggaaccaagagaagcactcagggcctctgctctctcccttgctgggtcatattataactgggaactcctgactaacccatctccccaagatgcgtgttttaggaagccctttgttccctgccccacccatgcccagctccata

SEQ ID NO: 30707 - DNA, 1230 bp, Mus musculus
cctggctccggaagaggcagtaagcagtagaggataccccaacaccctcttcaggcctctgcatatgcctgtgtacacaacacacccacacaaaatcttttttaaagttgcaaggtaatgttcaagactagcttggattgcatgaaaccagtctcagaaagaaaggaaagcaaagttaaaagcgggggaggatgctgagaagatgaggtgcaaaacgaagacacatttctggggttcaaggcctacttccatacatttcagactagcttgggctgcatatgaccgggtctcaaagttttgtcaggccctgtgagtatagaactccaaagacggctaggagcaatgttgtgagtttgaagccagagtcatacagttagaccttgtctaaaagaaacaaaaaaggaaagaaagaaaaaaggccaaggaaggtagagcgttaatacaagatcctggagttggggtaactgggattgggattcaggaatcttcccttctgggatctattttccccaaaccctcaatgactccagcaccgacgtcctctgcctccccctggtgggtactgccggttctgcagctgtccccgttagtgcgggtatttgcttccagccttgagcccagaccctgatgacagtagcgacctcgaggccagcccatctgagatctccattcccgagtttctgcatgttccccttcccaaacacctgggcttgaaacgaaggattgtgctgcctgcgtgtgcccataagagccaggcatctaagagtgaccactctcctacctctggccattgcggactgcccaggtacccggctgtaagctaggcagggctgcggctcagccccgccccacccagcacggagattgccttctagcccgagcgtggcaagagccaatcacaagccagcatctcgcctccgtgccaatggccggcctgttgctgggtctcgcatccctcctttggaattcgcctgccgagcccgccgcagtgctaatgcggagcttatcatggcttccgggtcctcttcactccgctttgtctcctcctttgtagtccttaccgaataatctgctttggccttttagggcgtaaaaacctcctttagagggtggtgcatcaagctccaggtggtcctcgccctcagggttgctatagaaacagtgacccactctctgacctctaagcttgctgcagtccctaatctccatattatcttcccgaaccgatcc

SEQ ID NO: 30708 - DNA, 2911 bp, Mus musculus
gaaggcctacagcgaagcccacgagatcagcaaggagcacatgcagcccacccaccccatccggctgggcctggcgctcaactactcggttttctactatgagatccagaacgccccggagcaagcgtgccacctggccaagaccgccttcgacgacgccatcgccgagctcgacactctgaacgaggactcctacaaggactccactctgatcatgcagctgctccgagacaacctcacgctctggacgagcgaccagcaagacgacgacggcggtgaaggcaacaactaaggccccaggtggactggcagcgcccgctgatgctactactgcagtctttattttttcccatgagttgggggtcgggtgggggaggggaaagggaggggtgaccttcccagggagaaacccacgactgtcctgtctttgattgcctctttgacatttttgccaaaataccactagtggaaagtcaggctagctatgctggtatgggagtagcagcctcacacagacgtccggactgttgtgcaggctcggaacgagcaagcggagctgtctgcctttagtttaacttattgctagacggtagggttctaagaagaaaaaccggagatggatggccctcattcagtgcgttctgtggttccagtaaggattcttctgtccatgcccttgtcctcagttccgtggctgttttctctctttggctgtgctttctctctctctctctctctctctctctctctctctctctctctctctctctctcttttttccccctggggtgtacaccagagaagttatagtttaaattacccaactcgacaggcttagagtggaaggcacaccttttgttagtgagttagacgtggccctgtatttggaagtctctgacgggttgacagtattaacactcaattgtagtttacagtatttatacatgacagccatacatgacgccaagccatgggttctcagttttcctttgtcaggtcggctttcatccgcgtccgggttggtctggctcttcatcatttcgtaacgtggggagagtcagagctccctgttccgttttggttgatgggtgtttgggagggggctgcgggggatacttttttttttagttcttctttacccttaaggtcagcccatcacaaaaacagaaaccgttaaataccccccacacagagaaaacggagaaaattcaggtctgtatgtcatttatcagagactctgctctcagcagccagggctccgtctcagtgtcactgcctgttgaatgttcctcagcacccaagtctactctgcaccttgtgctagcagcatgcaggtgccccgaggcgtaggactggagtgtagcgggtgggggattatcatccggtgccagcagctgagcctacagggaacccactaggaagaggcagttcacttgaggcagcctggtccctaagccagttgtccctgcctccctccagccccggcactcctttcccaagtgcttagtggagggtagccgaggttcggcaggaggccatgctcaccctgtttgacctaagctttcctggtttcccctttttgaatgaaatcgtagttgttgagattggcttctctctcatgaggtcgctgcacatgtgacattgaaggaagctctgctgctatgtcctacatggtccgtctcagccctaggtccctcattctcactgtggatagccctttccataaacacgcccggttgcatgcagagtgtgcagtttatgtcttctggagaactcatggtctcgtgggttcccaagacgggcagcgccccaaacttgcttaacttgtcttcagaggcccagcagccactttgtcgcccacttgagctggtgccgtggctgcggaaggatgacgcccctctgcacagtcccagcatgccctttctcggagcccctccccatgctagtgtgccagcaccccctaaccgagaccgcgcaaggccgcagcagaggaagcttggccaccagagtggacagaggggccggagaggcttcgcccgggggtttgtctccttgtccgcagtgagcgtgtctgtgtcccgcttgtactgtttggaaatgacctactggaattgcaaaacctagtttctctttacatttcagccttgacctttgctgtgttctagaacagtcatgtgagggtagaactgaagagggagagcgggagacctgccgtgagcttggttccttctccttcctttactgttgagaagtgtgcctgcctctgatgctgtccccagtgccgcgcggctgctcctccatcctattgatacagtattgtgcatgctggtgttgtatttctatacggtagcttgacatttattaccttacactgtaggtgttatgtatcctatgacaaaaaaacttaagacttcaattttttttttaaacttcttttttttaatttaattttttcctttcaggggtaaagtttgctttaccaaatagtgattgtaacagattgatctgttttggatgttgctatagtgacatgcagttctatattttgtttttcaggggggaggggacaaaagaaacaccagtgttagcttactcttaataatgtctggtgtttgtcatggtgaaactataactatcgcagtgcaggagaacgcgcggacgttctcagaacgcgcctctgtgctttcttgtcatgttatgcagtgaaaatatttttaaggtctaatcaagtgattttttcccccccaactccgtgtttcgctaaggaattatttcgcacacggaccattcttagcagtttcctcagtgatggaatattcatgaatgtgagtcattatgtagccgtcgtacattgagcaaaataaacttacagatctgatgtcggcggtgcccagcttcatttaatagcgtt

SEQ ID NO: 30709 - DNA, 1157 bp, Mus musculus
cttagctagcacttgggagatggaggttggggggcagcctgggctacatggcatcctgccttagacaacaacagaaaggacaaaaataccaaacaaacaaaaaaaatcacacaggaaagccatgtcctcagtatagcactgtggctgagtgcagacattctccgtttgatgcactgttctatcagtgttgtccctcatcatgcttttagaccacaaccttcctaccttagccgcctgagtgctacctcatcaggtcttaaagggtgacctgttgctcaggatttctagggtaagcttgtgttggattcccaaggttaccttggagtcattgattggtcaagcccagtgtgcttgtggctgagactgactatgctgaaagttggcaaggcctggtctgcagaggaaaggcaaggcatggctgccaaggacacggcatggggtgatgtccagtacagccaggcaagtgaaagaccagtgctcaccagggaagtcttctaaagaccgtaggtataggggggtgggagggtggaggtagggctgtgccagtacccaggatgcatgggagcctaaagagcctaaaccatgtagtttgtgcaaagactaaatggttcttacccaggtggggtgtgtgtatgataaaaaccttctcaagactcaagtgcccaaatacctgccaagggtcaggtcagccttaaaggcgggccttctgaagatagccgtggggaagcgttatgttaaccatctctgcacagtgtcattggggtttaaggttcttcagttatgtaacataccacattctttctcaagttttagtttattatttagtaagaatgggccgtctttggatacacagataattgtaaccacccagaagtgtgtttggttaattcctcagtggtttattacattgcccaagcagtatgcacgtctgggacattccacagatgcccttgcactctgctgctctgctttgtccgctcccactgtaggatagtctctgcactgtccttctcacagcttcttagctattttatgtatgtagtggtatttccactcataggcaaggtttaaagcaaaactgagcagcctgtgtgccccttgcctcaacacaggcagagtctctctcctgccaacacctccctcaccagagtaatgtt

SEQ ID NO: 30710 - DNA, 1197 bp, Mus musculus
cctaaccagcaaccttccgtttgctgcgactggctgaaccagtttcaaagctacccaatcaaaatccttcagtaagatagaggcgtggcttcagttccgacccagggcgggctctcctctgagctcctgcggtgactcagcaggaaggcgtgagttattggggcccggaagggcagggctacgtcacgtcctaccctgtccgccccggccgtcgaggcttacggggctccagtgggaatcccaacacctggactctgttggttttgttttgttttgatgacccagaaaaaccctggacctttcactgatcttttgtttcctccgtttgcacagtggttaagaacacttcccggagcagtgcctgagtgggaagaccctggaagtttggagtttgaccttacaggaagtcaatcccagttgcctcgttttttttttttttttttttttcccctcttctctttttgctaatccatcaatcctcaaggtttggctcccattcgagttgtcaggcaggtgtgacaacaaatacacaagggaggctagcctgctgcacttcgaaaaactcaccagaacttaaagtcatcctcaggaacgtagagaccaggacatagggtccggacgatggtatagatgatgaggggccaagctggcgtgatggctcagcaggtatcaagaatctggtacccgcatggaaggaaagaattcctgtgacatgtaccacacatgtactcaaacatgcatgcattagccttttttttttttaaagtaagaggggcctagagagctggcccagcagttagggcacttgctcttgcagagcccctgagctcagttcccagcacccacgtggtgtggtttacaaccatcataactccactaccaggggctccaacgctttgtgactgtggtgaacacagggtatacacgtgggcaacattcagccatgtatgaaaacatttatacacagatgcagaggtgtttcagtgggtaagagcaatcattgtacaaagttggggacccaagtggggattccagcacccaggagtaaaacctgagtggccaggaatgcctataactctggtactacggagggcagagactggatgacttccggagcttgctatcctttagcctaactcagcatttgaggagaaagcctgcacccaggggatctgcgtgtgatagaactggacgccc

SEQ ID NO: 30711 - DNA, 1183 bp, Mus musculus
gaggacagccttgtggctcctagcaggtctgtcccctgccaggaggtggaggtggccatcacagtaccccgccgctccttgctggtgcttacaggggccgcgaggcaccagtggacacacgccatccaccgcagacacatcaaggcccgccgtgtgtgcgccaccttcagggagctgtccagtgagttcctgcctggagggaagcagcaagaactgggccaagaactgctgcaggctgcactctcgttccaggggagaccggtgtgatgcttcccagggcccaggagctgtcactggcctggccaaaagcttggctccagcacaaccatcggaggagctaacactgaggtctccccacagcagtagattcgtggggtttttttgagacaaggtctcatgtagcccaggctagcctccaattaattgtgtagctaaggatgaccttggactcttgccttttctacctcctcttcccaagctctggcttgattattttgttttgtttctctttttgggacagggtctccggcctagactggcctcagactctgtttccagccaaggatgactttgaactccggatcctcctgcctctacctcttgaatgctgggattgccagcgtgcaccatcatatgcaatttttgtctgtgctgggatggcagcaagcgttctgccagctgagctaccccacccccctagcctgttgggggtttttgagacaaggcctcacatgggctagactggcctggaactccccatcctcctgcctcagcctcccagtcgctgaggtgacagtgtactggtgaggttttaggaggagccatctgacccttgacgtcatgagcatcgtatgtcctgcccggagctggttctgctgggcctgggctgcggccattcctcagctcactgagtgtcatatgtggagggattgagtcttttagaacttcagtacttgggacgagtaaggtggctcagtagctaaaggtgctgccaccaagcctgatgttcagtctctgcaatccacgtggtaaaaggagtgtcccctgatctccacacgcacatcacccattttgataaaattcataataaaagaaaaaccttggtctcatgtgaaatgaatttctccttttcccatccctgtgtgaagtagttgtagttattttgttttgttttaaaacaggg

SEQ ID NO: 30712 - DNA, 1156 bp, Mus musculus
gtgtgtgtgtgtggtgtgtgtgtgtgtatggggggttactgtttgtaaatacgtacatatgagtgtaggagcccacagaggccaggagagggctctcctttccttggagctggagttagagttgtgaatcatctctgtgagtgctaggaaatgaattaagggtagagtagtaagtgtgcttagctgctgcgccgtctctccagcccctcgaacactttacataggctttgctttatgttttgctagtcttgaacctagggatttgcgcatgcttggcaagccgtgtaccactgagctgcgtgtctggtgagtgcatgcctgccactctccagcccctacaatggttttagagtcacagaaacctgtctcatctcgttacagttagtagctggtttccctcccttacccaaggcccttcccttcccttccctctattgcagaattcagcacagagccccacagtgctcagtcagcatctggctgtatgcgcctttgactgagacagctgctcagacttactgggccagtgtctgtacagcatcccccaccagggtttgactgatgtctcatgtcatgagctggagctgcatcaccagcttactgctgttggtgctgatgttggctgccccacagaggcagtagttatcaggtatgctcaccaaaactcactgctcttcctccaggaacttactttggaaagaagtcttccatgtgcagcccatacaaaggattaaggtctagtcaggcgcctccaacctgaagtcagggatctacaagttaggaggtggtctctccatctgcaaaagtgtttgtgacaacagacctatgtgtgtgacccagttttctttcccttgttggaattgtctgttgtccctgtgcctgcctaccacaagtttccagcacttccttattttctgtactatcagataccccaggctcatcttgggggtttcctgccctcgacctagcattggatgagggtccaagataacttatcttgtgttggcgcaagatcatgggggtgagagtagaaggaatcattcatctttgactggcagttctgttgtgcaagtgccgtagagtgtgtgcctattggtgactgtgacattgctaggtgatgtaacctagtgggcccaccatcataacgatagactcc

SEQ ID NO: 30713 - DNA, 1222 bp, Mus musculus
tcccatgcctgctcctgctccagcctctggcatagctcccaacctagtgtctccagccctgtagtcacccatcttctgcactgtctcagctgtgttcctcttccctcaggttcgccgatcatctgcacaaattccacgagagtgacaacggagcagcagctggtgacttatggcagtgacccccaggctcaccggagatgtgttggctgctgccccctcccctgtttgatcagctgcttctaatgatgtagccttcccctctcccactcccacccccccaaaaaaaaatcccccatggaaactgtctctgtcttcagctaacagctgccaggagctcagatccccagctcctttcaaaggttgtcacggcttcattggagccctaaagttcaaacaacccagctagtctgacacccctgaggctccaccctcggtctagtcacctgacctgggctccacccacatcagaacctctagccctggtggcagagttttctgtgatacatattgtcactacccagtctggcatttctatagcctctcttaggaccccgccacacaataaaatagttgggaggctcgtctaggccccaggcttttcatctgccctattacctggcagggcgggaagcggctttgataaaaccttaactgtaatcccgaagacagggagcccatagagggcgggatggtttccactaccccttccctgcacccagtccatgatttgagttctgcttgcttctttagcaaaatattctggtttctagaagaggaagtctgtccaacaaggcccctgtgcctcaggcaccacagaccacacggtctgaggccccagcaaaaccgatcctgggccacaatagcaaggccaactctcaggacctcaggcagaccctcctctgctgggtttaatcttcttcagcttcgcaagaaataaagaatcattgcagccacagtggggtcttttattctgtgactcctcagctgaacattgagtgtctgagagactggtgggtgcctgcagcacctgccccctggagcttacctggcatataggtaggctctctcccattcttcctatcctcagaaatgctatgagtatgtccagagcattcctggaacccagaccagagtgtcagagtttgttgagtacagccccctccaaaccagaaatatattctttattcccaaacaacctgttggatctcagtattacagcctg

SEQ ID NO: 30714 - DNA, 1222 bp, Mus musculus
cgtctacatctcccccgcacttgagaaacttttaggaagcagaatgaaatgtttcctataggaaagccagtgtagagccagataattgagctcattgttttccttcacggcttgtttgccctttcattctcttcctaaggtgctagatgttgaggaatgtctccatttgccagaaagacagtggggtgtctcatatttccccgccagaccgccagttctgaagcgagcctgcagaatgaatttttaatgctgaatgttatggcatcgctcctgcaaccagccgcattgctctcctgagcctacagatttactgctcggatgagcagagtgaggacttgggggcactcaacacagtgaggattaaccccctaataaccacactggtgccctcctagcttcagaaagataaccctaaggagtcaggagggaaaattaaaactccgtagtgttctgaatgttctccaaacagcctggagcacgaagcagggcatagtctccgaattttatcagacagtgtgtatttttaccttttcactgttttagctgtgactgttcttacttggatgtatttctgtgatctttccacccttaaaaaagctttacaatttgcaaggtttacagaatatacagaagactggagactctccagttcctatgaaaagcccaaatgaaatcagaagtccagaattggtcgctaacaatgggaaggggtctgttcgtattcactggctaattctggtttaggccatatggttaattgttattttcccctcaggagctttctatatttttgaagttttcaaaattaagaacaagttatatataaaaattgttcaagcctaaataagttggagaaaggtagaatcttcaacaagcagtagaacaaatggctgagaatatacataataagctaaggctgcgctctgtgccaattaaagcctggatgtcttaaatataaatgtaaaagaaatcatgaaaacacgaagatggattttaggtggggatttatataataagtgggtggaagagcctttttaagcatgatgccaaaagtagagaacctatgggatattcaaagctttgtggaggtggagggtggacaggatataagagtgatatgaggatggagaaaacatttatggtgtgtaagtaggaaatggccaatatataacttcttgccatgacaaaacattagaggtcagcagagtggatggatggatgg

SEQ ID NO: 30715 - DNA, 1196 bp, Mus musculus
gattcctgtgaactgtcagttaagaatcagggttctggggggagaatttcagcatgggctcagtgtcatgaacaagagtgtgcatcctgtgctatactcaacactaaaatacaattggatggagggagataagaaagggtaatgggaggcaaaaatgtcaacatacatatatacatatatggaattgccaaagaatagtgaatttaaaaaagggaacaaccaatttgctgtgaagaggtattttttaatgttagattaattcactgaaattatataaatgatattattttccaagactgtttattaaaagcaagaaaaaaatgccaaacacgttttatacacctgtaatcgcaggattcgtgaggctgctatggaaggaccccaagttctaggctgctttggctacacagcaagaccatgtctcaacagtcctagtcccccaaaaaatgacatggaaaaaaatcatgatatgacttaatataagaatcacacatgttccctcaaccaaatttaagagaaaaaagaaaaagactacacaaatgcatgcacatatagctagcataagcaaatattgaacaatgcatggcatggtttgtgtgtgtgtgtgtgtgtgtgtgtgagtgagagagagagagagagaacgagaacgagagggcacactgatatgcatttgacatgtggagatcagagaacaactttctcttcttcccttatggattctggggatccaacttgggctgtcagtttgtacaataagcaatttcatctcaccaccccaactttgttttctaaggcagggtctctcattggcctggaacacactaagaaagccaggggtctgcctgtctctgcctctgaagctttgttacacaaatgtgatcctctggggtgttttgttttgttttgtttgtttgtttgtttgtttgtttgtttttaatggacctggttcttgcaaggcaagcactttattgacttgagcgtttttccccagtattcataaatggaggttaccacagtatggaccactgagctttcaggatcctaacatgttgtgtattgaccattgtttgtgaagggtgattccacactctcagtgttagcatcctgtgttttaaagttagtgcagtggagtagtgccttgcaaagtgctcaaaagtgattacaattagcatggtggcgcacacctttaaacccag

SEQ ID NO: 30716 - DNA, 1191 bp, Mus musculus
gctggctgcttataagctgcggaagggctcttccctctgtctattgtggaactctgagtgcttctgccttgtgcctgactcaggggctgcagggtttttgtagcagagatctatgtgtgtcccgaactactgctgctggtatgtggcttgctgtccccaaagacacagagagaagaccagtggcttgaaactgagggggaccactgggtagatgtcctagaaaacatttggtgggtaactcaaaagttcatattgtccacctatcccgagagtggggacatgggaaaggctgtcaactcactacaacaaccctagcctagcactgtgggaaaacgagactgtctaggccagggtgcagggttctgttcccaggtgtggaaatcccagattagagaccatggggacgagagctcacctgtaggaaggaccttcctcctctcccattcccccttccctcccatttttctggtatgttagcaactggccttggattgctcttgggatcagagtaaaggcataccttaccttttgatttgtttagactcctttgaccaacaactcagaaggaggtttcccaagcccagcactgggggctttttgcgtcactgttttagccactgttttcatgagtccattctggacacaaaggagccctgacccttttttttaatatataaaatatatgtaaagattggcttagaaataccttatttctttttaaaaaataatttatttattttatgtacattggtgttttgcctgcatgtgtgagggactttgatcccctggaataggagagacagttgtgcgctaccatgtgggtactgggaattcctctggaagagcagccagtgctcttaaccgctgagccatctccccagcccgaaatagctcatttctaacctgagcatttccattcactgctgcatacagacctaccttggtgctttctggattatatttaactattatttactctttaattacttaacaaattgtccaggctaaccttgagccctttgtggaggtggctcttagtcccccacttctcactctctgcgctcacatgagacctttttattcctgaggtgtggcttgacattgttcaggctgttgcttgcttcttatttttaactcttcttttgtcacttaagtaagatgtcttatttcttatttagtgttagatcattt

SEQ ID NO: 30717 - DNA, 1157 bp, Mus musculus
gatcatgtttctgctcagcaggcaagtgtggcgtcagacaggaagcctggctgctgctagatgcctcttccaggtgatgagatacaccacagcctttgcagtggccctaccatgccacagtggtacagtgtcacctgaagctggccatcctagagggaaggaattgcctttctcttccatccttgtccactgttgtcttcaaccctggcatgtatggtttgtcagcacaacttgggattgggaaagaaaggatattgccagttatggttgaaggtcattgtcagggagttagaagtggtttgcagttgttttacatgccttcctgttggtatgtaattatgttgtcatcccatagtttgatgatagtttaatgaaatctttgtgtgtgtgtgtgtgtgcgcgcgcgcgtgcacacactatttggggattgtttattgctgagatcttagctgttctaacacacacacgacctaagtttgtaatctttgcttgtttcaaaattgtccattcgaagcaggttgaaatccatggcagtcggctgccagatgaatcttctcaaaccattgattttgtcatgtgcctgtccagcaacacccacagcagcttactctggcatagaatggagaccacatgtcccaggctggcagatagaacttctgatagatgtctgtcttcagtgcatccaaaccgttcattccagcagaagcaagcccagaatcttgctggtgtggggacattgcccgggaagctccctctgcccatccatctgaggcttcagcctgattgcatgcattcctgcctgcctgcctggaggagtggcagactccctttgggaggaggcagactgaatggcaaggaggaggctttgtcagtgtgcctcgggctgcagcaggcaaggaaggccaagtatggaggtgggggcctcctgagaaacagttattggtggctaggggcctctgagctctcttccaggtgctatcttcctcctttagtgtatcagatggctgctggggcagcatccagccatcttgactcctgtggcacctgctgtccacgttaggttctacaagtactacctgccatactctctcctagggctgtgcacaattggaaagttgcctgagggctgtggcctcgttcaggggttagcctttcca

SEQ ID NO: 30718 - DNA, 1131 bp, Mus musculus
ttcatgcctgcacagcaaacactcttactcactgagccacctcccaagactccagcaaagagctttgatacatcgcttggcagacaagagcacactcactggccccattggaggcttgagtctgtcaagtgtatgctgctttgagtctgacctccctctcctctgagtgtccgtttttctcattaagtgaggtcgtttgtccctgctgggtccctgctgggtcccagttagcagccctgattcccttccacacctttccttccttcctgtctggcctcgggtggagatctctcatgaggcaggtcccctccctgggagaagtactcaccactgaactcaatgacctgtgtctgatctctgggacccacatggtagaaggagaggactgactcccacaagttgtcttgtgacctgcacacctaaacatgtacactaatgacgcccaaagctggggctggagagatggctcagaggttaagaggactcactgactgctcttctgaaggtcctgagttcaaatcccagcaaccacatggtggctcacaaccatctgtaacaagatctgatgccctcatctggagtgtctggaaacagctatagtgtgtacttacatataataaataaataaatctaaaacaaaaaaataacgcacaaagctggggtagagttagcttcatcacgccacctggtattggctgctcactcttgtgtgcctgccttgtctagcattttttttccctttgtccagtgtgctgaacagttttctcccaagttgacaagagctaaagtctccataagacccagatgtaagacgttttctcaattagtgattgatgggagagggcccggcccatggtgagcagtaccatcccttggctggtggttctgggttctataagaaagcagactgagcaaaccacagagagcaaaccagtaagcggcacccctccatggcctctgcatcagctcctgcctctaggttcctgttctgtttgagttcctgtcctgacttccttcagtcaatagaaaccctaagcaggaaagccagagtcttactacatagccctacttgacctatagaccacatagaccagactggccttgaattctcagagctctacctgcttctgc

SEQ ID NO: 30719 - DNA, 2181 bp, Mus musculus
attgaatcttctcaacaagctttgaaataagtcttttgtggcctcctgttacaactgagggagatagatgtagagagcttccctcagctctctgatccacgcaactcctgagtggaggagccaggactcaaatctgtatcttccctgcatccatgacctaaaaagtcctagtgttgggttgcaggagtttcacttacatttgctaggataagcagcccgatttctggactctgtggccctttaaaaatcctgctgcttctacaatctcttctttagcctgcccaaacctatctaatgctttacaggaacatgtgtgcccgtgagagacatgagctaaggcaatgagaagctgtgacgcagattctgacaccagccctcagtacataccttgtgcaccccacatggtataaggagctgggtctaggtgctaaggccagcagctcacgggcaaagtgagtctcagcctgtaaagagaacaaggcagatgtgcctccagagagaaaaaaagaacacatggagatgaaatccgggcttgggggcaaagaggaaccgtttaaatgtgtgtgtgccttgtgaaagaattacactccccgccccaccatcaccagatgtgatgacagtacttacataaggtactgtatgtagattgaactctggacctcacacattctggaaagggctctcccactaagccacatccccagcccctcactgggattctgggcaggcgctctactgctgagtcacgtccccaactctcttttgacttaattttgagactaggtcttactgagttgcctaggctggcctgaatctcactctgtagcccaggctggccttggactcacatttttccccctgcttagcctgctgagcccctgggatcatagacttgcctagttatacccatttgctgctgcagctaatacctttaaaccagtctccccccaccccagaaaaccttcctagcttagtattatcttaaattcagtgaagagaacagcagcttttccctgttcctccacatgagggcgctacaccactcagccatggggtgatgtgttcaagcctctcccacaacctttatgggtgcatttcttttctgtgtattctctaatgagaagcactgggccacctctgcatggtttttcttgccaatttctcttgtagccctctctcccagcagacaaccacattcagcacacccctcacttgtgcactgccatggccgtccgttccttgtgaccagccagatgacttagataataggggagtttgaaatgaatgagctgatactatctgtaggttaggattctgaccaaaaggtcttcagggctctaggggaagggattaattgaaataccttcccgagcatagggcttttctccagtgtgaattctctgacgttgaatgagtttcatgaatcttgaaagccatcacgtggtcactgttgttggtagatttctgttgtgcaaaagtagccagggtgcttggatgctggctgcctcctcccacaccctcgggacactctcaggtgaatgttggagcagtgttaggaaactgctttgtgttcctaacagtcgatattggttcctgctgttacaactgttacaatgttaaataaataaacttgatccagactcagcctcgcttttttgttttgttttgtttggggttttttgtttttttgttttctcgagacggtttctcggtgtagccctggctgtcttggaacttatgctgtagaccaagctggcctcgaactcagaaatcgacctgcctctgcctcccgagtgctgggattaaaggcatgtgccaccaggcccggcgagacagggtttttctacgtagctcctgctgtggtggaactcgctctgtagaccaggcagggctggaattcacaagatccacttgactctgcttcccaagtgcgagcatgtggggcttaaagaccagtgccaccacccccaaatggcaagaaatatttatttcttctaaataatatatttggcctattcccaccagtacaaacactgtaatattgaataaatttgatccagattcaagatgtaggccatactttatttttttaatgtatttggccttttgtggagggttgtgtggtacacgtgtgtgtactcgagtatgtgtttaggtcctaggccagccttgggtgctgtt

SEQ ID NO: 30720 - DNA, 1123 bp, Mus musculus
tatgtttgttgtatgtgctcgtgtgtgcagttgcatatgccaataaggagaggacttcggctgtcccaccttactgccttgagacaaggtgtcactacagtacatgtgggatcccttacgaagtcctgtccctccaccaccctgaccgtcctggggttacaggcatgcaaacagccatgcttagctttttacaccatgctgggaatttgaactaagagccccatgtttgcaaagcaagcactcttgcccactgaaccatctctccagtccttagttcatctttttctgccccagggttgcatgtagcccagctcaggctggcctcaagctatgtagcccaaatgagctcctcatcctcctgcctccacccctcaggggctcagtctacaggtgtgcccctcagtgctggtttgctgcctggttcctcttgattctattttgggcacagaaaagaacctcttaccaatctctcagtgaggattctagttctcagaatttgaccaggggtcattgccatggctacggagatatgtgaaactgtgcttaaaaaaaagaaaaccttctctgttaactctagcctcacactcaaacaaaggaaatctccaggcctgacagcttcatggagggactctgctcatatctgaagaaatattaaaggccaagcacagtggtgcaaagccacgattccaggtctccagaggcaggaggatcgaggccagcccaaactctttgagaatctcttgagatctcagaaggaattttttttttttttgagatagggttttactatgtaactttggaactctctatgtagaccaggcttacctcagactcacagagacctgcctgcctctgtctcctaagtatagagttctctcgaaatgaacatataaaaggtctggggagttggcctctggaacaggatgcacgcattatttaatatgtgtacagttcaacccacagcactgaagagctaaaacatgccgagccagcatagcaatgcaagtggaccacagcccagctgcgggttctcacctagcctggaggaaactctgggctccatcccacctggtgctccagatgtggagccagaggatgggagagttaaaggccatcatgaaac

SEQ ID NO: 30721 - DNA, 1103 bp, Mus musculus
caacaggggcaggcacatgatgcacagacacaggaggcagaggcagtggagttctgtgagttaaactacaaagtgggttccgggacagtcaaggctattacacagagaaaccctggctcaacatgccctccccccaaataaaattaaatacaaatttaaaaagaaaaatggggtcaaggagatagctcattggataaaggaatgtgccattaggcctgacaacttaagttcaattcccccaaatcccacatagtagaaagggaagaactgactatggaggctggcctcccaccttcacacgcgtcctgtggcacgcatgtgcttgccaacacaaacgtgtacaaaaattggaaaaaaaaatactattgcaccgaagtgtgaatcaagcacaaactgttaaaacattacccacctgaggttcccctatggatgtagaattgtcacccagggagtgaccaagtgtggagggccatgatcatggatgggagtattagcagccagtctgttaggagatctccttggcctgcggaggagagagcggacactggatttcctcaagctggatgtctaggctgttgtgagccatccatgcaagagcagaaagtgttcttcccatctctgcagctcccaaggcttgctctcctctaagatcctgttctcacttctgcaagacctaactcggtcacagacccctttacaagggtggcctgacccaagcagtccccactagacctcagttttgttttgtttttaaagatgtatttattattatatctaagtacactgtagctgtcttcagatgcaccagaagagggcgtcagatcttattacgcatggttgtgagccaccatgtggttgctgggatttgaactcaggaccttcggaagatcagtcggtgctcttaaccactgagccatctctccagccccttgttggttttttgtttgtttgtttgtttgtctttgtttttcgagacagggtttctctgtatagccctggctgtcctggaactcactttgtagagcctctgtagagcctttgtagcctttgtagagcctctgcctcccaagttctaggattaaaggcatacaccaccatgcctg

SEQ ID NO: 30722 - DNA, 1184 bp, Mus musculus
agaggagaggggaggggaggggaggggaggagagaaaaaactgtggtggtttgaatatgcttggcccatagggagtggtactgttaggaggagtggccttgttagaggaagtgtgtcactgtggggggtgggctttggaggtctcctcctatgctcaggctccacccattttggaagagagcttccttctagctacctgaggatgccagtctctcctggctgccttcagattgagatgtagaactctcagctccttctccctatgtctgcctgcaggctgccatgtttcctgacatagtgataatggactaaacctctgaatctgtaagccaattaaatgtccaagagtcagtgagggtgaccttagctctgaatcactacattggggatatggcaggaaccccagtggagggataggcatacaaacccacccacaaaactttcaacccaaaatttatcctgtctataagaaatgcagggatgggaggatggagcagagacaggccaaccgataaccagcccaacttgagacccatcccatgggcaagcaccaattcctgacactgttagtgatactctgttgtgcttgcagacaggagtttagcaagactgttctctgagaggctctacccatcagctgactcagacagatacagacacccacagtgacataggggatgcagcttgtggactcttttttttttttttttttctcgagacagggtttctctgtgtagccgtgtcttggaactcactctgtagaccaggctgacctcaaactcagaatctgcctgcctctgcctcccaagtgctgggattaaaggcatatgccactactgtccagctgcatgtggactcttatgaaagaatagaaggaaggaatgtgggccctaaggggataggaactccacaggaaaaccaacagagtcaactaacctggaccaaccaaaccaaataaacgggctggaccaaggcttccctgcaaatatgtagatgtgcagcttggccttcatgtgggtcccaaaaaactggagcctgtccatgggatatgttgttctagctgggctgccttgtctggcctaagtggaagaggatgtgcctagccatgcagagacttgatgtgccaggattgggggacacccaagaggggcccccacccgctcagaggagaagggaagtggggg

SEQ ID NO: 30723 - DNA, 1103 bp, Mus musculus
gttggcatagtcccagaggctgtcaagggacgacgctgggaacagaagactgctgtatcattagtcagttgactttgacacaggacctctaacctgtgcgtcctgcttcagctacctcagtgctgcgagttcaggggtgccgccagctctggggtctctaaaagcaaatactgtccccctactttgatcagtttggacttttaggtttcttttacagtagagcacagcagtgggagtggtgtcagcatttgagtcctgtttggagacacagtgcagaccctgaggagactgtagcactgcacagctatttagtgccgaagtggtggctgccgcaccacggaactccagcgctagagaggctggggcagcctgatggggagtttgaaacaagcccgggcggcatagtgagtgcctatcttaataccgtcctacggggatacacacacacagaatgaaatgaaaaacaagtcagacaagggtcactcagggaagatgagttataggaaaggggggcaggttgtgggcctagagtggtgattcacacctttaatcccagtagtaggaggagtagcagaagtaggaggatctctgagtttgaggccagcctggtctatagagtgggttgtaggacagccagggctacacagagaaaccctgtttcaaaaacaaaacaaaagctcagtctacggagtgcatgtttgctgtgtatgaagccctgcttcaattccattcccagcactgcataataagccagccgtatcccagaccattcaggaggtggcaggaggagcacaagttcgggcattctcagcaagatgagtgtcaggcgggaggtgaccttgcagtaggacccatggctgccagtgggaatgcacccatccatacagactgcggggctggctcctggtctccaccacaggtgtttgacaggcttacggctgtctcggggctgtaactgggaagctgcaggtgatagaaactggtaatggaggtccaggaccatgaccctcccaggatcctagagcaagtcagcgtagcaggacccatggaacacagtgttagaaggagactccatctttctcttctcccttccccctccagag

SEQ ID NO: 30724 - DNA, 1239 bp, Mus musculus
ttggaaccaacatggtagcgtgagtagatgtggcttgagacccggaaagaggcagaagaggcctgtggcctctgtacggaagttgccccaacaaccaggaccccatgaggatgaaaaccaaaaaggcagttttgggatggatccaactcagctgttttaacgagcgagagagcagagactataaatgtatcccatttcccagtgagaaatggccttggagacaggagagggttggccacatttagctattttagagccccgtgcatccagcaacccagcgcaccttctgggacctctcaccgtgatgggaaagtcatctcggaaatacttccagttgcggacccaggcagactggcgacccctcatcctgggtatgtgtcagtctcgataaagccagagcaggtagagaaccacaagggtccaagcccggcctagggaggctagaatcaatgtcaccaggcatagcagggctggagggcaagatagagagcgaggctaagagcccagatgtgcagggctggcaagatagctcagcaggtaaaggtgcacgctgccatgcctgaggacctgggttccatcccccaatcccacatagtgaaaggacaggccaagctgctctctgttccacacacatttgctgtagcataaacatgccaccccacaaatatatatacacaatacaatttttttttaaacaacccgaagatgtaataagccctttcctcccctctggcccaccctcccaggcctatggtatttaagccctagattccattaaggaccccagaggtctgttctacctcattaggatcatgggagcagagcaccaatagccaggtctgtctggttccagtggtttgggggctcaccaagtcccaagaaggaaaagacccactggagcacagccaacacttgaaggctccggtgcagggggctggaggaggctggggagccccccccctctccccacccccaacctacacactgagccacgtggacagtgaactgtgaactgggacaaggcaaagatattcctccctgagcttgcaggagccccgaccagcaggaaggggcagtgggaaggacctgggtcatagccaggagcctagggcaaagtgtttgaattccatagttagagagatctgagatgaactgggatgtcgccccctccccccgccacacacacaccatggcctttacaagaacaagcttgaaaaccccatagtcactgcctgtgtc

SEQ ID NO: 30725 - DNA, 1178 bp, Mus musculus
cccccccccactctgattccttcatctcgcccaccctgtctacccttcctggtgtctatgtcacccctgtgtgtctcaggaggatgagtcgccgcgcagtgtcctggaggagatgggcctggcatagccccgtcagccagcggggggccctgtggaccgggggaagacaagacaagacagcacttgggggctgtttctctcacctctcccccagaccccttctcttggagggactcggctgcttttcctcggccaccttacctactttagaaggagctgtggctccggcccttcgtacaaacattccctccttccaaatctcccttccctccaccctctacctctcccagcgaaggttttaggatctagaagggaggaaaaacgtgacctggatgggggtgctcagtggcttccattttccttcctttgaagaagcattgttgagcccagccatccctcgccctccatgtgccctgtatggctgtaaatatataaatacgtcaggttaaagggaaaaggtttccagggctcttttctctcctctgccccaaaacctacctccacgcctccccataaccagccagggcagcttctctgcctgggaggggctttgtcctctccagcccccacttcctcctgggctccagtgtccagccagggccagggaagggagccacagagttaacgtttttctaaccttgctacttggagggaagggaaggttgggggagaggcctgctttctgggacactgaccctgtcccctttcctccactccacggtgagggtgcggcaggagccaagcaggtggcatgggccaagtggctgcctttatctcctttcttctgaaataaaaggaaaaagtgtttctggacttgactttgccttggctttgttggagaagacggacgtccactctgaggtcaagggcagcttcctgctaatgtcttcctgggagctgggtcattgggaagaaatactaaacatagaagacgcccagctggatgtcagatagacaacaagttttgttgttttgttttttggggggtgttgttattgttgttattattttatatgctagaataatgaagcctgcggcttatgcattcgaggcaggcactaccaactgagctataagccctccattgttcagtcttgctttttgaggcagggttttgc

SEQ ID NO: 30726 - DNA, 1125 bp, Mus musculus
ggaagtatctatgagcaaggacttataaaatgaaaaagaattcatcaaataaaaccactggcatacgccaaagataaaagttacagatgtgttctgaagaaacatgtagattcctggcactatgaaataatgcctcccagagagtcatttagcaatatttgccacaggaggatttttttatttatttattttttttttgggatgattgtaaaactatgttaatctcagcctgcctagaattccccagtgagtggctcactggtagagtgcttacttgatatttgttccgtctctagcactggggcgggggcagggggcgaggatgtcatccccctttggggaatgcattctgggaagataattcagtagcagaaaaacatttgcagagagacctttacagctgcttcattaactggaaacccctccgtggtgaggcagcggctgaatagattgtggtttgatagaatgaacgtctgtggatcacaactatgaaaagtatttggaagaaaagtatgtgatgtagtcataagagagagcacagggctggggagacagctcagtggctaagaacgcttgctatccagtctcgaggacctgagttcaaatccccaacacccatataaaaagccaggtgtggccacgtgtaccagagctataagggtagggggcagagtctgagatctgtttactgccaggcttacaggttcatcgagagaccctgactccaagtaataggagagtaacagcatggacccttggtgtcctgtggaccttgtgcaggtgcgcacacgtgcactcatgcatgcacgcacaaggaaagactgaccgggcagattctgattgcgtaatgtgagccactggtgggactgtgtccaaatagttgccaggcagacaatggattcccaatctgtaaatagtcaatgatttgtttcggaggttacatctttttgagttattttgggctggtactcacatctgtacatttccatttcagttagtattatatgcttgaagacttctataaataatatttaagaataactaactagttggccagatgtgatagtgcacactggtaactctagcacatagagtgaggcaggaggattgctattttgggaccgg

SEQ ID NO: 30727 - DNA, 1184 bp, Mus musculus
gtccaacgtctccatgatttcaaggtccataaagattagccatgttcccttagctctaaaataagagaaacaccatgtatcttttaaggccattatgggcccaacggaaaggcattagtgatgcttggatgaatggtgggatttaatacgcaaaaaatggatatctgtaatatataatcttagaggcaaatcacaaaaccactaaacagatagttagccaatctgaagttaaataggatttaacttttaaataggatgtgacatttaaacagattatgaaatctctataagacttttcttatgctttctgtttcctggaatcttgtttatttatgctttttgttagctatcttggcaaaatcccttttcagaaatgttagcctttatgtgaatgaagtgatgtgatttcatctgtgacaggaggggtctggggaggcgctgaagcccaaaggccagcatgggagaatctgggaagtcagcagtgatggatgggggacctaaggcgggaggaggcataaaactctggagatacgcttggaggtgagtcgcagtcacctcagtgtttttaatctgtggcagcgtctttggatgaagacggtaggggtggctttggagggtgtgtttagccagggggctatggagaaatgaggctgaagagacatttaaggtagggattattatgacacagtgtgtgtgtgagacacaggggcctttggaataaagtccagatggaagtttaaggatagagaagggacatctttttctggacagaattccctgtttgtagaaaccaatgtagggaatcaccaatgtccagatttgattacatataaaatttaaaagctagatatggaggtgcaagcctggtataatccccaggactcagttggtgagagcagaattgtgagttcaaggccagcctaggctccatagtgagccccttcaagtggggctctggctctcagttggtagagtgcttgcctggcataaccgacccctgggttcgatccccagcactgaataaaaacaggtatagcacatacctacagtcctggcagtcagtcggaatgggagactcacaagtccatggttatccttggctaacctagcaaattccaaaccagccaaggctacgtgagaccttggctaaaacaaaaccaacaaaactgctcttaaaaaagcaa

SEQ ID NO: 30728 - DNA, 1071 bp, Mus musculus
ttgagatttagaagcctgattcttgatttgtattcttcagaaccattcctgggatggggtcaggactcctctgtaaagcacttgcctagaactcaccaatgagagactcagtagtagagtgcctgctaggttctaccagtgaggagtctgggcatggctcactgtagagggcttgtctagaatgcaccaatgagggtgggggcgtggctcagtggtagagcccctgcctagaatcccccaatgaggggctgggggcgtggctcagtggtagagcccctgcctagaatcccccaatgaggggctgggggcgtggctcagtggtagagcccctgcctagaatcccccagggaggggttgggggcgtggcttggtcttagaagacttggctagcctgctgaaagtcctgaagtcaattcccaggcatatcttccttcctaaaaaacaaaagaaaacaaaacaaaaccttggagcaggtgaaagagaatcctaagggagataacataagtcatcctccaagcaaaggaagaccaagtatacgtcaagatatgttaggcatgctggaaagaaggtgagaactggccattctcaaggggaacatggggtcagaggaggccagagatctcagaacaacaatagcattgccaatccatcggagtagaaactccctcaatgaagtatggggtcagaggtcaggggtcagagagtgcaggcacaagcagaagtggaggtatgagatcaaatccagatgcagcatcacacacactcacacacacctgttatcccagcacttgggaagctgaggcaggaggattatatgtttgagcccagcctgggctatacgcagagactgttaaaaaaaaaaaaaaaagctggactctctcccaactctcaggcaccagcttctgtcccacagagactccatctttggccgcatgttcaagtggttcagcaaagatgcccaacgttaagagggagtcgaactcttccagatggtggttgaaaggtgtcagcatccacactcgtgggtcctgtccagagggcagggttgcctcggcagtgaccgtccttgag

SEQ ID NO: 30729 - DNA, 1197 bp, Mus musculus
aattatgtctctatagctccgggagtgtgaactgagtcccggtgtgaacagagacctgacccgtcgtgtccgcaacataaatggcattacacagcacaagcagatagtgcgcaatgacatcaagttggcagccaagctaatccacacactggatgacaggacccagctctgggcctctgagcctgggacgcctcctgtgcccacagtcagtgactcccaggggatggtttctagtgtacccaatggttccttgtgctacccctgacctcatctgcttgttttcctgatccctgggtcctatccataacctcctttgtttgcccctttgtctggatgctacctcctctagcttccaacagcatagtcatttgtgggttaggatggacgaatgagattaggagacagggtttgtccgtgatgctgatcctgtcttcatggcccagtttctgcgctgatttctctgccttactgtccatgtcctcctcgctagagcctcccctcgcaaaaccccatcctgaagaacatcactgactacctgattgaggaagtgagtgcggaggaggaggagcttctggggagcagtgggggaccccctcctgaggagcctcccaaggagggcaacccagccgagatcaacgtggagagagatgagaagctgatcaaggtgccagttccgaccatctggagcatgcgtccaggggagtgcggcatgcggctttctgtatcggggctgaatagtgaccttgtgtgtccaccctccccgccccccaggtcttggataaacttcttctctatttgcgtattgtgcattctctggattattataacacctgtgagtaccctaatgaagacgagatgcccaaccgctgtggcataatccacgttcgggggcccatgcctcccaaccgaattagtcacggagaaggtacgttgcaggtccctcatgttgtctttcatggccaacctctgtctactgtccctcctcttcccccttgctccagtctccctctcagcttgcctttgtcacccacacagtgctggagtggcagaagacatttgaggagaaactgactccactgttgagtgtgcgtgaatccctttctgaggaagaggcccagaagatgggtcgaaaagacccagagcaggaagtggagaagtttgtcacctccaacacgcaggaactgggcaaggataagt

SEQ ID NO: 30730 - DNA, 1160 bp, Mus musculus
gggtggttttagtgcacccctttcttgattttaagaccttctgtgggtgtgagaggctatgccctgcctttcttgggcccctccccacattctggtcttgactgctcgtaactgttttgtctctcccatcctgcttgctttcttgtccaggttccgatctaagtaccaccctgatgaggtgggaaagcgtcggcaggaggcccggggggccctgcagaaccggctgaaggtgttcctgtccctcatggagagtggctggtttgataaccttctcttggacatagacaaagctgatgccattgtcaagatgctagatgcaggtatgggcttaaagggtagggaggtcttggctgggaggttacagaatagaaatcagagcctttgggttgtgacctgctgttgtcattggtagctgtcattaagatggaaggtggcacagagaacgatctccgaattttggagcaggaggaggaggaggaacaggcaggcaagactggggaggccagcaagaaagaggaggcccgtgctggaccagccctgggagaaggagagcgcaaagccaatgataaggatgagaagaaagaagatggaaaacaggtcgaggggcagaggctgagggagctggaagctgcactgggggtgtggggggttggaggggggtgactaatgcagccagcaagaaagactgacattgtcagaactatctcataggctgagaatgacagttccaacgatgacaaaactaaaaaatctgagggtgatggggacaaggaggagaagaaagaagaggctgagaaggaagccaaaaaggtaaggtgtgttttgcatgagaccaagatgtcggggcggctcctgaggggtcttgatggcctcctcctgttgcttccacagagcaagaagcggaacaggaagcagagtggcgatgacagcttcgatgagggcagtgtgtccgagtctgagtccgagtctgagggtggccaggccgaggaggagaaggaggaggccggtacttgtcactttctcgcttctgctcctttgctttcctgtgttgggtgagggtgtgtgagtgtatgtgtaagtgcgtttttatcaacagctcttcattgtgtagcttggctagctcccaaataaatgagaagactataagactttttgataaa

SEQ ID NO: 30731 - DNA, 1174 bp, Mus musculus
tgggctacataccaatactttaatctcaaataaccagttaaataatatgtaaaatgaaaaaaaaaagtctccagatgatgtctggccaggcaggtctcctggtccctcctcagtatcttcactgagccaaagtgctccctaatttaaggcctagttctttacctgtgtggtccctgtctgtatttctttctcctccaaggcaacctctgcagcttcttccccctaaaatctctctgaggactctctctttccttcttctacggaggccgctcagtaaatgtttggtgattactcttgcctttctcctcctgtggcctccctgcttggctggtcccgggactcctccaaccttctgtttttccacagggaccttctccgaattggagtcactctggcaggacaccagaagaaaatcttggccagtgtgcagcatatgaagtcccaagctaagccaggagcccctggtgggacagggggaccagcccagcagttctgacctccaaggactcaccaccgtggcagattcttctttccggggggcagagttgggtggggactcacaagatgagcccctccccctcgtcacagccttcccattggattgcactttgaacagagggggtcagagacccaggatttggggaaccgtgccatatgggatcatacatgtgccctccaggcggggaaccccaaactcagagtgagtctttccctcaagactgggcaaagaaacatccctacgtctctaacctcccatcttcccagagggctctctccccaagcgccttccacctcaacgggcatgtccctgcagaccaaagagaaagggtgaccagcctgccaacttgggagtggaaaatgccgtcccaggaggcaggaaggggctgtcaggacccggtgatgtaatcattgggttttgatgtcctgacttgctgtcaccaccaaaggcaatcatttttcccttgtaaatgcccctcccctcatctgccttcatattgaaggttctgaagttttactgttttttattttgttaattttttcctccttcccccctccctccccttcttgtccagattttgtgtgttaaagggcacctggttccactatctcctgttgggaacaaggacccatcgatatgttctagaacagtgccttggaaatgccacagccttag

SEQ ID NO: 30732 - DNA, 1152 bp, Mus musculus
cctgtcttgggtgatgctgagggcaccccgtcaggggaggtataactttattttctatgtactggagtccccagctaggcaacctggcagaaggttgccttccccacccctttttactgactgcctaggctaggggtcctttccacccaggccaaaactccagtttgccccttatcaaatgaggtaaggcgagaaaatcctttgaaaactgtgaagtcggttcacaattggccaagagctaaggttgtccccatgactcaaagtagagaaggggtaactgctgccctgcagatggtgggggaggggggctgtagcccttcgtcctcccactacacatggagggaggatatattttctatgtgtgtatgtgtatatataaatgtccacacatgtatgtgcatatctccattcgtcctgggaaagtggttaggtgattgctttgagtgtgaggcatttggggggttgactctgttaaccgtagtacaggaagttgctaaggtacattgctttaagttgcacaaagtttgggagaggggtagagtaaggaggaattgtccctaattgttgtcagcttgtgcttggagttctgagagccagagcagaggctgcctgctcccagacccagcctgagcctccagcaggggtcagtctttcaatagcaagggctaggggaggccagggctaggctgtggggaagggtcttacaaggcagagagagaggctgagttggcctgggtggaaaggacccctagcctaggcagtcagtaaaaaggggtggggaaggctagtccctaccctgctgcccatggtggtcttcattagaaagagcctcagatgccctctgaggagctgggatgggcaatcttaggctttgatttttcccccgtcatttttaaattacagtgtgtgtctgcgggcatgcgtgcgtgtgtgtaagcatgtcctgtgtgtgtaagcatgtcccgtgtgtgtaagcatgtcccgtgatattttgttggggtgacacagcttggaggagttggttctctctttccacggtgtaggtcctaagaatcaaactccggtcattagatttggccacgagcatctttatcagcggagctgtttcaccaacatgatgctgtttgttttttaatctattcttttccccgg

SEQ ID NO: 30733 - DNA, 1177 bp, Mus musculus
ggcctggggcctgcgggccaccctcacccactgtgtccctacccaggtacggcagcaggaattgttgctgaagctgctacagcagcagcaagcgacgaatgtccctgtgccccctgcacccagctccccacccccgctctgggctggcctagccaagcagggcctgtccatgaagactctgctggagctgcagatggaaagtgagcgccaactgcacaagcaggcggcaccgcgggagcctctgcgggcccaggcccccaaccaccgagtggtgagcacctgccccagggagcccctctgccgcagtttccaggagtgcttgggctggggggaggtgtccctgagctcatgttcctagagctgaagacctatgtcctttcattattagaaggatggcccctctccctagtcttcacctcctgccctccaatttgcccccaaatgagcctccctgcctagatgtccagggtcccattttagagcccctctgacttcctgccgtttgcagcagcttgggggcttgggctctgcccctctgaaccagtgggtgtctgaggctgggccactatggggcgggccagacaagagtgggggcagcagcggtggcaacctgggactctgggaagatactctcaagagtggcgggagcctggcccgaagcctgggcctgaagagcagtcggagcagcccgtctctcaggtgaggcgcctgcctagtggggcttgtcaggaagaagggatgctaaggtctgggcttatctgtggcctccaattcccctcctacctcagtgactcgtacagccacctgtcaggccgacctgttcgcaaaaagacagaagaggaagagaagttgctgaagctgctgcagggcatccctcggccccaggacggcttcacgcagtggtgtgagcaaatgctgcacaccctgagcactgcgggcagcctagacggtacggaggcgcctgagaggctctactggctctagggactccagacctgtccagcatgcttgactatcccctctctgtagttcccatggctgtcgccatcctcaaggaggtggagtccccttacgatgtccatgattatattcgttcctgcctgggggacacgctggaagccaaagaatttgccaaacaattcctggagcggagggccaagcagaaagccagccaaca

SEQ ID NO: 30734 - DNA, 2072 bp, Mus musculus
cctacacccctttgggaataatgggtgtgacattggaaggtccacagaggtttgtttttggttttttgttttgttttgtttttattttttagaaaaaaaaaaaaagataaaaaaaataatgaaaaaaaaagttaggctgaaaggaaaaaaaaaatcacactgttatttttggccagtgggtaccaggccccatggacctgtcctgcctggcttccctgaggctgcacttaccctgctgccccagaaggtgggtcattggggtgacttgtcagctgggtgctggcagtttgcacagcgagcgagcggaggccctctccagaagccccgcccactggacctgctgtgatcagctcctgtggccgttactgtggcaggtgtcctggtaaggggccagagtcgccccttacctcagctgctttgggaggaacgttgcacaaattggatgagctgcctcagctccctctccccacacccccgaaacagccctcccacactggctgagggagctggggaaagccctgtcagtgccagcctgtcagctgggctctgaactcaggcctgctgaggggctgacccccactgctgccatttcgggggacagcctgggtgtgacactgaaagccccagctccctgcctttgccacatgaatgtattttctggcccccaagcccgtctcaccccctctgagaagggactcagcccttcctccaggagctggagaacacccctccttttatcatggccgaggccttgcttgtgagggaaggacaccgaaggagtggcttggggcggaacctaggggggccccgtggtgagaaccccctgatcagcagccagctgtgtgggaagcagaccacagctccgtacctgacccctccattgaccaaatgggagaggagtgagcagcccctctccttgatgttttttgtgttgggtgtaaggctggaggtcgagagcgcctgtgtcctggctgggggctgccttgcctgttgctcgccgacctcactcctagccctcccgccctgcccatgcttgtcttcattgttgtttgcccccccccccccctttctttttaatatactgtgttagtgactctcccatcgacctcattgctcagaatgcagtattagggctagcgagcgagcctgccactgcctcctccatgaatgtatttctagtttctgtcctggggaagtagggagtggccccaggttcttctttcccatccatccccacagaggtgaccttttgttttcctttccactttttttttttcttttttttctttttttttttttttgcaccaaagtggcaactgggtcagtgttggggatcaggctggctttgggtggaagggcccctccacctgcttctccctggttttgacagtgttagcgtctgtgaaaagacaatattctctctaaagcaataagggggtgatgggccagggggaaacgtcttgctgctgctggccccccagctccctttccctcttgccattgtggtggcattggagggatgggagagactcctgttgtgactgaatgtaacctaccctgcccctgccacagccaatgcagggggagggagggcacttgtctcttcctacccctccccccagctaaagagactgaacttgggggcccatgagcctggagaggccttaaccctgtgaggaagtgtggggcctctcccaccccatcccctctgagagtggccaatgtttacaagccctgagccccagcccagggactcagaccccccccccccatcttaatcctttccccatcccagtcttacagggccccactgccccaccctacccccttggggttcagggtagtgtgggtgtcctgtgtatcccagtttaccctacctctaccctgtgtgacttccctaatacccactcttgtaaatactcccaataaaacttggtgtgttctcccagtctaccttgtctgccagcttttccatgactgagctggggtaagggcacagtggtggtggtggggtgcatctgggaaatgctggactcagcctcatgtagagcaagaatggggtacctgctatc

SEQ ID NO: 30735 - DNA, 1319 bp, Mus musculus
tccatgtgccgacagacattcataggtcacgagtcggacatcaatgccgtggctgtaagtcaggaggagtatggtgagctgcctgccccctgtatcccacacccctggctttgcctcacactcttatcatctctggcccaaatcttgcagttcttccccaatggctatgccttcaccacgggatcagatgacgccacttgtcgcctctttgacctgcgggctgatcaggagctgctcatgtattcccacgacaacatcatctgcggcatcacctcggttgccttctcgcgcagcggccggctgctgctcgctggctacgacgacttcaactgcaacatctgggatgccatgaagggtgaccgtgcaggtgaggactctgggcccacagaaggcagagatgggaagtgtgggccagaccggttcctacatccttccctttgttctccaggtgtcctcgctggccatgataaccgtgtgagctgccttggggtcacagatgatggaatggccgtggctacaggctcctgggactccttcctcaagatctggaactaacctccccaaccccagatgggcccaggcagggagcagccctgcccatgcccacactacaggcccggagctttggggctgggtacatgtgccaagcctccctccctgggctacagggcctccggtcctgctcccatacccaggtttggttcctctaggggggggcccccactgtggagataaaagtcggggatggaatgggggaagaggaagggcaggaaagccctcaccctttgctgccctggggccatggcctcacccctctggagggccagaggcaggaggtggaaactccaggggctggcttttttaactggttttattttaatttttattatattttcagtttttccataaaggaaccacttccaactctgtacctagtctccttgcttactgtccccctttctccagaaagcagacaggcagtgggtattgggctcctctaagcgatagcaggtaccccattcttgctctacatgaggctgagtccagcatttcccagatgcaccccaccaccaccactgtgcccttaccccagctcagtcatggaaaagctggcagacaaggtagactgggagaacacaccaagttttattgggagtatttacaagagtgggtattagggaagtcacacagggtagaggtagggtaaactgggatacacaggacacccacactaccctgaaccccaagggggtagggtggggcagtggggccctgtaagactgggatggggaaaggattaagatggggggggggggtct

SEQ ID NO: 30736 - DNA, 1484 bp, Mus musculus
ggctgtcctggaactcactctgtagaccaggttggccttgaattcagaaacccgcctgcctctgcctcccgagtgctgggattaaaggcgtgcgccaccactgttcggctcaagacccgttcttggatacataatgagtttgtggccatcttaggctacatgcatgtgaatccctgtttctaaatacgtaaatagtacacgaatcaaccccaacaacgtagtttcatctctcccgtccttcccgatccctgagagactgtggcccccagtgctcatctccctccttttgcagatgccccccagcagctggccaccagctccttcctgctcttcttgctggcaggcgtcatctctgtggccttcctgctcctaccactgcaggatgagcttggcagccagctgcctcaagtcctgcacgtgtccctgggacagaagctggttgcggcctacgtcttaggtgagcacagtggaggagtacggggccctcttccggagaaaggatagggagaggaaggcccctacatggactctctctctctctctcccaccttcaggcctcctcaccatggtgctcctccggacctgaactctcagctgaacccacctcacccaccctctccttcgcaggcagggacctaaggcagccactgtgatgtttgcaccttgctcctcctccctcgcttccgcccatccgttgctcctcctccctcgcttccgcccatccgttgctcctcctccctcgcttccgcccatccgttgctcctcctccctcgcttccgcccatccgttgctcctcctccctcgtttccgcccatccgttgctcctcctccctcgcttccgcccatccgttgctcctcctccctcgcttccgcccatccgttgattgtcagcctccccacagcaagcacctgggatttgtactcattttccaagttgattaaaatacattttaaaaatcaaaatgagaaacgtaggatgcttatcgcaaacttcttactttttctttttctaatggtgtgtgtgtgcgcgcgtgtctgcatacacatgtacgtgcgtgagtatgtatgtatgtatgtatgcatgtactcgcatataagagtgcacaccagagggctggtgagatggctcagtggttaagagcactgactgctcttccaaaggtcctgagttcaaatcccagcaaccacatggtggctcacaaccatccgtaatgagatctgacgccctcttctagagtgtcagaagacagctacagtgtacttacatataataaataaataaatctttaaaaaaaaaagtgtacaccagaggtcagaagacaaatttctgcattggttctctccttctagcttatggattctaggtactgagctcaggttatgagactcggtggcaagtgtgagccctacagtcttaatttttgaggctaaggctctcagtgattggctaggaccagtgaagcaggcgtctgcttgtctccacc

SEQ ID NO: 30737 - DNA, 1150 bp, Mus musculus
gctatgggggagctaaattatctctgttttgtagagagaactattagcaggggatgtgagcccagtatgggcccctggctctgtgtataaactgtatagattgtcacctctgtgtgtgcgtgtgtgagctcctgctgcagccaggtcttgtcctgcctgggctacctgcctgtgcaagcctttccctttggaaatgacaggcctctcctgtcccagtcccctgtgttaaccacccgtctgttacctgctggcagcttctatgtgtcatttgtccccaggtatggggcagtgtctaccaggagttcccaccctcttaaccttgctgggggaattcgagggggaaacctaacctgggcccctccccccaggagtccctgtgccagccccaccacatcctggaagaggaaggggcccctggaaggggcctccctcacatcgctgctgtccttcacgcacttctggaacagccttaggggtagaggttgggggctctgggccccaactaccatcggacctgtcctgggagcagatgacacctgggcccagccaattaacaaggacttggtgaccatggtcttgtgtgtagcactggccttggatatccccctgcccttaggctgcttcgggtacagcccccatctgggtgaagagcgttgtgtcaaacacaataaaaagaagcccaaaggcctgtaggttggtcctcaggtgtgtgcctgcctgtccatgaatgcgcgagctttttggggacctgagtcctctactgtgagtcccagtgtagactgctatatttctgtgcctggcagaggagctttaccggcacaagtgccccgtgcctctgccgccagggggagcccttgagaacctggtgggagcgtgccacgtggctgaagaaacgctggcgcaggcgtcgtggcgacacctctgaggtgggctaggacttgggcgctcatgtagtcagggccgcgcgcaagtgcaagcacggcggtgggtattgcctggtgcttcaccagtcgcaggatgttgccttggcttgggccatgggccacaggccaggaggaggcgaccgaggggctaggcctccccaccggcactggtcacggagaggccttgagctctggagaggaaaccatgaaggagcaagaaacgcctg

SEQ ID NO: 30738 - DNA, 1150 bp, Mus musculus; identical to SEQ ID NO: 30737

SEQ ID NO: 30739 - DNA, 1150 bp, Mus musculus; identical to SEQ ID NO: 30737

SEQ ID NO: 30740 - DNA, 1115 bp, Mus musculus
cccagccgcaacttcctccacacccaaccttccaaagctgccgctgtcctcccagatggaagcaaagctcgaatgtagggtaaagatgaggcctggtgttgaaagccaccagatagccctgggactgcggagcttctggtgtctagtgtttttgtttgccaggctcggccacacccacttctctccacctcagttcttcctagctgccccctcatcttgtccgtcagggtgggggagtttgacctacagagtatgcgtgcccgcctcctgtcaagcactttagttagccctgtcatgtttggataccagtgttttatatttataaatagagacttttctaatatagcctattatatacataaataaatatatatatgcatacacatatgtaaacagataaacaccgctggccattctttttctcctagacaacccttgaacttgggggacttgggtaggaggatcacaagttcaagactagcctggacaattttgggaccctccgtctcaaaggaagaaaaaaaaaaaaaacaaaacgataaaaagtaaaaacagagaactcaggatgtagttcagtggtagagcacttgtctagactcctcctgggaacttgaagaatagggtaactcctgcctgtgcctggataatcaaacccggagccccagggctcaggggaggacaaccaagtgtcctgacgctttccacaatacacacgagaaggggtaccccagaggctaggcttttccaatgaaaagtctgcgattggctggggagtttggttttttttttttttttttcttcttttttccacattcctccctctgttctcaaatatctgcaccaaagcttgtttggaggcaatgtcggaaaagattgcgtttgaaaggattaaaaaaaaaaaaaaaaaaaagctctgagtgtcttgttttgtgccagctggagtggacacaagtcagtcaacaggactgagccttgacttggatcttctgatcttcactgcctgggctgataaacacgtgacctgaactgcgcaccctctgttagcaagaagcccggagaccagtgagggtcccgatctggggctgaaaggtagtgatggcgcagggcggcaggtg

SEQ ID NO: 30741 - DNA, 1222 bp, Mus musculus
cggccagtttgatgcctccaaggcggtagaggagcagctgagaaagtcgttccggacccgctgtgccctggaggagaccgtggcggagggtgaggggggcaggcggccggccgggcgcggtggtctgggtgaagggcgatcctcagtcccgccttccctgcgctcgcagggttgaacgtgccgcgctctaagcgactctaccgagacctggtgagtctgcaggtgcccgaggagcaggtactgaacgcggcgctgagggagaagctggcgatgctgccaccgcagccccgagccccgcccctgaaggtgaaggaagggatgcagggacctggacatccctctaccccctgggctctcttcctccacctcgagtgtaacctgcttcaccttcccataggaggtgctcgggccgggcccagacatgaccatgctgtgcaacccagattctctgtggtccgaatctccgcacttgacagtggatgggctgcccccactaaggcttcaagcccggccccgcccttcagaagatacctttctcatgcatcggatgctgaggcgctgggaagcgtagccctcataactctggaatgctagtctgtaattttgttagttttttttttttttataatagaataaaatgtttccccccctaaattaccgaactgttcttgggagtttagataggattaaactgcttcagggtcttctacccttttcctgccccgacccccatggcaagtggaaagcactgtcccaagtgtggggtcagaccttcctctccatttaaatccccagctttagttattagaacttgagccttagcctgacaccgaggctccaagaatgtcccagcacttgggaggctgaggcagaaggattctatgtccaaggacagtctgagttacacaaattattttgatacggtttcaggcagggtaggttcagatgagtggtagtacctggggaaagcatgtacaaagccctaggttcaatccccagagttgagtgtgcaagtgtgtagtcaaacagtagtcaaagtgttttaaattccactttggctgggtgtgatgaacacttgaggtagagacagaatcaggaattccaggccaacctaagttaccaagtaactgtgtcaaaacaacactgcacacatactgctctagttgtacaaactattatttgtctctctacatagctctggttgtcttggaactcattatgt

SEQ ID NO: 30742 - DNA, 1134 bp, Mus musculus
ttttccccaggaaacaatctataagaactactttcgaatccagttgaagccagaacagttcagttcctacctgacatccccagaggtgggtttctccagctatgagcttgtggccacaccgaataacacctccagaggtaagaagggctcgtttttttgggctgggaggggatcgtcctggctgcaagggtataggccctgtggagaaccccagggtcctacccacctgcctctgtcttcccttcaggcttccagcgtcctgtgtacttgttccacaaggctcgatcccccagccactaagtggccttctgagaagttgtaaagaggctgcccttgctgctcctgaggacctggggggaaaggaaattattccaaggtctttcctaactccaaaaagtttctccttttcttggatctgtcaagagagcttttcctaagttgctaccccacatctcctccctgtcacctctggcacttgagcaagcccagctgtgctggaattccatcagcttcctctcctagcccgctgggctggatggcatggactgtttgctgactctgcccacctgggacaggggaagggggaatgtcgagttctccaggcccttcctcctgttctcaggggacttcccgcttctcctcagcctttgttcctagctgcacttaaatggaccatggatggactaagggtgttagaggggaagtttggtaaggagacacacaggtactgtgaaagtccttctgctgtcccccggtgggagggagctgggtttggaaatgtgagaacagcacaataaacttgataactagggcagtggcccccgcacctgtgtccagcactttctagcggtagtacctccgagtaggactatgttctccctttgcccgtcctagtccctctagggtggtttttattgggtgtggtgggacataggcctttttatgccagcacttgggatgcagagacaggcaagatctcaaggtgtgaggccggcctgggttgactgcatagtgattcagtgtctcaaagaggtaagcgttggggaagtcaatagtttagttttgaagactgttagtgcctgtcttagggttactattgctgtgaaacaccatgaccaaagaaagttggggaag

SEQ ID NO: 30743 - DNA, 1166 bp, Mus musculus
ggacatgagcctctcaatatggatgttgggcaccaaactccagtaagagtagaaagtgctcttaaccatttagtcatctctccaggccccacatagaaaaaatagttataaaggaataaagatgggaccaacaggagagtaacaagtttgagtaatgagaggaaatatgatgaaaggatcatgtaaaatttcatgccaaactcccttatatttttatacaaagtgtatacactattttttttaaagccaagtgtactggctggttttgtgtgtcaacttgacacagctggagttatcacagagaaaggagcttcagttgaggaaatgcctccatgagatccaactgtaaggcattttctcaattagtgatcaagggggaaaggccccttgtgggtgggaccatctctgggttggtagttttggttctgtaagagagcaggagaacgatggcggacgcggagacaaaacgctgttgcgacgaaagaggttctggctgaggcagcagccattctagaacctgtaggcttgcaggaagaagcagagctgcctgccaagatcatggaggagttcatgaggaagtcgcggaagaaagacaaactgctttgtagccagcttcaagtagtgaacttcttacagacttctctgcctcaggaggatactgaccagaatccagatgctttggcttctgaagatgcaagtcggcaaaaggcaactgaaactaaggagcagtaaaaggacatgaaggccacatacatggatcacgtggatgtcataaaatgggccctgttggaggccttaccccaggttaaagaggctcacaggaattacaaagagcttcagaaggcttttgagcaactcgaggctaagaagcgagtccttgaggagaaacttcagctggctcagaagcagtgggcgctgcaacagaagcgtttgcagaatctgacaaagacgtctgcagaggtcaagaggcgccgcgggaagagggctctggagaagcttgacggaccccaccaggaactggaaaccttgaagcagcaagcgggacaggaacaggggaagctgcagaggaaccagagctacctccagctgctgtgttccctgcagaataagctggtcatctctgagggcaaggctgaggacaaaatgtcaaagggcgagcccttaca

SEQ ID NO: 30744 - DNA, 1429 bp, Mus musculus
tgaagactgttgacatggacaccccgcctatggttgagatttcccctcaagaaacaactaaaatcaccttgcaccagttgttcactggtgaccagcagcaaaagtcggtgagacacaatagcagcaggtctcatcaggttggtacctgtgacctctgttccaagtcagactagaatcctacaaacaatcactggttcttgcttgactttatttcttagaccaatcctaatctctggcggcatctgagctgtttgcttagtgctgccagtgagtgttctatccatccagctgaaaatcaacagagctactctgaggattgcacctgactcactttctggagtgaggtggagataaagaggtgctttttaaggttctcttaaaggaatgagtcatattaatggtggacttttgtgtgagagctctggcctgtttggttttttgtcttgttttgtgttgggtttttttgtttttgtttttgtttttttttttttttaaagcaactgaaataaggtacaggactccaggagcacatcgagacactggctttgatcccaagaaaggactttggtcatttcccttttggctgcttatacacagacaattaaccacatgctggtgcacttcagccgttattctttgttcttaaatgaaattaagactgacctgtgatcccatccctcatttgatttccattttactggaacgttttactattagatagtcactgggatggctccagatcttccatggatgcagtcctggaggcagccacctgaaaatacattttacttagaaagctgactataggtggttatccaaatttcttagatgctcagcagtgtcactgcatcgtggtcaaatgtggtgacatctgtcgttagtgctcaggctagttaacagcctaagtgcttattagttaaccatcagcatgccgattgacatgatggaactttaagacttcttaaatgtactttacaacaaaagccagattcttcaagttttgaactttctacttcagcctggcaggcaaggctaagcattgatgtgtgagacaactttatatgtaaagcacttgatattaaaggtataatcgtgagactgttaaatatgtgtagagagactgacatgttaaatatgtgaggcagtccatgccttatatacatcagagaattgattccagaatgggaccgagtccgagtgtgatgcctggcaaaggttacactgtaaataaactctttctgtgaggccagctttatgcactcattgctttggacaggaaatttccattgtgcatctcaatcatgccgtaagttcagaagctgccagaagagctcagtcttaactccagaggacccacaggagagcccaagtgtgggcaatgctaaagaaacagtaaaaactcacaacttcttacaaacggtgaacactg

SEQ ID NO: 30745 - DNA, 1232 bp, Mus musculus
catgataagcctacatttatatagagagttaactcaggcactgtctttttgttcataggctagataaaccatcctgttttatccatccccagcatatactagaataaattagacccaaagaagaaactttgtatgccagcaggattaaaatcattgctgttaaaaagtggaactttgatttgaccagcctctgaagagtccagatgtttagtagatgttcaataaataatttttaaatggaatttgttttaaatcctcatttgttttttctacaaaagttccttttagtaaatggaggaaaagtagttttttttgtggtttttttttttccctttgttttccttaaagctaaagaactctaagcattattgagaactaaagtttcaaaagagaaatggcaggctgagcaggtagtgaagttggcagagtacttgcttgccttaatccagagttctgtccccagtaccatctaaaccaggtatgctggcacacacctgtaatgagcactgctgcgggagaggcagaagcatcaggagttcaaggtcatctttggctgtgtggtgagtttgaggccagccagggctctgtgggatcctggagggagaagaggaagaggatcttagtgcatctaaggtccaatgagctgttaaagtagtcaagttaggaaaaacctgaagatgcgtggcaaatatcctgttgcgccctggatctggatcctggtaaaagaataacttgccagtcccagcaggtgatgctggtgattgattttgtcttaaaggtaggttttcagagctggggagatagctcagttggatgcttgccgtgcacacatgaagacctgatttaaataccagaattgaagcaaagaagggtgggatgggaaagcagacacaggaagatttctaggacttactggctagtcacctggcttacttgattagttccagccaagatagggacccagcgtcagaaatttaaaaaaaagaaaaagtggacagcttttgagaaatgatgcccaaggtggtcttgcatcagtgatcacaaatgtatctgatcacatatctaaatgcaggtgttgggtataggcccagaacattttaccttgggtaaaattcaatatttttttttctttttttactgtctcgtttaaatgaagaagtgactcattgatttaaaagtgcttgccctttcagaggaccaaggtaggcaactcatggtcccctgtaacttca

SEQ ID NO: 30746 - DNA, 1209 bp, Mus musculus
tccaaggtgaggatggtgcttgtgtgcatcagaattgccgagatgtcacagctggagtcagtcagggagcacagaggcagagagaatcatagtctggagtcagcatgtgccgagaagacagacaggttgtgtttcttctccttttcttttttgtttgagagacagattctccctaggcatccctggctattcttgaccagactggctttgaactcagagagacccgcttgcctctgccttctgagtatggggattaaaagcgtatacaactattccaggctcccaggggctgcatctcaaaagcactcttcctaatccagctttaatattggacaaggaatatgctgctttggtacatgattccatgaattcaggaaacttggtgctgatgggcttattttattagggggaaacaaaaaaaaaaaaagaccccatcaagggtttctgtaatgactatcctttaggctcttggagcagtgtactgtgttttcaagagcagtcaggcagtactgtaggcagacccttgtgacatcactgacagagaatcccataggagcagtaaataacctgaggtagatctgaactggtagatttaacactggcctgactcctgtccttttttaaacttcctattcctgtgatgaaaagtaatttaatgtcaacctctagttactatatgctctcagggaacttgcctgcccctcttgtcctgccctcttacatataacatctggcctcagcatctggacgtctccggattccacctcttaattcagctacgtcaaagtacacagacagtaaagccagagaggggttgaggtttgagctttgcaggggcctctcctaggtttaggtggtgctccctgagtgctcccaacccgacggatgacttccatatttccccaccctgcccgtcctgtagcagaaatgaaatgcactactaaacagaatggtttttcccaagggagtgcttttgtatgggagccacacttgtgtcagttaaaacagcacagtgaccgtaaatggaatcctaaagtgaactttgaaacttttctttgataaactttttttggagggggtgggggtggcacaaacttgtcacacacaactctctcaatctcttgtagacattgttgcagactatataaatgtatgtagccatcttcataccaaattcagggtcttatgagctatagatcattttgtcta

SEQ ID NO: 30747 - DNA, 1216 bp, Mus musculus
taagggaggggaattcagtctttggaggtaggggttgggtgtggccacaggccgcccttcatttgccccattcccctgcagtggctgaacacctgatagctcagcatagtgccatcaagatgctgcacagccgtgtgaagctcattttagaatatgtcaaggcctctgaagcaggtaggagaggtgcctgtcactttgaaacatttttcctctcctggaaaagtgacagcatccacatcagtgcagcctccttgtgtccttaggagaggttcccttcaaccatgagatcctgcgggaggcctatgccctatgtcactgtcttccagttctcagcactgacaagttcaagacagacttttatgatgtgagtgttgacacctttgatggggaggtggggctcacaccacctcacaggtaggaggtgaaactcaagtgtcactggctaatacgagggacccctggggaactggttctttgtgttccctcccagcaatgcaatgacgtggggctcatggcctacctcggcaccatcaccaaaacgtgcaacacaatgaaccagtttgtgaacaagttcaacgtcctctacgaccgacaaggcattggccggcgaatgcggggactgtttttctgatgatggttctggaagggatggtgtgtggggctcagacagctgttccatggacctgagtaccacattccctttagagaaactcattaataaaagagcagccccttagcagcccttccagtggctttgtcctctcaggcaccacactggtttctcaacatggactcttaaggaagcttcacccattaatccacattttttgaccacctacccaccttttaatgactcgaggtgaccccttgttgaagtagacaaaatgtgataggacgacctgcttgcttccagtttttgtgctctgtgatcaattcatgtcacagctccacagaaagattgctttcccaggctaatttaatttcactgcaaatgtttctcaaataggaaggggagggaagctgaattccatctttgtaattgtggttatctcaagtccttgtttttctatatcctgaaggtacctaggagggtgatatgtacctcatccttaggccttccacttaagtcataccttgtgctaggcgcaactttctgcccttcacatcctggtgtcatcacgtctagatgtgggggtctaacaaacgaaatgtccat

SEQ ID NO: 30748 - DNA, 1117 bp, Mus musculus
ggactggccagtgttgagaggcggagacttgggcaattgctggacgctgccctgggcattgcacttgtctcggtctgacagtgccggcccaacactgcagatgtgggggggcagggaggagtccccatttttgttcaatgagtaggcaaatgtggcttgcccaggcttgaagctggagcaaagaaagatccttgacttcattcccctcctcccctcctatcccaatcttttctatgccttccccttaggctcgacttcggatggtagacattgtggagaaggaagatgtaaatgaagccataaggttgatggagatgtcgaaggactcccttctaggtgaaaagggacagacagctaggtgaggattttaatgaagagtgagactggaccactgggcttattgacctggcttgccctcagggttttgatgctgattgctgctactgtttgtggccttgcaccttcaccttttccatccttgtcttttaggacccagaggccagcagatgtgatatttgccaccatccgtgaattggtgtcacgggggcggagtgtccacttttctgaggctgaacagcgctgcatatctcgtggcttcacaccagcccagttccaggcagctctggatgaatatgaggagctaaatgtctggcaggttaatacttctcggacacggatcacctttgtctgatagccagtttttacaccctcctgcctacaccagagggcatgctgaatgccccctcaagaaaaaatctcattctcccatgctgcacttttttattctgccaataaagtgttttgattgcctcttgcttgttaataactctgtagagtttttagtatgctctctcctcccctagtctctagtactgacccttactatgtgctagtcaatctgggagatagaaggccttgggaccactgtttcttgagatgcttccaattatggacatttcgtttgttagacccccacatctagacgtgatgacaccaggatgtgaagggcagaaagttgcgcctagcacaaggtatgacttaagtggaaggcctaaggatgaggtacatatcaccctcctaggtaccttcaggatatagaaaaacaaggacttgagat

SEQ ID NO: 30749 - DNA, 1117 bp, Mus musculus; identical to SEQ ID NO: 30748

SEQ ID NO: 30750 - DNA, 4783 bp, Mus musculus
ataaggttatctcaagtctggctatcagtgaatgacttgattctgattgtttttatacaaagttgggtttttgttttgtttttagcttaagggttttcttagatgttttagtcgtgtttattcctatgtgtttgtgctcacaggggcatgccatagcatgtgtagaggtcaaaaggacaatttgtggaagtctgttctcccaccatgtgtgttctagagagcaaattcagatcatctggctagatggctatgtctaacctgctgagccacctcatccattcctagctcttagtttttaggggtagtctttgtgtggctcagaccaccatcaagaacacgctgtgtagctacatagctgaggttggctttgagctcctcactctgttgccttctgaatcctaagtgctgggattatagacatctaccaccatgatgtactgcattctgttctttccccagtggtaggatagtgactttagaagagcttttgtgggtgaggtgaacttgaccctaaagtgttagcatctcttctttacctcaggttcatctggctcatcgggaacaagtggcactgtatgtggacctggatgacatagctgaagatgaccctgagttggtcgactcaatttgcgagaatgccaagcgctactcaagactgtttggtgatgttgtgcaagagcttttgcctgagtacaaggagaaggaggtaggtggctggtttgtttctgagctcgtctgcctcgtgccctgttttctttctctgtcctgcctctcgccttttctttcttttaggtggtgaataaggatgtcttagatgtttacattgaacaccggctgatgatggagcagcgaagcagagaccctggggcagtccggaacccccaaaaccagtatccttctgaactcatgcgaagattgtgagtatctctgtgggaaagggcggggacttgctctccggggacttgctgacaaatgtttctcttttagtgagttgtatttccgaggcccaagtagcagcaagcctcgagtgatccgggaagtacgagctgactctgtggggaaattgttaactgtgcgtggcattgtcactcgtgtgtctgaagtcaagcccaggatggtggtggccacatacacttgtgatcagtgtggggcagagacctaccagccagtacgtatacaattctatgatggtgatttgatacctcgggtcgttttgactgataatatttcaaggaggtcttaatccttattttaaaagacacagagcagagatggttactgtggtgattgtaagacttcctgttttccttgtttgtagatccagtctcccactttcatgcctctgatcatgtgccccagccaggagtgccagaccaatcgctcaggggggcggctgtacctacagactcgtggctccaaatttgttaaattccaggaaatgaagattcaagagcatgtgagtttaggggatatgagtcctgcagctggttatgaaattataggaagaaagattgggagagaggtttacctagaatttttttatatttgctcttagtcagaaaatcgggaggtgatttaattgaagtttttttctggttctattgggaggaggataagaagaactcagcttccttcctgaagtcatctaggttgggatgactgaatcttaccatcaaatgggcatcttctggggtggtggtcagttgggtcaggtctgcctcgcttttctccttgtctcatgtgctctgtgtcatgccctcccccacacctcccaatctcctagagtgaccaagttcctgtgggaaacatccctcgtagcatcacagtggttctagaaggtgagaacacaagaattgcccagcctggtgaccatgtcagcgtcactggcatcttcttgccagtcctgcgcacagggttccaacagatggcacaggtgagggcgttttgaatgaggaaatagctgccttgcctcctcatccacccactcactcttcacacccttagaaaatgaaaatcagtgaggtggaacttgtggataaaaaattctcagggactctggtgatggggactttaaagggaactcttgtgtccagggcttactctcagaaacttacctggaagcccactggattgtgaagatgacaaagagtgacgatgatgtctctggggccggagagctgagctcagaggagctgaagcagattgcaggtgagggaccacgagctcaagttgagagttgagctccatcctagattttgtcctgaaggaaatgctatggcttaattttttgcagaggaggatttctatgagaagctggccgcttctattgctccggagatctatggacatgaagatgtgaagaaggcgctgctgctgcttctggtgggtggtgtggaccagtctcctcaaggcatgaagatcagaggtaagaaggacaagagacttaggagggagggtaaaaaaacatcccacgagagtctgtaaatgacaagagttgatgatttaccttagtggttgttgtgtcttagaagtagtctggactttaagaagggaccaggtctcaagtgctcttctctgttggtggacaacttgggtaaagagtatcactcaggcttccttctcatttgccaggaaacatccacatctgccttatgggagaccctggtgtggccaaatctcagctcctatcttacatcgaccgtctggcaccgcgaagtgagtgtgaacagggatgaggcttggtgtttggttgataaacactaaggcctctggaaggcctggggaaagcggttcctttcttcagcagtttgctctttatctttgcaggtcagtacacaacaggccgtggctcctctggtgtagggctcacagcagctgtgttgagagactctgtgagtggagaactgactttagagggcggtgccctggtgctggctgaccagggcgtgtgctgcattgatgagtttgacaagatggccgaggctgaccgcacagccatccatgaggttatggagcagcagaccatctccatcgccaaggcggggattctcaccacgctcaatgcccgatgctccatcctggctgcggccaatcctgcctacggccgatataatccccgccgcagtctggagcagaacgtccagcttccggctgctctgctttctcgattcgacctcctctggctgattcaagaccggcccgacagagacaatgacctccggtgaatgaagtagatgacacccatagagacagcccattttagtgactttggggcagggaggtaaaatcagaaagccactcaacttgtctgtgtgcagacaccttaaacacctttccttgtttgcagttcatatggagataggttggagctaagatcttgagggttttctgggaggcctgtctgccatgctttggagaagaggtggtgctaaaaggggatactgagtcaagattctcagggtgttagagctctaaagactgacgcccgtcttctctccaggttggcccagcacatcacctatgtccaccagcacagccggcagccccctgcccaatttgaacctttggacatgaaacttatgaggtaggaggggtggagatgggtatgtctggggagagtactggtctgtggcattgtcttatgccaagtgtgtctggaaagcattgagtcttgaaaggactcatctgcttatctatttcagcctcaaaagtagctgagcctgggtctctctgtagccaagggatcatcagaaactttttttctgttttgggatgacagagcagcaggccttatataatcctagctactctgaaacctgagtcattttggggatgtctccaaaaactacttccctcctgtatataaaggaacctctctcactctctaaatcctgtccgaggcaggtctagctttttggccataagtgcttccatggcacagatgactcgggtttctaaactggttttcacatggtctctgaagtctgtcaaggggttaagttaaatcctcccactacaggtgctttggtaaatgtcattctcctgaaaagttggaagttacttgaagtgtcctggcagccctgttttggagaaatccctcactgtccacgtcagcatagaatattaagtggggaatctcataaagcctgcctgctttcccgctttcccatgaaccttgtttcccacagacggtacatagccatgtgccacgagagacagcccacagtgcctgaatctctggctgactacatcaccgcagcatatgtggagatgaggcgagaggcccgggccagtaaggatgccacctatacttctgcccggaccctgctggccattctccgactttccactgctctggtgagtggtgggtccctgtcagctggaaagctgacccctgcctgccacctcacctaatgaccctcaagccgcctccttccctcctaccagccctgctgggactaaagtgctgacagtgcagatagtggtcctctctgtgctaccgcactgtgggtacttgctgctccagcagggcacgtgcaacgcccatggagggaaaggctgcttgctgcttgaatccatgagggctaggacttgaattcctggtgtcctagatatgatcttagaaatctccattctgtcctcccctcttggaccttagtcatgggggctccaaagtgctgttcgtgcaggtagtgtaattacctgacctactgctgagctagcacttcccgagcccccaggacacaacctctgatagtggccctagctgagcgccccaggctcc

SEQ ID NO: 30751 - DNA, 4783 bp, Mus musculus; identical to SEQ ID NO: 30750

SEQ ID NO: 30752 - DNA, 4783 bp, Mus musculus; identical to SEQ ID NO: 30750

SEQ ID NO: 30753 - DNA, 1156 bp, Mus musculus
tccttaactatctttccacctggctagtccgcggggacagtggtggtcgtgatgtggcagagctcttctaccggaagctgacgggactgcctggaggcgagtccccggttgtcatggtaactactgtggttggtgtgcagggccttagaactgtggaggtgggtgagtgcctcctccctgtcaagggcagcttggtaggaagcttgggggcgggggtgtgtgtgtggggaggatttgtttataaatgttttgagtactaacaagaagccagttacagagccatgcaccctattttttgactatcaacaactttgagaggtagatactacctttccacgttaggcggccaggtcttagatctggggcatcgcccatcactagtagacctcagggtgccatcttgcaggtttccttactacaattctggtcttttcttaatggcctctgtcctcaactctgcctcagtatcacggtgatcgtcattttattcacatcagacacagtgggctctatttggtggccacaaccttagaaaacgtctctcctttcagccttctggagctgctttcccggtgagtagagttgggacaggcacttaagaaggagggcgtgtgaggtttattcacacataatttgctgtgtttccttaggctagccactctcttgggtgactactgtggctcactcaatgagggaaccatctcacgcaatgtggcgcttgtctacgaactcctggatgaagtgctggtaaagcccaaaaactttggtctttttaagtttatttattcacgtgtgtgtgtgtgtgtgtgtgtgtatttgcccacatcactgcacatgtgtggagatcaggtatcttctacttgttgtagaatctgctaaatccaatatagatccaccataactcaagcactaggtcaatgcagatgacaaaaaggtattgtaatcaagccagtactgatcagtcagggctgtagaacagactcctgaacttgcctagcagttaaaggctgacaccacaaagtggaggggagtggggtgagctgtagcactgtccaatcatattttgacataaggggttgagcaagggaactttgaccaatcagattaggagtagttttctgggcttgagaacacgagcttagttgatcttgccagc

SEQ ID NO: 30754 - DNA, 1617 bp, Mus musculus
tcacggtggtctgcaaagatgcagaagaagccaaaagggtggagtcacagctgaagatcttgatccgtcccctgtattccaacccacctctcaatggggcccggatcacagcaaccatcctgacttctccagacttgcggaagcaatggttgcaagaggtgaaaggcatggctgaccgcatcatcagcatgaggacccagctggtctccaacctgaagaaagagggctcttcccacaactggcagcacatcaccgaccagatcggcatgttctgtttcaccggcctaaagccagagcaggtggagcggctgaccaaggagttctcggtctacatgacaaaggatggccgaatctccgtggcaggggtcacctctggcaatgtgggctaccttgcccatgccattcaccaggtcaccaagtaattcccaggtgcgaaggaacagagaccactttcccgacagcctttgcgctcgtgagcgtcatgtgcagggtgagggagggtgggtggtggtgaatagatccggtttccaaccacggtgcacaactcagcaactgaactcgctcctcgaaagagaggtagggcagaggcttcctcggctggtatctggaacttcgtcggctctaaaccaaactccctcatccttttgtctccagcttttctgaaagtttacacacgcaagaaaaatcacagcaccaaacacctgtcagccatggcactggaataggtcagacgctttacctaaagcctcaggtggtatcaggggctcccccgtggaccccggtagagcctcacgtaatagaggctgtaagagaaaaataactagttctgtcattaacagttgtcctcaagttcgtcctcctggtgtggagcaaactgtgtcagcagaccacattacagaaattatgctttacaaaaaccaacaggtctgttgccacttcaacagggacagtagaagatgtagtgtcgtgtccgcctgccccttgtcattgctgttctagagcctagagtctcatcccgttctactgcgaacgtccgcctcagcctatggggggagttacataagaatggagagcataggttttctgctcctgcatagcctcctctctcatcaaagagccgtggagagagagaccctgcccttgatttcagagtcctcttcagtcattgattgattggctcctactgggatggggcctctgcccagctggacctcttcatccatcctggctgcacagcctgtctcttcacatgagtcagacgtgcagggtaggatcagaaggagatactctggggtttgtgtgctgccagcccggctcagactccgcccttgggaaagataaccaccatccgctctaatcatgtagacgtactgccgcctggtttctctgttacaataaaattactatagagccagaaaaaaaaaaaaaagagggtgaacatgactagaaaagggggttttttgttttgttttttgtttgtttgtttgttttgtttttttggttttggagatcagaaacaaagtctttgagtttaagcatacaataagaagaatttcattcatgtcaaaatcatatatattgttcccaataaaaacaaactcaaacttcccaaatcta

SEQ ID NO: 30755 - DNA, 1239 bp, Mus musculus
aactaggaggtgtagctttgtgctagtatttgatcaccagcaccagaacagccacacaaaatcattgctctgattagtcacagagagccacatgcagggtggctggtggtatctgttctgatacttcatggcccaaactgccaacctccaacaaggtacaggccttaggctggaagaaagaaacataggggggaggacaaaaagaactttctatgcctcagtttctccatctgtgcaatgggagcatgggttcttctatgaaatgcagccagtctagtaccagttcttaaattgggaagatttgattaaactgtggaaattttgatttttttttttttaaattacgtatatcaacttcgtatcttaagacaagttggggctaagtggccctgctgttttctatctgtggtcatagcctcaactcttcctgccttcccacagatgtgaggtgagatgagccggccgccctctcccgggacacggatgtgcgtggcgtgtgacattcctgaacatactatgtatggtgcttcattgccaatgtgcgtgcggtctttgttctcctccgtgaaaaactgtgtccgaggacaaagagacagtgtccgtttgttcagtgtgacatcaaagcaagtactgtagcactcagagagacagtgagaaagcttccttgtcacagagagcgaaaacaaaaccacaaaaaagaaaaaaaaaacaaaaaaaaaattaaaaacaaaaaaacaaaaaaaacaaaaacaaaccaaaccacacccaacaacaaaaaaaaaccccaccagaagaaacaaaaagactgaagtgggcgacggaagggccgccctgcaggactgaccctcgagaggtggctgatgttggccaccaccctggattctgcccgtgggcacaggtgcttttcgccaaggacgcctggagcccgcctgggatgctgcctgccagctccgtgggaactgaacaggtgggagatgcccacggcctggaagccaccacctcgcttgagtctgcctaggaccttcctgatggccttacgtggaatttctttattttcgttttcctttccttctttctctctctttttttacaccatgaagtgagtaagcttctcctttttattctctgcctagctttttttttttttttttttaaatctcttggatgacattttcgtcgataacacgcacgaggctgctgtaagttgggacagcgagacggttatttttttcctagcca

SEQ ID NO: 30756 - DNA, 1118 bp, Mus musculus
gtgtgccaccgctgcctgttgaaaaatactttacatcatgactgtgaccctcacacttttcctggggggggggtaggggggggtatttagatttagttggttgactgatttttttttgttgttgttttgttttgtttgaaatggtgtctcactctgcaccccaggataacctggaacttgtgtaactcaacatggtctcagattacagggatccttcctcaatgcagttgcaagctgccaagtctagctctcctttctgtcttgagacattctgaactctcagtcagactgaaggtataactagccactttctgcagcacagaccctgaagctggttctgtgggctcccattttctccctctagagagccgccctggcctgggctgccgagagctggtcttcaggaacctctccaaggtgcttcctgccatctgtcatgatatcaccgactgggtggtggggacgcgggtgaaggcagcacagctgctgccggtgctgctgctgcacgcagaggaccacatcacccagcacctggagatcgtcctcagaaccctgcatcaggcctgcaccgatgaagagaaggctgtggtcggcagtgtgagtgtcctaccatgcaatggcaaagctctcagccctgtagaagcagttcttagtcaccagctaggtgaaggggtagacctctcctgcccttctcacctctcccatagtcagccactagcctggccctggtggtgccctccaggcaaactttgtttcacctttgatttcaccgggcacatgcagcaggctctgcttccagtgaccaggctgtcagcagctggcctaagagactggcttttccagcccaggcacacttatgtcatttccacacaaaacttagggggtggggggagggaatcctttcatgtgtgtttacatatgtatgtgcagtcaattgtatgagttcatgtgcagttgtgtgcatgcttatggaagcccaaatttaacactggatattagcggctgtccattgattgcaggatctctcactaaagcaggagctcacagattcagctagtcttacctagccagtgtgctctacggtcccctgtgtctgtatcctgggtactgggaggaca

SEQ ID NO: 30757 - DNA, 1197 bp, Mus musculus
gcaggcggatttctgagttcaaggccagcctggcctacaaagtgagttccaggacagccaggactatacagagaaaccctgtctcgaaaaaaccaaaaaaaaaaaaaaaaaaaaaaaaagaaagaaagaaagaaagaatttagggggctggagagatggctcagcggttaagagcactgactgctcttctgaaggtcctgagttcaattcccagcaaccacatggtggctcacaaccatctgtaatggggtctgacaccttctggggtatctttcaaaaaaaaataatttagaataatttagaagttgtaaagagaagctggatttgtgtcttggtcacatagggagggcgatgctggagtttgttagtgtcctcagcagttgggagagcagcatgtcaggaaggcgagccatggcctgtggcttgcagggctcctaccccagcagtgaggcctgggaagccatcggtggcctgctgcagcccctgttctctttcctaggcccggctgtgggagaagcgctgcagcatgtgatccccaccctcagggcctgtctccagccctccacagacccacacatgcgcctgaagctcttctctatcctgtccatgatgctgctgaggcctaaggacactgtcgattctcaggggtaggtcgaccctcaggtctgtgtacagcccacgtatgtgttggatgggtcttcccacgaccccctgggcagggcccccaaggtctaaagtccgggcttcttggtggtctgtatctctagaatccaccccactaggtaaacagtgatcttggtgagtataccacagagacacagacagtaaatcaaagtcactttagaggagtcattaaaattccatcgagtgagaaagttttagggcgcattaactattaatggcttctgtttcggctgttctgttttaaaaggcttttggcacctttcagacctaacagacctgactaaattagcattgatggtgaaggcttaagggtagtctgttatctcagaaaagctcaggggcagctctgcaacctaagagcctcagattttatggctttgaagtaaagggaaagtggaacaaagagcttaggaaagaacaggctctcaggggaggagggaagcaagccaagacacacacacacacacacacacacacacacagcagctcatcctggagaggagggtagagcga

SEQ ID NO: 30758 - DNA, 1155 bp, Mus musculus
cagcgtcctgttcccagatgtgctggtgcgggagacggaggctgtcgtccacaaacaccgctcagctacctactgcgagcagctgctgcagcacatgcagaccatggccgctgctcggtgactgtgtgcatcagctactgaaggcagacagtggtggcctgcagacctcgcacttgagacactgtgtccatggcctcgggccatccttgggcccccagatggtgcttgaacatcagcttctgtgtttcctaagcagatttctggggttttgtaacacacatacacacacacacacacacacacacacacacacacacacacacacacacgccagcttcccaattagctgcttgaacataatgtttttaaattacaagccccaggggtcctgggctgctttcagattcaccataatgctcttcacattgcaggaaagccaaaggattataaaacaaccaaccatccacttcctctgggctctgtcccatcatcctgtgctgaggacagtgtccagtcttgactcactgataaagtttctcccaactattctgggttttgacacagggtttccctgtgaggctttgactattctggaactctcagagatccaccagcctcttcctccccacactgagattaaagacccgcaccactaccaccctgctcctcccgattttaaatacactggaatgtcttgcagtgtgggtgcactgtcctggtgtttctgtttctcagtattagtgatgcccgtgggtaaaggatagactaggaaaccagccttcatccctaccacttgctgtagcagtcagtaaggtggccattctccagtgtcttttccaccaagtgcctaaagatttctaagtggttcttagccgcagcctatatttttgttaagacaatgttggggggggggggggtcgtgtccaacaaattttaacatttctgctttgccatttatggaattaaattatttattatagttatttgtgtggccatctgtgtgatttgactgattacactacatccgtacagacagctcctgtctccatatgtcggtgttgaggtggtccagcctgagggatgctggctgtggactccatgggatgggcccctctagtgacagtcatcactggctatgacctgcattctgacatg

SEQ ID NO: 30759 - DNA, 1148 bp, Mus musculus
tcttctgcttcagcctctctggtgttgggatttttatcatgcctagcttgcttgttatctcttggttttacttgggggtgaaggggggctagtatatgattgtgcatgtacaagcatggaggtcagaggaaaatgtcaagtgttgttccttccttccactttgtttgtgacagtggtagtgtgcactaggctggcgggctcgtgcacttctgacctcccatctcaccatcagaacactaggattacagatgaacttctatgtctggctttatattggttctgggatccaaccctggtgggcaagcttgtgtggctagagcttcgtttttatgtgcacatttggagggaacacatgaaagaaactttgacttgggactaagaaaaactatgtcttttgttataatcaaaatgggactgccagccctgtctctgaagtcctgttaaccctctaacacctggtcctcttctgtctcttctgcagcatggtctgagacggtgaacatggacttttctcggctgcacacgtacaccccaccccagtgtgtgccggagaacactggctacacttacgcactcaggtgagtgagtgctttctctggtggggtgcagcattgagggcacacagcattgaactcttagtgatcatggaggccttgagtggcttctatagctgtagacttctgagtcacctcttccagtgactcaggtgttagtcacttgaagtgactcacttttgcaggctctaccccttggccatgattgggagcaagtggttagtatggccaatgttttgtcattagctttaatagtttgagcatccaccagagaccctggactaggggctgtctttgggaggtgcatgcttcaggcgcatgctccagacaggatgtctgggtcctttgagtcagcagctgcttgctcctctgttctttccagtttgcctcctccaagctgtcctgtatgctaaggagaatcagttgtactactaggttagggcatgcctggcaggtgcctagcaagatatgggaggcccatgagatgtatgtgctgagttgtccagtggctctcctatacaggtgaatccacaagaaaacctaaaggaaatcagaaaatgtttaaaaataaaactctgtgtgtgtgtgtgtgtg

SEQ ID NO: 30760 - DNA, 1208 bp, Mus musculus
cacctataatcctagctctcaggaggcagagacaggaagagctctttgagttcaaagcctccctggtctacagagtgagctccaggacagctagggctacacagagaaaccctgtctcaaaaaactaaggaaaaaaaaaccctagagtttccataaagctagctagatcttcccccttgtctgtccttgtgggccagaatgtgctggagtgcacagctctccatgccactgcctttgggtgacaggtgtaccgagcatcttggaaatagaccacaacagtgccacagcatagcactggcctatcaccgggtacagttgtggtggggttggttgtatttcacagtgtaatgtgtgtgtgtgtatgtttcaggtctcgatgatgatggtgaccttaaaggtaattactttggtactttgtacactttttaaatagaagccattgctacgtaatcggtagatagtgatcagtagctttcattacccctttgaaaacctcaggtggaaataaagctgccactcagggaaatggtgaactggcagcagaggtggcgagcagcaatggatacacttgccgtgactgcaggatgctctcagcgcgcactgacgcactcacagcccactctgccatccacgggaccacctccagggtgtactccagagacaggactctcaaaccacgtaagtcttctgcttctgtagttagtaaaaaggccggcccagctcattcttttctcgtaaatctgactatgggccaaggatgtggctcacagtatggtgtttacctcctatgtgccaagctctgcattccatccccagcacaggccttggtgtcttgcactgtttgccttacagagttgaactcagtattctcacagcgttgaataggctcacattaactctgtcctacttgtcgcttcccagtttgtggttctgtggttagtttttttgtgcctggaagtagttcagatttggtaaatttgggcttgacatgaataaaagaaagttcctacttctgtggcttcttactggggagcttctctgtgtcacccagtacatcccagatactcaagtagctagaacaccagaagttaatgctgctgagagtgagagctctggtgtgatgctatgagacaggtgctctgggagggcaactcggagcctggcatctgggtggtggcatcagatcattggacacgatagaggtgggt

SEQ ID NO: 30761 - DNA, 2055 bp, Mus musculus
ctctctcgttcatgcctttgtggggcaggcatatggagacaatagtggggatcaccccatggccagctctgtgcctcagtaaaagaccaaacacgctagtccatgagtcccaactgctcttgaggcttatttgggatatggctgcatcctgttacatatcccacgggggcaagggattggtggtggtgggtggtctctgactgctaatgtgaaataacttattctcttaacttcaggaaagacctgaccaagccttccagatagtagagctccgggtcctgtccaactggggccaccctgagtacacttgcctctaccggttccgagtccacggagagcccatccagtagagcactccagccatgtacatgtctgtatataccaagacgccataacactggaactcattgagaaagagagcacgtgagcataggaacttgtcagccacccttcaataaatgtgctgtggtcctgaggacgtgctgagtcctctgaggctgtgcgtgtgttctcaaagcccaaaagccggggaggcttttttaattcatttgaatgtatgattctcggacactccttttgacttagggatttgcttgaatgcataaagtcaagaagcagataggctggcaggtttccaggctcctgacataaaggctgagagctctgcattggccatcctctggatgtcaagaaggcaaagtcccatctgctaaacccacgtttctttcagggaaaactgttgctctgtcttcagtctgaccccttccaggttccctggtggggagaggctatgtcatagactgtctgctttgagctgggactcctctgattccccaggggagtagatcgggctttgcagaagagcagtggggtgtgcacaccatgaatggtgctcttgggtctcagccaggccgttcctggcagatcacagaatggacaggaaccttgagaagggatgctctgctgtccttgagctatgagtctctgctgaagggggaacactaaggtggtgctagtggctgccactcttggtctttatcacagcagcattctgtgctgcccttgggtttgcctctacaccattatcagcccttctcactgattcaaatttgggtatatttaatatttagacttttgtgagtagactttataactgatacatcatctggacacttaaaagtgtttagatgtcttacctaaagaattgttaagtttcattggttagacagccttggcagaatacaaagctcacctgctggggctcagagttctgggatttctcgcatgttgcaagcagcccttaagacagtggcccaaagcacatcccactccatagggttagagccactgcctgtgtggccaggttgtgtgggatgcacacattttgcatactcaaggttacatgcagaagtcagaatttcctatattaaactaaattggggaattgggggtggagatatttcaaatatttatttttaaagatgcaagataggactttgtgcaatgtatttttgtaaatgcttttcaaaacacttgtctttggtagtgcttctactgccactaaattaagatgctattgagatgtttaaataaaagagttaatttttaaaagtgcatgtgcgatttcaagtgattaataaaagtgtgtatttcttttcttggcttgtcttatctctgcccatgtgaatgggagggattgctaggttgtgtgcttgaagagttcctgctaagtcctgcaggcactgccactgtcactcaagcctccgccagcctcttcctgcttagaggaatccgctcagagacattccagtcaggctcaaaggaagtgggcccagaggctttgggtctggatgtggtcacaaggccctgagctcagcttccagagccagagcacctttctactacagcctgccgaatatatttttggagcatttttcataccttttaacagctctggttcctaccatgtatacagaagtgtcacgttgatttaagcatcctcagttcataggctttcctttactttttttccctctcaccctaagacaaggtttc

SEQ ID NO: 30762 - DNA, 1142 bp, Mus musculus
tggtgcctacttacatggcttctgtgactggtgtcctccagagtccctttactgcctccagtcccacttgtggttggtggggttgggcttcacacttaaaaactgattatgtcatgataggcacattggccatgccccactgagccagcatgtggctactagagccttcatgcaaactgccctgaagcctctgctctcacagaggaagaagctgctttcagctggaggcaccctgtcgcttcaagcccgctcccacagaactgtctcccagcatgggccacccaatcaacatagccacagggaagtgggcaaaccagccagcagagactgggacctgtgcactatgtgtgggctatccagcagcactccaatggcttctggtctttcttttgaagttgcatagttgagaagtgtcttaaacatatagtattgctgcctgcctcctttatagagtgctggatttttgttcacctcacctttagtaagggtctgattgtgtcctttgcagaaaatctggctaaagtgttcagtttgatggatccaaattctcctgaacgagtagcttttgtgtccagagccctgaagtggtccagtggagggtctgggaaactgggccatcctcgactccaccagctgctggccctcacattatggaaaggtaggcatgggatcccatctcatcagcagctgaatcctctgtgtgtctgccagttgataagtgagaagaggccatggggaaagcatgccagcctgtctttcaacatctctgctttggtcatagacctctggacagaacctccacaggtcataagggacccctggatcatgacactgtctcctttccagtctctgtcctggttctcctacctggttacctgcttctcttcccacaacctcccattccccctcctccttcctcagtgtgcctccacacctcatgccttcactggctccctgtgtgtagttcttttttattcagttttgaagtgagctctgttggattatacagccatgggatatattgcaggcatgcctactcttcttggctcttgagctggcttgggcacaaagatgcttggtgactgtctgctgggacctgagcagcttccaccccaggagcattcctggggaagctggtgtgg

SEQ ID NO: 30763 - DNA, 1230 bp, Mus musculus
agtgtttggcgttgagaggcccccttccttgttgctctcagggttccaggtatagaagggatccagggtctgccttgacgcttactcagggctcccagcttgctctatgaatagggttttggtgttgagtgtaagggaggtttctgcatttaaacaaagcagtcattggtgatcttcgctgtgtgcaaaggagcctcccttagctagaactccctgagtagttggaagttcaggaaaagaaagttgcttgtgggcccagctctcatgcacacaagcgttaggtagacagcagtttcacatacttagaacggaggaaaaggaggttggatgacagtgcccattgagtttgtttagtgtttgttctctgagcacaaggaagctggtgacaggctaggggacagcagctgtgcagatggatagcttgttctagggttactggcctagcaaaggtgtgtccaaggcaaatgggtaggagcggggcaggagtagtgggtggctctgtgcaccctgtgctcacgtgtgcccatctgcagattctttcccttcacagagcaaaattactgtgagtctcggtatcactttctgcactccagtgatggcgagggctgcgccaacatgctggtcgagtactctactgcccgaggcttccgaagtgaggtggacatgttcgtggctcaggctgtgctacagtaagtgttcatgaggacgttgcggggccttcgttcagctcacagcctggagcaggcctctttgtctcagactccgcggtgctggagggggaacctcaggcccaaggctgtcttgatgtgctcatcaaccagtcctttctctgaaacacaagtgcaagtgtccacagttgcgctcaccctgcctagggggctgcaccttgtgcttgccaatcaattctcattataggattgaggtgcagtcagctggtaggatggctcatccccacctgcctgcatcaggaaggcacctgtgtttgtttgcctttttaaactacatatttaatttatttagtgtatgcatagcgagggttgcagggacacatgctgtggtgtgcacctgtaaaggctgcagtttgctggagcccttcccctcccctcaaccgtgttgatctgggattgagctcatcagcaggcttgagggcaagcaccttacctaccgagccatctcctctgcttcctcaggcctcaaaaatgcttgctctgtgagtaatggcaggaggct

SEQ ID NO: 30764 - DNA, 1616 bp, Mus musculus
tgaaggcccctagtatggtgtggcaccccagcagacagactcctgctgctggccaggggcccctggacaggctgtggaggggaggcctcaggctgggggaggggggaaggggagggaggagcttatgggctatatggggagggggagtcacaggctgaggaggggaggctgagtgagctggcagctcccaaggttagaacgttcccatttttagtggaagcccacttcaagcataaaccctaaggaagaaagcccggaggccccaggattctacgctcatgtggctggacaggcgcactggacattaggggagtccatcctccaggcccacaccctgttccttgtgtggcccaggcatggccaggtggggctcaggcaagcccattggatagacagtttttcagaacctcattaaagttgaaggcagacttggttttgggcctcacctgaccctggccctgtcacgatgctcccagccacgcccagctgacccatccactctcctgctgctggaagccctgcctcccaactttgagcaggaccctactaactcttctggcctgaggggatcttggcctcaggacaggacttggtgctgggctgctgtggacagccatggacagccatggacagccatggatagctgtggcagcgggctggcctggctgctggggactcactctgggatgtgccgcatgcctcccctttcctccccccacctcaacaagtatttattgagcacctgctgtgtgtcagtcagggatcaagggtcaggggtcagctctttttcccctagggctgacccagctggggtattgggggtcaggtatttttccaagagaactttgtgcacaggccctgagtccacctgtttggggcccccagtctccttgggacagctggctggggcaaccgggaggaaacctagtctgcagggtgctgtgcatggagcccagtagtggcttccttgggagccagggagcgccccaccccatctgcttttgggcgtcggtgcccagctcggtgctgtccctgctttgtaacccatgccctctggccctgaccttacagtctttgagcccttgatgaatgagagcccaagccaagaggcggccatgggcaggagtggctgcccccagccctgattgctgctggcaggccagtagttaaagctacctgtatttatctccctgctgccctctggccaccccaacagatgggctcccttctatgggatccccaaagggcaggtcctggccgctggacagctggggagcattgatgggggaacgcatctgtgaatgacctgggccctcatcaaagctgcaccccagggaatgggggaggggtccttagttgggcttctgctgccctgtgtcatgtcccctggaataaagtgtggctctggcgttgtcccttctgtgtgtttatggctcaagtggggaggagccagctggtattccctttgccctggcagcctccctttgggcagtaagggacatgagaagaacctgtcacttccatggcaggcctgagacaaagctggcctgactctgcaacctgtgtcctatagtccccacccaccatgctctgtgtgtgtgtgtgtgtgtgtgtga

SEQ ID NO: 30765 - DNA, 1182 bp, Mus musculus
ttggagctgtgggccaggctctcggacccaagcctatcttgtcatcccacctgtgctagctaattttatgtcagtttgatacgcactaaagacagaaagggataccagttgagaaaatgcctccataagactgggctgtaagcaagcctgggtagcatttccttaattagtgactggttggagagggcccaggccactgtgggggattgggagatggttgtggattttatataaagcaggctgagcaaggcgtggggagcaagatagtaagcagcacccctccatggcctctgcatcagctccaggtggctgccccattcgcgttctagtgctgacttccttcagtgatagacagtgagcgctgtggaagtgtgagccaagcagaccccttccgcccagctggctttggtcatggtgtttcatcgcacgtaacacatcacaatagtaaacctgatgaggataccaccctttgccgctgcctccttttactgaaaggccttggggtttctataccatgcttcagctatctacctcccttcctggctgtgggccgagagactctatctaacacttggctgcacaagccgtgtagagtcagctacgaggaatctcagggtgaagccgtgatgtgagccgaagcatgctgaggccttggcacgcaggatcctgagctgtgtctgtgcagatatcggtgctgtgttgactgtatcggctactgctgtgtcctgtcctctaacgggaagcaccttaggggaggaaggcttgatttggggctcggcttgagaggatacattcttcgtggcaggaggcagagagaagtggacgttgtttgctttgctttctcctttttatgatttgcgatgccagcctggggattggagttgcccacattcagggagggtcctgcttcagttaacccaatctggaacattttttgactgacgtgtgaagtttgtgtcataggtcattctaagccctaccacattgatagaaatcgtcacattgggtttggcactaatcaaggcagagtttcttgtggccacagagagcctggatcctggtactatctacagggctttcagacctgaacctgtatgtgtggctgagcaagagtgcatcaggggtccatgagacctgagaaggtccccattctcccagctgcctacacctcatactcaggac

SEQ ID NO: 30766 - DNA, 1201 bp, Mus musculus
agagtgtgtgagagagtgtgtgtgagtgtgtgtgtgtgtgtgtgtgtgtgtgtgtgtgtgtgtgtgtctttactagcagcagctttccttttattacacctgacagaagtccaccaggagacaaagctccttcttgtctggggtggctcttcctgcccttcctgtaccggaagttaggcttgggttttgccatcccaagtcatcagtgcacagtgatcatcgtgtgtgggtgaactgcctgctgcacgctgcactgttctggaacatgggtgtctgcacatgcgtgcctctgtggtgaggcttaagtcagcattggctgtcactccttggtgctgtctacctttttttttttttgtctttatgtatgtgagtacactgtggctgtcttcagacacaccagaagagggcatcagatcccgttacagagggttgagagccactggctctctagctagctttttgaagaccatgtctctcagtggatctccctgtttctgcctccccagtgccatggttacaagtgtgcactatcatgtccagtctctctctttttacaatctcggtgcttgggattgaactcaggacctgcgctgcacagcaagcactcggtccaactgagccgcctcccctgccctctgtatccttttctatggaaagatgtctcatctgcctcttggagaggagggcccaagccagctaggctagatctgtgggttccatgtggggtgtgtgcacccctcctggcccaaggccagctgtatcctgctgcgctctgctgtgccaggctctgtccactgacgtcttgtattggcctcatgaggcagctctgcgtcccagctgccccctgggtccttatgcggctacttcaggctgggttccctccagtgcacgtcgccagcatgtctgaaagggaacgtggatttgtaatgagggacaaaagctggcgatgtttcatgcatatgaattgagttttcctttccgttcgtattttgtcaggaatctaatatgtgatattttctgtccttcctcaagacaaactgccatggtcccagaactaacagctatggccacagaactgtcacttgttcagatgtgagattgctatgtggaacttcttttttattgctttatttaatagacccagggctgaggatgtgactcagccggtagcaagcgcccttacctagcatgcatgaagccc

SEQ ID NO: 30767 - DNA, 1210 bp, Mus musculus
tttctaagaaggaaaaaaaaatatcaaaactactcgagaaatccaaaacaacagcaacaacaaagaagtatgtgcatttctcgttgagatttatttaccactttatgaacatccctgttcacattcactgtccattcataaattatctttggctaaatgtctgctcagcttttaccttttatcttatttttttaaaaataatggaatcctctactgtggctgcctctgtccagtgcctgtggctcatgtttctgaggccctgactgtggagccctctatagctgggtatctttctggccagtgcctgtgccctccagcctgcacccagctgtgcagagtgctagtgcaggcagtgcgtcctgcctcaaagcatccctggatccttaactgtggacagcccagtgaggctcagtagcaggcacagtctcattacctatctcccagctccacagaactgacggctggcttgtggtgggaaggaatgagggccgtgtgttgtgtcacgctggggtgaggttgccatgggcactgctctgcagaggctcactgggagatgtggggtctgagcagggccacaagcagtgtcacagtggcttctgtgtctgcacagatggaactgaataccaagagggtggtttgtttagggtccgtgtctcctgaggtcagacacacttccctagcccacaggagacaggctgccatccagggcctgtgggtcatcagccccctggcctccctcttctgtctctagggaggctactgccgactgatttcttgtggcagctcctgggttaagtgaatataaaccaagataaaggaatcctgcctggaaaccccagaggagcttagcacagtgtttgaattctggcagaggccaaggacaggcgtgtgtggcatgtcatggattgatgatgtctggggcctgcaagggaagagctggcctcaggaaactgctgtctgtgtagcctgtctgccattgtcttcacaccgtggaactggcccagcccaggatgcttgggtcattgcccacaggcagaagtgacagttgaaaactggcactcctgtgctgggacatgccatgccgtcctggggtggggtggaggggcagggaagatggtgccaccagaggtttgcctgcctttctctaaaagagattttttttttttttcatattctggtagattcttaggaagttgcaaaactacacaga

SEQ ID NO: 30768 - DNA, 1235 bp, Mus musculus
tggagtctaccgtctctctcttctgtctttttttcttttgtagagagttggagatggaactgagggcatctcacatgctaggcaagggctctaccactgagccacaccccagcccctcactgggggattctaggcaggggctctaccactgagctacactccagcccctcactgggggattctaggcaggggctctaccactgagccataccccagcccctcactggggattctaggcaggggctctaccactgagccacgcctccagcccctcactgggggattctaggcaggggctctaccactgagccacacctcagcccatcactgggggattctatgaaggagctctacactgagccacacccaggactttttaaaagttctgtatgatgtgtgtgatgggagaacatgtcacaatgtctgtatggagttagagaacaattttatggagttggtttttcctttcacctttgtgtgggttctggggattgaattcaggttgtcgggctctcaggacaagcgcttctatccattgagccatcttgccagtccagtcctggtgttttgagacgagatcttgtgtatcccagccctctaatttacatgatgaccatccactccaaatactcctgcctcaccttccccattgctgggattataggtacatctccacatctgcgttgttggcctcttaggacattagtgttttgaatgttgaccactgtacgcattataatgtggtcacattgactgatcctcaccatccacttttggtttttctcagacaaggcttttatatatgtgtagccctggccatcctggaactcactctgtagaccaggctagccctgaatttagagatctgcctgcctctgcttcctgagtgctgctgggattacaggcatgcaccaccactttttttttttttttttttaaagatttatttattatttattatatgtaagtacactgtagctgtcttcagacacaccagaagagggcatcagatctcattatggatggttgtgagccaccatgtggttgctgggatttgaactctggacctttggaagagcagtcagtgctcttaaccactgagccatctctccagccctcaccaccactttttaaaaataatatcacaccccaagatctccagcgactccccagcggatgtgagtttttgggtatcccatttagcccagtacagctgttagtgagctgggttggtc

SEQ ID NO: 30769 - DNA, 1142 bp, Mus musculus
tggcaggacagactgtggcaggagctggtcgcaaagttttgaggccacacttcctgtttctctgcagacagcacggaggctcctaagccagaaagcagccctgagcccccaccaggccagggcaggactcgggcagggacgcaggtgccggtgcttggccctgaggacgacttagctggcatcttcctacaggtacaagggctaccgtcagagggcccctcagcagcaccgcctgcacatgtctgccctgcatgtgactcgtgacatgtgtgtctggccactattccattcttatcttgtgctcactcttcatgctcactgtatgaagtctggctctgggacccctgctggtccctgtgctagggtgctaggtacctgtgtccttcatggcagctcttggggtgttagactcccctgccactcatccagcaaagatcctgggtcccttagttaatgcactggggacggaatctgatgggcctgaggcaggctacgcatgggagccacgggtgcggggcctctgcgttcttatactttctgctctccagatcttcccactgagcccggacccacggtggcagagctccagcccacgcccccttgccctggcactgcagcaagccctgggccaagagttggctcgtgtccgccaggggaaccccgaggtgccaggcatcacagtccgccttctgcaggccatgaccaccctgctgagctccccgcacggtggcacccttgctctggctatgcatcacagccacttcctttcctgcccactgatgcgccagctctaccagtaccaggtatgctggcacgtgggctggcgggaggcaagggcagtgggagactagtggcccagtgtgcatggctctgcctactgtccaccctcaggcctgttgttgttcccagcatgtctgaggcttcccttagccggtcggtctagatttcctgtctttcagcacaaaaagaaggggcaggagcaagggcaaggccagggcctcatcgtagagggtgaatgagtgaggtctttgtcacccctgtctgcatgcacgagtgcttctgtgtacgtgctgtgtgtgtgtgtgtgtgtgtgtgtgtgtgcatacacctgtgtttcttctccactgggttacccatgaagg

SEQ ID NO: 30770 - DNA, 1099 bp, Mus musculus
gaccatcagtgcctatctcatctacctgtcccagcacacgccagtggaggagcagggcccacacagtgacctggccctggtgagggaattctggcagggccagatggctgtgtcaccaatgttgtggccgggtgttgggctggggcccccagtgaccagagtctttggagcctctgacagcccttgtccttgctcaggacgtggcccggctggtcgtggagcggtccaccatcatggcgcacctcttctccaagccctcctgcagcaccgcttctgacgctgtactcagcgccctgctgtctgtgttttcccgctatgtgcggcgcatgcgcaagagcaaagagggtgaagaggtctacagctgggtgagggccgagcgggccagctgctgtccagtggggtggggcattcagagctggatgggggtgagaggtggtctgcaggggtggatctgaggtggactgaagcaggcagggcacagggtaggtagactgtcgcaccattatcagccgcaccatccatgccatctggtgcctgtccctctgccctctctcacagtcggagtctcaggaccaagtgttcttgcgctggagcagtggggagacggccaccatgcacatcctcgtggtgcacgccatggtcatcctgctgacactgggcccgccgcgttgtaagcaacctgtcccgggcttttctacactcagtttctagtcagatggcctgggaggaccctcgggcgtagctcgggcgtgccctggcccaccacacagttgagctggtcctgtaggttggcctggggacctcaggctggctgaaacccctggtcagtacaggttccctttatgcctaagagagtggaaaggaaggctgacttgtctcatcttgttgggtccagtgggctcactgaagcccgagactgaaggctctgtgaggaccggcagcttgtgctgtggttctctggctcatatagaagtctgggtgaccaccaaacccaggcttccgtaggccaccacacagcagtcagggtgacatggagttatgtgcccactaccttctcaggccccatctgcaccatcatgtgagccttctctgttaccct

SEQ ID NO: 30771 - DNA, 1183 bp, Mus musculus
acctgattcaccgtaggtatacattgaagactcgctgggcgagcggatctgggtagacagccctcactgccgcaccttcgtggacaacatccagacagccttcaacaccaagatgcccccaaagagcgtcctgctgcagggggagggggcacgcagtggtggtgagcttggtgcaggtaagagatgccgaggtgtctgtgaggttgggccaagggcaccatcctccacttccctgggaggaggcacccattagctcccgtggtccctgcaggcagcagcccccacccctcactcacagaggaggaggacagtcagacggagctgctgattgccgaggagaaactgagtcctgagcaggaggggcagctcatgccaaggtaggtgggccgacagcttcagtctcagagggccagagggagggcacgggagctggcatccttcctggcctccttccccccctctggcctaggtacgatgaactcacagagagcgtggaagaatatgtcctggacatgctgcgtgaccagctgaaccggcgccagcccatcgacaacgtgtccaggaacctcctgcggctgctcacggccacctgtggctacaaggaggtacggttgctggctgtgcagcggctggagatgtggctgcagaaccccaaggtacgctgtgttggtgaaagagtttgtgttgggggggttctccttgggggttccgggcggttgtgcttgcgtgctcagtggtcttcctggcttccccgcagttgaccaggccagcgcaggacctgttgatgtctgtgtgcatgaactgcaactcccatgggtcagaagacatggatgtcatctctcacctgatcaagatccgcctcaagcccaaggtgctcctcaaccactatatgctctgcatcaggtacgcggtcagccggggcgtcaggcagtgaggcaggccggtgggcagccggggcagcctgtcccgtccccctcaccggcttgcctcttggtgtccagggaactgctgaacgcgcacaaggacaacctgggtaccactatcaagtttgtgatcttcaatgagctctcgaatgctcgaaaccccaacaacatgcagatcctgtacacagtgctgcagcacagctctgagctggcacccaaggtggggtactcagtgagggacaggcccctgggcttgcgtg

SEQ ID NO: 30772 - DNA, 1181 bp, Mus musculus
cgtaaggtagtaaataggggatactccctaaaaggttaccagaggttcttgccttactgagcatgcgttgaaaatcagtccgagccaggtcagtccttctagtctttattcctgaagagttgggaaaacacttgaatagaaactgtctaaatttacttgttaccaggggcaggatatgcacactgttgttcagatgggagtatgtgtagcctgatacgggtataagggggaggggtgttaaagtgttctgaggctgcgcacattgttttgagagaggtgtgcatatggtatgtgcacgtgaaggaactaggctgccaagtgctttattacaagggtctcccaaaccaaatgggggtcctatgcttcttatgcttgcttgccccaccaatgtccctttctccgtttctctcttgcatttgcctaggaattcttagtcactcaagcgttcactgctgctttctacacccaggggggctgtcgcctgctgttgcttttccttatgtcaccaactcatatactcggagtagtccaggatgtgagggcgatctggctgcgacatctgtcaccccattgatcaccaggattgattcggctgatctggctggctaggcgggtgtccccttcctccctcaccgctccatgtgtgtccctcccgaagctgcgcgttcggtcgaagaggatgaccttccccgaatagaggaggaccggtcttcggtcaagggtatacgagtagctgcgctcccctgctagaacctccaaaacaagctctgagtagtccagtggcttgggagatttttgttgaatctgacgcaaccacataaggtgagcagctcctgagagcttcacctggataataggaatagtgagccaaacaccctacttacatagctggagaagtggtatcacaaagatatgtgcaccaatccaagcacagtggctcatgcaaatgagagattgaatctacaccaaccacagcatagaatgcttcatgcaaatgaaggactgtatctataccaatcacagcacagtgttgcaggcaattgaaggcttgtgtttgcaccaaccaggggcctcccgctgagcttgtaggagaggctgtttccttttggtgtgggtggaaatgtctgcagtgtcaaagggaacttccttgaggtttgtgttggcaaaagtccagtgcaaac

SEQ ID NO: 30773 - DNA, 1207 bp, Mus musculus
cctctgccttgaactttgcctcagtgggcagctcaagcctactgagtgcatgaagcaagccagggcccctgtagctcaggctccactctagtggcaggcaacaagctttccacggggggagcatgtgaggacagacacctgtccaatagccaccgctgactcaactctcttctctcctcctgcaggccacaggaccctcgggctccaagatgcagctgctggagacagagttctcacggtctgtgcctgagctcattgaactgcacttgctgcagcaggacagcatccctgccttcctcagtgcgctcaccatagagctgttcagccgccagacctctatctagcctcttcccatgagcatcttcactacagccgctggacctcggcctagcctgtacctgcagcttctcacatgcagcccccagaccttgagctagctcttggtctacagttgcccacatcatccccagatccctttgccacccatagctgcatcatgtcacaaacactagccgtggcctctgctcaagcagccactgtctcttgtccctggctaggagcaagctactggggatgaccaagccagatcataccccactactctcctccccaccccaccccattctagagccgctccacgtactgtcccaaggtgtaccccagcctccagtcccatgcgctggttgcttaggcttcagtggccagactgtagcctgtgtccacagtctcagactaatgaaataaagtgctacctttatcttccttcccggattgtgtccaaggctccaagctacctctctgtccaggcctcaccacactgtactgtgcttacctggacggccggcaggcctgctcatacacacagcctgagaggcagatggggtgggagtgctcaagtcccatccctctgagccggggtatctcactccctgccttggttccttccctgcctctcccctgccggaggtctctgtgtccagtgggtaaccctcccttgccagctccctgcaaggggccccaccaggcccagccatctgtaccacattcaagtgtcctggttaacaggttttctttagcagaggtggagaggagggggatatgtctggattgtcctgagagacaaggcacctgagtgtaccatacccccttcacatgcctgcaagagaatggaaatgagacagcctgccgggagcactcagacttgggc

SEQ ID NO: 30774 - DNA, 1207 bp, Mus musculus
tgggcgtgttggtttctgatctgagctgctgcactttataaggctgggtgatgaggattcttgagggaatcctgtgctaggtcctttctctcccccatgccccactatcccccaactgccttcaaggccttgttagatgctctgacattccttcttcatctaagtcaaagccctcgttcccattatatgttggtcttggacctgggcaccctctggtactggggaagaaacattcatcctggggcttctccgtatggcctggccatagcatttgatgccggcccctttgagacccagcctcctctgcagctctaacggggctgcttggacctggaatcttgtggtctagcctttgggcttcctcaagccttacccatgtgctcagtatgcaggcagcctcctgcgctcccactcccgcctcactcttccctctagagaagaagagtggcttcaagttggcgcttcaaggaagattgattaaaatcagctgcggttcatcttaattgggaacatatgctcagagagggagctcaactagttaggattttttgtaattagttcacagctggttggcggggaagcaaaactctggtgaccacttagagctgggtgtgtgggcgtgcttgggggttcagtggaggggtcatcacagtggctgaatgcagacttaccaagttgacgcacgccatccttcctgggtttcctgggtcattggctgtttgtaccatgacctgtgtgcattgctagggtagctagggaataggaaacgggtactaaggtgtacttgtctaatggacacacgccaactggctgaatggacggctgacttatgatagacagccctggcagagcttctgggaggttagacactgtggtgcaggcctcgagtctcagcactatagtggctgttccgagtttcagagcctaggctacatggtgagatcctgtggaaagtatgggggcaggtgtctataggaagaccttacttagagatggggaaactaaggctggcacagaggcagatacagggattgccagtctctgtccttagataccttgtgctttccctaaaagcagggacagctgctttattacagagaccccccatgttcctcatagcctcccataaagcctccacatagtgcttctgatgagctaggtcaggacagcttggtgtagagtcaccaaggagaggcctgccaggggc

SEQ ID NO: 30775 - DNA, 1172 bp, Mus musculus
tggcttttctcctcagcctgtggctctgctatttatgctgggtatgcaacctttgctgtctagagtggccatgtattcagacacttgccgcattttcacaggagtcactgagagacagttgtgcccagtcaatcacagaattccctgtccccactagagtcctcctcatactgtagggcccttgaggagcacaaggtctggcagatccagccctttgaggatggaatagtagctggatttagcagtctagaggaggaagccaaccagggggtcctaattcactggagtggggaaccatacaccttctgcctccaccaggtggcagcagacaggctcactgctttctgggcctcaccactggcctggtgggggttaggtcagatgcaggaaaggatggcctggaggagggaataatggggacctgggcacatattgatcagaggcaaggagcaggcaggtgtgagagtcccacagctgagtggtctgttgtggagggagtttggaaggaccttagctttggccaaggctggccttggctttcgacttcccagctatcttggagcttggatttaggaggttactccctccctcagcacgactcctttccattctgttacctgctctgtagagtccagtgtacagctgggtttcctgtgagtctccatttagtgagaagggagatgggcaaacagtcttactttgtcgtagaaggcaagctatacataggccaaaggaagaagaagttgcctctggacaggcagatgtgggctcctggggccttggtgagtcaggaggggtatgtcctgagtcagttctggggatttaaggtgacttatgaggatgactggtaggaaagatccctgccacagtgagccaggaagctgttcctacagaagccatacagcttgctgtttaaagcccagaccctggtcatcaccagcccctgaatgttgtacaaccactttaagcttatctccagctagcttatgaataaatgagactcggactatggttattttatttggctttgacagttactgggggtcaccctaatttactcttctaactgctggcctggctacctctctagtgggataccccagatacttgctgtttctcctgactacgccatggccccatctcctcttatggtggcttcctcttctcctctt

SEQ ID NO: 30776 - DNA, 1206 bp, Mus musculus
gaggcagctggatgtctctgcataatctaggagccatcatcacctgtgccccaagtgtgccatgagtaacacggaggctgggtgtggcttgtgacatgtctgctatcttcctagtctttgtaaatctaaatcagttctgaaaaatacagcctgttactagggaggagaagccagcctggctcttttctggcagaggcttggggttgtgctgtctgctgagggtggagcctcctctgttggaatggtggcttggggaagagggcacatgggctggccacttcctacagtgttgatgcccacccagagacaacctggctttgggcttctaagagtgtgacatcattctgactattttccatgtgcccttgcagcatgtggcctctgaactacatccgggacacagcagctgtatacagagagcactagaccagagccttgtctttggggatgtgcacagtgtaccataggtctctccaaggcagttttccaagcctcatcttctagtctcctgtgacagctaggaggccagcagtgggttgcaggccaaggatttacctctgtatgggctgtgagaagcctccagcagcaggctgggcatctgtggatgtcgcaggtgtcagtcctagtcagatgggatgctttgtctagtttgtatacagcctttgacattgtgttatgatgccattatctacaaatttcaggtttgcagtagagttataaaattcccccaccccaatgcacaaatgtcataattttgaagtaagtttgtgatttgtattgggttgtattcatagctgtcttgtggtgcacatggcctgtggctggacaagcacagatgctgactcatgggttaaggttcctactggtagctccctctcacccccacagtagctgatacccttgggcctcacaccaagacatttgcctcttccaagatgtggcctcaacctttatgtttgatcccaatgccacataagccagatgtggtagttcatacttataatcccagcacttgggagatagaagcaggaggatcagaagtttaaggacatccttagctgcaaagtgaactggaggttagcttggactgcttgaggccctgtttgaaaaataagcaagcaaacaaagaaaacaaccaaaaagaagtatggaagccatttggaaagcccgtcacccttccccgagatggaactgaacacacagccg

SEQ ID NO: 30777 - DNA, 1139 bp, Mus musculus
tcaggatcttagggatctaacccaagataccaaattctcttcttttacttcatgctttctgcctcaccatggactaaatcattcctttcttcactgtttttttttgtttttgttttttcctttgccatggccagttaggcagcagtacctcagctctggagagcttggacctgtagtccatgtttgccataccagctgacatctagttagcctgctgcaggtaccagaggatgtgcaggaccctgtgcttgcctggctcacctgcaggcttcccatctgcttccttccacacacccttcctcctgcacaccatctactcaggtctgtgatgtctattgtacttaaaataccagcccctgcaggcaaccccacccagtgctttctcctcactcagagaccagtatgtatcctgaaatctcagaaggtatttgctgcggcctgtttgctttatgtgagctgttccttcccctgcagtcacctggttggtgatttatgcctgttttgcagccaggaggaactcagcctgttgatcattgtgctcagggcttcactgaagctctgcaaatgatgctccggagcgccctctctctgctttgctctgaactgcaatttatagtctaaccttgtcctgttggaaacctgggaacctattctgtctgggaactgaccttgggatctgctgtggcctgcaatcctgcctgttgtctggcatcttctatagaccaggcattcctcgatatctgcttctggcctccacagtggatgaaatgtgttttgttcttaagcgagaggatgggggggctggtgagatggctcagtgggtaagagcacccgactgctcttccgaaggtccagagttcaaatcccagcaaccacatggtggctcacaaccatccttaacaagatctgactcctcttctggtgtgtctgaagacagctacagtgtacttacatataataaataaataaatcttttaaaaaaagagagagagagaggatggggactgagaagatgactcaccgagtaaaacacctgctacacaagcatttggacctaaattcaggtctccataaccctcatagagctgggcacagtgctgtgtttctattagacagaggcaggcagatttcaggggctc

SEQ ID NO: 30778 - DNA, 1177 bp, Mus musculus
actatagggctaatttattggcctgtcatctatttacttatcatttattgtccctgtcatctatttctggggccataactctgtctctggaaggtccctgttaattcttcactcactggacaagcagatttctgtaattttctttcagtttttagagactccctggtgggctgggaggaagcatggacatgctgaccccttcttgcccagtgcacatggtgtagggactgaaggtgactgctcagatgcctccggtttggggatccacattttgcacatttcctcttaacatagaggtagcgattgggaacctataggcacctggtggcttagttcctgacctgagatgttttaggtcagtgctgcaggctatgccaggcattgtgcccagcagccaggaggggcaagcatcttctagttttcctggtgcacacacagtggcttcgcagaggtgactcagcggcttaggtctgcattgactcatccgcaaacttcaaggttggaaatcatttgtgttagcaggttttgatctgtgttcctcagccctccaaggataaagaggtgctgtaggtttgaagaaaaatttactaatttttttttagcttcatgaaagagatgaattacaaaaaattcaccgtgtacatggaaattccattataatctgtaggagacgaccgctattggtacgcgtcagactgctttgggctgtcaccacaaaggctctgaagtgtctgtgtgacacctctcctcaagtgttactgaattggggttctattggtgtgtttgggcttgtcacagttgtgctctagttagggctcctaatttgcaagcttgtctttcctcaggggcctgcagccaggtggctgaggttgcagtgctggcagatgtgcgagtgaggaggggctgtctttctgcttggcatctgctcctgagagtctcctctaatgtccctcacctcatcacaagtgccctcccctccctggccaggctcctcccaacactggcatgttggtgattagggcttcacactgatcctcagttctcacagagatgtcacctacttcagaaatgcccttggccatggagccctagatgtcctagagctagctctgtagtccaggctggcctcaaactcacagagatctgcctgcctctgcctttggggaattaacagcat

SEQ ID NO: 30779 - DNA, 1319 bp, Mus musculus
gggcctacagacattctgggaggagcatttgaagccaggcggaggtctgatgcaagggggaggtgagtgtgcagtgcttggagctttggaggacatctttcacttcagtgcgatccttggagctctggtccagggcctgtcaaggtccacagtggatgaaggctcagggtctttttgtgttgggtttggagggtgggagtgaggaggggttgtggggaagcactggaggtgggcatccctgttgggtgcccaggcctcaggctgtcaggccgcaggctccacctggatgtgagccgtttcctttaccagcccgctcaccagcctctgtgctctagtgctctgggtcccccacgcctgcaatagagcctgccttttctcacatagtctttccctgactggactgtgggtgcctgactccaaacttgaggttccactcctagggttcagaggaaccaagggtccccctacccttctgggtatcgtgctgtctgagcctgtgttgtgccccagccacgcttggggctgccagaaagacagagaagcacaagaggcaccggatctcccgcctgcttgtccctttccctggcctgagtggggcccagcggtagccttaactggacagtcctggggccatcagagtgggagtgaagggaaggggttttttttggtgctccctacttggtgttagccaccctggttgaagaagctagacagggcagtgggtctctgggctaagggagtcaagctggtgctatgggattcggctcgatgaatgaagcactttatggactgcggggatcagttactgccacacccaataaactggaagtgtttacagatggtttccacgctgcagtttctctccataaccccacaaacaccatcagatgtgtcttggaaactgagtcttaagttgggatgggcagctgcccctaccctggtggtccctgtggggggagtgttgtatggtagcttcctggatatagaagcatagcttcctggtgtagggaggcttctcagactcagaaaatctgttaagtttacaagtctcagaaatccgaaaagtacacagggcacaagtggtgcctgaagtgtcggttgctgagggaggagactgacctgttgagtgctcctcatgatacagaactcgagggctgtatctccagttctcacccatgctgtgggccttgtatgaggaattctactcctgtgagctaagctacactcctgtaaggaaccccagaaaactcactggccttagcagaattatttctttggtctttggagccagatcagttgagttcatttcctattgctat

SEQ ID NO: 30780 - DNA, 1198 bp, Mus musculus
ctgtgtggggctcagctctgaaccagagtgtgtatgtaaccgtttgtctctcttaattacactaatttgtgtgtgtgtgtgtgtgtgtgtgtgtgtgcacgcacacacgcacacacactttgaggtcagagaacaacttgcaggagtcagtccttgctttccaccatgtgggtcctggaactcaaactccgatcatcaggcttggcagcaagtgcctttacccatgaagccatcttgctcttttcccgactctttgctctttctgaataggaaaagccagtcctcccaagggccctgatggcccagtccctgtcagcgtgaacccttcttactgcctctgctgtccccttggcatgggaggtgggagctgtgagaaggtgtccggtcctccgggctctgggtccctttcgggtttgctgcagtaggtgagcgtgcctctctctctccctgaaggacctgtgtgagcggcacgagaagggcgtgcttcacaaacaccagcgggcactgcacaagtacggcctgatgaagaggcagatgatgagtgcagcgcacggccgagaacctgagtctgtggagcagctggagtcacgaatcgtggaggtgagcagcaggcaggtatcggggagcagctgtgggctgcagggggagtggcatctggagttgctctgagctcagaattgtggggatccagatcagggctgcggtgtgggagaggtgggagctgtcccaggggctcagcgctgtttccctggccttggatttgcttggtgctcactcctgagcatgtgaggacaggagccagtgcccgagctcaaagcagatgatctgtaccacatctaaggggcctgtgcacagattgctctctgcttgcagcaggagaacgtgatccagactatggaactccgaaactacttctccctctactgcctgcaccaggagacgcagctcgtccacgtctacctgcctctcacctcgcacatcctgggggccttcgtgaactcccagatccaagggcacaaggaggtgagccacccctgcccccactgttactaatgccagcctgtgttcaggtgcctggcctgtcacctgtagccagtgacctccagaatggagctgatacccattggcctgaacagttcctagttctccagcctcttgtgtggccagaatggtgacgctgaagactcgtgagtgggat

SEQ ID NO: 30781 - DNA, 1237 bp, Mus musculus
agatctcaaaaagtaaaaagagggctgggggtgtggctcagtggtagagcccctacctagagtcccccagggaggggctggggcgtggctcagtggcagtgtagaggatttgtgtagttgctgatgtcctgcctgctatgccccttttgttttatagcgcttcaagtcctccgtgtacagacgctacaatgacttcgtggtcttccatgaagtgctgcttcacaagttcccgtaccgcatggttccagctcttccgcccaagagagtgctgggaggtaaggcagggttcagggaggcccggcacagtgaaagcaagctgcactcctggttgccaggtgggcccgttgtagcccaggctgctgcagcttgtggtctcagaggggctcatgtacatggtcctgctggggtcggagctctggcttagccctgccatggtagaggagggtggccagactcaggtgccttctgaccccagtgttgcccctgctgggtgctttgggctatgcttgggattactaggatcaggccagccatcacaggatctttcttatcaactacaaatgaccccagaaccccaatgaaacttgatcaactgtgttgctgtaacaaaacatcagacaaaagcggctaaggaaggaaggtgcagctgtcatggggaaggcagggctacaggagtggtctgaggcagctgctgacattgcatccacagtcaggaggagagagaagagctcagctctttttctgctttcttccttgctggacctcagaccgaggagtggagctggccacctttagggtgtgtcttcctacttcagttaatcgaatctagaaactcactcacaaacatccccaggactggagattctagatcttatgaagttgacaatcggtataacccattaagtgggcagcctaattaatcctggtggcgtcatgagttccagaccagtctagcctacatcagacaaggtgcagagcccgccagctcactttcctggtgtccccaaccttctagtgcaagtgaacatgcacagtgggggagcttggttgggctttaagtagagatacagctgcctaccgtcctgaagctcctcactgtggctatagacgcgacacggttccatcctacttccgctgggcggctcagctgctgatgactgcccctgggacagctctgctccccactgacaaggaatgttgcacgcagtgggaattggaagataaactattaggaagg

SEQ ID NO: 30782 - DNA, 1124 bp, Mus musculus
gtgtgtctagtgcccatggaggccattggatggctctcttagaactggagtttgaattagaattggttgtaagtactgggaagaaaatgggtcagtctactgcaagatgagtatttaaagaatatttgaacccgtttaattcacagattccagtatgtatattatttccagaattggggattataggagtcaggggatgctggctggtgtgactgcaaggccagcctgccttcaacaagtctgctaggagcccagtgggtcccgtccagtgtatgcagggaaagggagagtaatgagaatctggcccttaatggttggaactcttaaggccatctggctttgggcatcagggtgtcacagtgtcatcagggtgagaagagaaacagccttttggtttctaccaggaggagcagtgtggaatcctcacatcagtatatgcctcctattctgttactgataatgaacaagttgttttctctagtgtgctgtgcatgccagcagttcagtacttggaaggtagaggtttgaggttagcccttgctacatagagggtgcagagccagcccgaggtacttgggaccctatatcacaagacagatagaagggggctgaagagatggctcaacacttgctgttcttccagagcacctgggtttgattcccagctcctgcatgatggctcacaagtctctgtaactcaggagtgatcatgtggtacacatatacacaaaaaacatttatacatgtcacaataaagtgtaaaaaacccaagcaaatggaaagaagcagtgtgttgcgttctgaggatattttgctctgcgcttctcaggagaagcagatggttagttacaggctaggagcactttgagctcctgggaaggagtctagtctgtatggaagctgggcttttctttattgtgtcttgttaagtttagatccagcttagcaggctgtttaattgtatggtaagcaggcttttaaaggaacccggagtttctgtagtgaaggtgtgtggcatggctgtgttgaaaatctgcctcttacctcctcactccttgcctgctcttgattctggcatctttgaaatgtgtcttaattaagtttcttttgctgtgacaaaagcc

SEQ ID NO: 30783 - DNA, 1184 bp, Mus musculus
tgaaaaaaaatgacagtaatagtggctagagatttgtgcaattagccattcttttaagtttgtcttagagcagtattggagattgaacccagggctactcctgtgcttaggttggggtgctgcctttatgttatatctgtggccctttgtattttacatctttaaggttattgtttttgtgtgaagtatggacaaggctatggaggtcagaggataactttcaggaatgggttcttcccatctggttaaggacgggtcaagctgactttgaactcagagccacaagcatctttctccaccttcaaagtgatgggcttacatgtttgcaacaactggatacatttagagaacacttcccatcaaaaggagtgcaagggtcagccttccttgtagaagccaagtcctgatttctttgttcatgtgaaagcacttggagtagatgcctcttaggaatgagcagcctgctgactaatgaatgagtgcttcttggcttaaatagaaactccttgacatttcttttaccccttcagaactacttggtgatgtactcaaagatcggcctcaggaagcggacgggattgactcggtgattgttgtagacaacgtccctcaggtggggccagaccgacttgagaaactcaaaaatgtcatccacaagatcttctccaagtttgggaaaatcataaatgactattaccctgaggaggacggaaagacgaaagggtgagcgcgctagttgctgaagcagcagttgaggacttgggggtttgcgtgttcaggccaccccagcgggaagcgctctagtgaagtgttggttctcaggttccagagctgagccccacagaagcagcagactatgcgagcataggtcctagatcaggatcccgctggcctgagagtgggcagaggcgggcaggcctgcctgtgggatgtctctgggagtgcttttgaaaacattttaacttctctgaagcagaggtgagaccttatagcactgcttacttagcacctaagtcctgggtgcggcctaaagtgtgacctgcagtttgctctttctcgtcaaagttaggtcttccatgcttgagtctaggcggccattgtgttgtggtactgagtacgactgtaggcttaggccctctgtgaaggcctggggcttctctgtctcccaggaccgaggttcatga

SEQ ID NO: 30784 - DNA, 1142 bp, Mus musculus
cctcctttgacatatgtgcatcactgggctgtcacaaggaaatgaccatttctgttaaacttttctgtcatttataatcatgaagtcagtcttgatctattaagatttttttctcccttccccccctttttaatgctgctaatgactgtcatttattactgatacagccgtcagggtaaatagagaaaataaaatggaaggtagcttgagaagtccgaatagtagagtatagaaaaccttaagattcctcagggagctgcttggccgtgtcactgctctgcattactgtcctcagcgtgactgccttggagacgtggtaggacggttagccgccccgtctgttcatgtagagagaaaggcctcagtgtacagacagtaagtctgaaggatgcatgtgtacaagccgctcactttctccttcaggtacatctttctggagtacgcttctcccgcccatgctgtggatgctgtgaaaaacgccgatggctacaagctggacaagcagcacacgttccgggtcaacctcttcaccgactttgacaagtgagttggagtctgagatctgtggctggtgcctgtgggtgctgggaaggccctcagtgggtgctggtggtctttcaggtgattggtttctgttggccaggcgagagagaacattttatggttttgctttgagtttggggtgggtggagagcgtgtggagctgcctgcctatgcatcctctcgtcccacacagcggtggaactcagcagtgcccattctgttccaggtacatgacgatcagcgatgagtgggacattccagagaagcagcctttcaaagacctggtatgttttaccaaacatctgcctttgtagtcaaaagacattttgtaactgaggtaaaaaaggtatccatatctattgaacttgtcatttgtcattaactaagatagttatcagtaacctttctttgattaaaattaatgcgatgtactaagtcccttgattttgattggttttagggcaatttgcgttactggctggaagaggcagagtgtagagatcagtacagtgtgatttttgagagcggagaccggacgtccatcttctggaatgacgtcaaggacccagtctcaattgaagaaagagcggtgtgtacca

SEQ ID NO: 30785 - DNA, 1472 bp, Mus musculus
tcctctgggaagtcaggagtgatctcagcactgtggtaagatctgtgaacaagaaactaggaatgagggtctgctgacgagccctggctgcttgttagaccaccacatagaggacatcccaggagggtggcagtgctgctgctagtgggtgctagggagcttggggagaagcagaggcgggcatggccatctccagaggtcagggacagcactgtcaccatgttgatattgttggtgcaggacggagtgcctacctgcctgcctgcctgcctgcctgcctgcctgcctgcctgcctgcctgcatgtggtattgcttggtactgggctccttcaggaaccatgagagagagggtggggggggagagggcgagcgtgagcgctaagcctctcatggcatggagcctgctcagtgaagagtccggctgtgctcccttgctttgtgtctgactaaatggtggttcatctgttgcagtgtcaccgtgccgtgcccaggatccgaggccacccttcacggcgagcctcgtgctgggctcttacctgtgctttcttgctctggactgcgagtgcacccagggttcttctatcccgacacagctctgtgccttcagccccaggtccacagcggggacactcgagcctctgctctcaccttgccctgtttgggtttttatcagccgtgtctgcattggagcctcactgcagtgttcctggtggctcctcttaactcctgctgctgtccatggggtttccagagccttcacctacagctcagtggggtttccattcacggacttgctgttcctgtgggccagtgtcgtgtggcctggagaccatcaggagtctgcacacccaccacttacttgtgccagaaactctggaggcacccacacctcccacctgttcaggttgtggcagcctctgtgcaggttggatgtggaaataaaagcaaccctgtgtgagaatgctgtcctgatctctttgtagctcagagtggccttgaggcctgcccagtccctctccctagggtaagggtacttgcatactgctcctggattattgctaagaacctacctgtctggaacctctctggatacattggacaggttggaaagcggattacacagggttagccacttgacatgcacctctgtagttacctagtatccagtagaaaagacagcaaacagtgatagatgagcttcacccaaggatgcgactggccaagggttgctgctcaccctgcatctcactgcctcagcatctcctgaccaggtagcccccccagcatggcctgcagccatgctacgtctgtagagcatgtacctctagcagaggactgactggtttgcatgtggagcagaagagatcagtgccttcatgcttcactgggcggtggctcacctgtcctcctgtgtcttggttccttactctttgacctctctgaagttggatcatggttgcaggcctcttca

SEQ ID NO: 30786 - DNA, 1144 bp, Mus musculus
cagcccacgcagaccagtctttactctgtcccaacaggttccgctctgtccattgccacctgtacccagacacaccctggtgtcctcgctccgccatcttctagcagtcgtggttgaaactctgtccctgggcgcccctggtatccaaagggcccagggacctttattgtatgccctggccttggtgtccgaggctcttcagggctatgtgtatgtgtgtgtatgtctatatttgtgtgtttgtgtggcgtgcccacccgtgttgcagactgctgggcagtcgtgttcttcagggagtggcaggtctgtccctaactacactctgagcaccactccgagggcagttgtgtgggatctgtgtttggatctctgcagtgggggtgggtgaggccttggggctccactcaggggtccgtgggtgctgattgtagcagtctcttatgttggggtgctagcacctatctggagccttccctgtcagctgagctgtgcccagtcctagggaagctgatttgggtagtaaaggcctggaccccttgtgagctctggcccgggcgctgcctggtgccattctggtgaacaatgctcccccaccccctgccctccagggtggaggcgaagtcttcagccccaccctctgatgccctatctttgtctcccacaccaagtggggttcagagctatgaattttatctcctctccaaagtagagagaaagtcgcccatagtgggtgtgcctgtacatattgtgacagtatttttttactgtgctctttcttgaaaggggaggggtgggtgtgaaaggaggtggggggtggttgttttctggggtgggctggagagggtcttattttatcttttctgtggatcagaaaaaagtggaagccagacaggcttggtctttggaaagctggacaatgagtgccttagtactgtatttatgccttccagtatctggaatcctgctcccccccaaccctccccagcaccccaagacttacctcacccccaccacccccaactcctcactcccctacccctgggctgtattctgtgttctttttgcaaagaccttaactaggcaagctaatgatgataagggaaaagctctcagggaattgatgtgttgttgctatggtgacgtc

SEQ ID NO: 30787 - DNA, 3204 bp, Mus musculus
tccagcggcagcgggcactagaccgcacaccggccagccatctgcccccacgtgccaatgccccacccttcctatgccagcaccgctgcttccgccctgctggaccttccacaagccacaccgggccagccctaggcacacctgaaggcccccccgctatacccaccctgcaggaggcatggaggtgcccagcatgagctccgggccagcctgtgaagtgaggcttctggggtgctcacctggacagtcgctgccaccagcaacctgaccctgcctgcctccgtctcccctgcccttctgtcctcttgggctccctgagccctgctctgtgccgggtgcttccaccctgcctgcgttccttctacaggtgacccttcatgctgccccttgcactctgggcgtccccctccccacagctacagcgagcctttcctggtactgccctaccgccacactcctgagaatcccatctccattcacaggcaggggaccctgtgcctggcgcccacctgctcatcaccgaacggccccttcatactctctggtctttgcaacgtccggcgcctgccttcccttagccacctggcttacttggctcttcctgttggttctgagctgcctctagggtggggctcttcttacacctcctccccacatgactcttccctcagtgcccagccagccctccccagacagcaggtgccaagctgagcccaggtcactccctggcctctcagtgctggccaccttcttggtgccaaaccctctttcccattcattcctgaagagtggcagctttgtcttcccctttgtttttgcactgaccacacttgtcatctccagggcagtctgggacataggcgacgcaggacactgcccactttcctctcggtttcattctcacccaggacaagcggcagtgccctctggagcccagccttgggggctggacctgtgacggctgtgaatgtgcccccagcctcagaaggccccccccaccccccgctgggactaaccactaacctcactctcagctgccatgggcactcctggctgaccctgagccagcaagcgtgaccctaagtctagcctggagccagggctagagtggtcatttctttgtggggtgctgccagggaggggccagacccacaggctactcaaagggcctagagacccctccccaggcaggtgctgccccaggaggagcatgtcctggggtccggggactgaagtccatgtggcctcagccccccacacccagaacaccgcttgcctaaggtgcttttggctttagtgtgtgatgtttgctgtgcttctgggctgaattagcttccaaatcaggacctggagcctctaccctggcccagccagccagtgtgagctctggtctgtgagatgggcagctacgggccagtggagcagcatgtggtgggaggggcaaggctgggacccagtggtttacagacctgtggccctcctggagcaacctggcagctacggatcccagaaccccctgggcttcagctcccccagaggggagaggctccacgttgctttccttccccaaaatccctttctttgtgctggtgtctgggaccaaaaggagtgggcagaggactcggagggcctaggggtcccagtcggggcatctgtagctcctaagcacgacaacatcagtgcaggggaccctggccttgactccaactggcctggcgccaggaacctccagggccagagcagcccagctgcagccagcctgcccactatgggtatgttcctggcctaaggtccggagggaggtttggggtatccctgcctgggtgcctgggtgtgccctggggcctctcagaagcacaaatgctgccccctggccgtgagcaggccacaaggtgaatgtatatagcatgagaggcgggcactgcccggacgtggctgtgaacttgtgctgtctcgggagtcctgaccttctgtgcgtgagtgcccccatctgtgacgtttcactcaccgaggctgaagaaaggaagcaggggaaatgaaagcaggggtttctcgccctgacccctgcggaggagacggctcctaccactgcggttggcttcatttcgttttcctgatttctggggtgccacttacctactcaatcccagtggtccacccccacatccccagggagtgagcagtccagtgccagctgcctgtgattggtccccagtccctattacccaaggggaccctacagctctggtgggtaacaaggagggctaagccaccaaaccagagcccgatcccttgccgagccaggaggagggatctggctgagaaaactgataggactggaggcccccaccccaaccaacactctctggtttatgtgagtagcagaagatcccggcctggagcatccttcaagcccttctccctgtgcccaccccgcccccccccccccccatatcactatgcaattcttgaccccagctccaaagcttgccctacccggtcccagctctgtccggcccagaaggtggctagctggtgggccacaggtgaccagggtctctttgtttttcatcacagcggtggtgtgccgcacccttcctcccatatgtgattttgtgagattgcctcccagttacggtccctctgcctgcatctgcccccagtggactatgtcatctgaatcgagccagccccaagttcccctccagcctctgtagggccatggctgtgtgttactgttgctgtgctttcattttttaaactgggtttggggtttgatttttatttctgtggggaactttatttttcttggcaaataactaaagttcttgtccatgtaatttctgtggtctctattcagcttgggtttcatgttttaaaataaacaattttaagaaacagctctctctctctctctctctctctctctctctctctctctctctctctctctctcattctcatcatgaacactgtacacagagtagctcaggctagggacacagggttgctgaatgaggtctgtgggagcaattggctgggaaggagccgtagagtgacactatctagtattcatttcgactgaattgctctagctgctgagtcaggaagggatgaaggacgtatagaagccaaggaccaatcagaaagctctgtactaaagcatggctccagggaggggctggggctgtggctcagtggtag

SEQ ID NO: 30788 - DNA, 1982 bp, Mus musculus
gtcccattctaggtcctaaagaaggccttccaggccacactcagatggctccagaacccacacaagacccccagcagctctgatctcagctccgacgccctgctgtttctcggaggtaaccctagctccttgcagagctgtatcaagttggagctgtggggcagggggcagctgggagctgggcagggtgtccctcagggaaggcagagtgtgactctagaggccactgacctccccttcctggtacagagctgttccccatactacagaagcgcctatgcagcccatgttgggaggtgagggactctgccctggagttcctgacgcatctgatccgacactggggaggtgagcaccctggggacaggagtgtgtatgttgtgtctatgtgtcctgctggctttggggctctcactacctgagtggcctttgatcacatctgtgtggcatttgaccccccccagggcaggctgacttcagagaggcactgcgttcctcagaagtacccacacttgccctccagcttctccaagacccagagagttacgtccgagcaagtgccgtgggtgccgctgggcagctctccagccagggtctgcaggccgctcccgctagccccgagaactcgcaggcccaacaggtagacacagggagttggtgagcagctagccaaatctgtagcaactgcttctgagagggggaccaccaaggagtggggggcagtcgggcatagtgcctgtgctctttctgacaccccaccctgataagcaagggcagggctggaggaactcagaacacatcgtgttgagggaccagagcagcacatggcccgtgctatggctgagtacttacgtctcctgggttccgtccttggctcgtcactgtattagttggatttcttgctgctgaatcagaattcctgaagaaagcaggttaaggaagtgagttcgttagggctcatagtttgagggtgccatcctcctggttgggtgagccgtagtggtaggagcttgaggcagctgtagtcagggtgcagagagatggacgctggcacctggctcacgttctcctttctattcagtgtgagaccccagccgttctgtgccttagccttccctagatgctctatcacggtcactcagagggcggtctcatagctgcattggatccttgacaagttatcagggtcgggccgacttttttggaattctccaacctgcagggcctactcatggaccttatgcatatcctgtccactgactcagagggcttccctcgaagggctgtgttacgggtcttcacggactggctgagggatggccatgctgacgtggttcgagacacggagtggttcgtggccactgttctccaggcagtgagccgggatctggactgggaggtccgagtgcagggtttggagctggcacgggtgttcctcacccaggcactgggccagcccagcctccactgtccctatacagtgggcctgcccagggcctcctctccccgcccacacccggaattcttgcagactctctgccgtctgccgctctttgagtttgccttttgtgccttgcttgactgtgaccgaccggtggcccaaaaggcctgtgacctgctcctcttcttgagggacaagacagttccctgcagtagccctcgggaggcaggggacagccccaactcagcctcagtggaggctgccctgcagaggtggcgggaaggagagcaggcccagcccctaggggacctggatcctgaggccatgctagccatcctcagggccttagacctggagggcctgcagggcaggctggccaagagcagcgaccatgtggagaagagcccacagtccctgctgcaggacatgctggccacggtgggtgtgttggaggagaacgaagctgactgctactaaggcgtgtccacgtcctgtccctgtttccatcctgtgccagcaggaggaccccagcccaggtcag

SEQ ID NO: 30789 - DNA, 1982 bp, Mus musculus; identical to SEQ ID NO: 30788

SEQ ID NO: 30790 - DNA, 3358 bp, Mus musculus
gaagctagaaaaacaaacgatatttatgatacagaaacaaatgaagaggatttttaatttcttctagtgaagaagactggatgagattttacatgagacccagctgaaggttctgaccatcctgtctcaagcttgtattcattaagaaatgaggtgttcagtcctgctattttgttgcaagatggatttaaagttctgtcagtgagactcgctttttgcttttggttaaatgttcttgcacgggtccctgtgtctttgccctgcagtctgtctctctgccagcttccctgtgctcatccttcctggtttccttccttctcaaatgtctcccttcctcatgttttccagaactacttccccagtaagcaagacatcctgctggctagaaaggccaccaagggaatcgtggaacatgacttcgttataaagaaaatcccatttaagatggtggatgtgggcggccagaggtcacagcgccagaagtggttccagtgcttcgacggcatcacatctatcctgttcatggtgtcctcgagcgagtatgaccaggtcctcatggaggacaggcgcaccaaccggctggtggagtccatgaacatcttcgagaccatcgtcaacaacaagctcttcttcaacgtctccatcatcctcttcctcaacaagatggacctcctggtggagaaggtgaagtctgtgagcattaagaagcacttcccagatttcaagggcgacccgcaccggctggaggacgtccagcgctacctggtgcagtgcttcgacaggaagcgcaggaaccgcagcaagcccctgttccaccacttcaccaccgccatagacaccgagaacatccgcttcgtgtttcatgctgtgaaggacacgatcctgcaggagaacctgaaagacatcatgctgcagtgagagacagcccctccctctgctgtcctctcggcctctggggctgtggccgcccacgtggttctggtgtgtctgccgcctgcatggacctgcagtgggcatctcgaatccacaccatctaatacctggctcaagagtgctggactaccagccacaccagcgagctccgggcaagaggacgcgggagtgtcagtgatagctactgaatcggggactgtgagactactgaatccacaccatcactctgctgttgatctgtaaaacctggggacacagctttcgcctctctacagaaactcttccttgttgacacagttaaccaaggttcaggtgtacgcagacacacgcgtgctctcattaatgacagaaacccaaccccagctggccttgcagccggctctcccctctgccgtgcaggttctcactgagtcacactaactcgggagcttggcctcacactaggctgtaaagagcatgcgatgctgctaagctcaccgtgtccaagcccaggcctcagtgccacctcccagagtgaacacacagccttagcatcgtgccagcaccctccgagtctcgcaaaggcgcaggcggggtcaggtgtccacactccccacggtagagaaggaacctgctttagtgcccaggagacactcaccgtgtctccatgcccatcgggccacagtgtgcaaaggtggccccgtgcagctctggctagcctgtgtacacgtagtggtgctctctactccttcacccgtccctccacagcccatggcagagacacataaccaagtggccttgtaggttgccttacttgacagttggtggcatgtagcatcccctgtgctgggctctgaaggtggaccagagatgctctgcagctcaagagcatcttcttgcctcgactgcttggtgggccccagccagcagccttcaggagcagccctgggctctgcacaccaccctcaccattgccttcacacagtgcgctctgatctcagggtagctggcaggccacatagtcgctgtgcacgcaaagccagccggcaccctgctagccctggtccatgagggtgcagaaggccgggacatcagcacaacctgctaagccctggccagcctactggcaggcgtcgcactgttttacagtatattgcattccagacctgcccctctgtacattagtgactttctgggagctggggtgtggctcacaacttcccccgagtgttctttggctcactaacacctctaagggccctgtctgcaaccaaactgctcctgacacttgatccctgttgcatcctggtcttggctcatttcagccaccagacatgtaggatttgtggagtagatgctaggccaggagacagggtgggaccgcttcttagagccctcgttattgcagtgctctgactgggaaatagccgtcagcctctcgctcacttgttcttgctctctgtgctcagtggtgtgtatcagtgcttgctgggcttctggctctttcctgtggagagagagcagccgttctgcctgcctcaccaagtcttcacaagccgaggggatgtggccaggttaggaccagcggccagcaacctttcagggctccctcaccaggtgccctgtggatctgtcagtgctgagaccccaaacagacacaacctgttcccagccgctgctgggggccactgtgaccaaggtgagtgtggggttgccaggagagcgctgtccctctgacagactgaccgtttgtaccagtcactttgaaaaccagaaggcagcatgtgagtagcaagatgtgaacttgagctagctgagcagaacgcaggtggatgggcagaggcccaccaccctggcgagctgagcctggctgtgtcctttctgctgggacacccctcctctgtggtctgtgaagtggtgcaatcggaagaccaggctggagtcatttacaagtttctccacgtagattgtagtcaggtttctcccagaccttaggcgtttgtatttttttttttaattttaatttcactgttacccttgactattgtcctttctgttgcagtgatggagaagcaggaggtgtttgtgcctcatctattactgcaaaaaaaattaaataaatgtaacaataaatgtgataaaaaccagtctgcttcatgcctagcatgttagagagtgggcacggggtggggcgttgtgaaatgcactcttctctcctctgtacagagattatttcacagttcctgacccgctctgtgatgtcacaggtcactaggattatttcacagtttctgacccgctctgtgatgtcacaggtcactaggattatttcacagttcctgacccgctctgtgatgtcacaggtcactaggatttctagtcctctgatttccctactttgagaagataaaaaaataataacaaaaaaatctgaggagatccctcg

SEQ ID NO: 30791 - DNA, 1134 bp, Mus musculus
ccaaatggcggatgacgccggtgcagcgggagggcccggaggacccgggggcccaggattaggaggccgcggcggcttccgtggaggattcggcagcggtcttaggggccgcggtcgtggccgaggccgtggccgtggtcgaggccgtggggctcgtggaggtaaagctgaagacaaggagtggatccccgtcaccaagctgggccacctggttaaggacatgaagatcaagtccttggaggagatctacctgttctccctgcctattaaggagtctgagatcattgacttcttcctgggtgcgtccctaaaggatgagattctgaaaatcatgccagtgcagaagcagactctgggctggccagcagacctggttcaaggcttttgtcgcgattggggactacaatggtcacgttggtcttggtgttaagtgctccaaggaggttgccactgccatccgaggagccatcatcttggccatcgtctctgtgcagagaggctactcggggaacaagattggcaagccccacactgttccatgcaaggtgataggccgctgtggctctgtgctggtgcgtctcatccctgcccccagaggcactggcattgtctctgctcctgtgcccaagaagctcctgatgatggccggtatagatgactgctacacttcagccagaggctgcactgccaccctgggcaactttgctaaggccacctttgatgccatctccaagacttacagctacctgacccccgacctctggaaagagactgtcttccaccaagtctccttatcaggaattcatggatcatcttgtgaaaacccacaccagagtctctgttcagaggacccaggctccagctgtggctactgcataagggtttttacatgagaaaaataaaagaattaagtctgctgaaaaaaaaaagactttaaaagaaagaggagaaataagtataaaacaagatatatgaagtcacttgaactcacctgttaatgactgagcttccagtaaagaacaggcgctaagaaagacaacctctggtctcaaggagcagatatcaaaacaggtgggtttgtgaatcttcacagaacaagaatcagggacctgtgaatgagactgtacctgcact

SEQ ID NO: 30792 - DNA, 1179 bp, Mus musculus
cttcaagctgggttttgttacactgccatcagcatggcgtaacaagcccaccgagtcttgggtgacttccttagatctgtggagtcctgtgctgctcgctagccaaaagttcttcatacaacagcaagagttggggaatgccatctgggcacagaggagcaaggactctgaagtgccccgtttaaaaccaaggttagatgctccccggtgccttttgttctgtgctcctccttcacactcactctaccttctgagagttcattttcgtctcacagttgctatttttccttcccatgtcctttttttttttttttcatctgacagtctttcttcatttatgaaaaaaagcagcagccattgagcccaaactagatccaacttaggcttttcaaacattgacttcccaaaactcgcgtgtatttccagcatcttgcctggttttgttaagtatttgaggtccacggttccacttgggtcttgaattctatcccctgtcttcccgaggaacatgtgatgtgaactcttgaatactcaacctgtttccttcgcggaggcgattctatcatgtccgggactctttgggtggcggaggagccatgcccttcccagccttccctctcttgtcacagttctcatctagagcagaacctccagaaggtgtggtctccatcctctctaccctcccccacacttgtctgttcctaacctggtttctgcttcctttgttttatcacggttgctcctcagcaatgacctctgtgaaatcagccccagaagaggctcctgcctctgaccggctcagtagactccccagttctgaactcttactgcttgtgaaatgcttatagcaagtctctcttagtctttcttcccaacagacctgagttctcagtctctccatcagtgtgtatctgtgtctgtctcctggttctccttccagagactgaataccatcatccaccttccattaagtatcagggtttcccaagcttagagttttggtgggttctattcttattctattattcttattcttatcctaggctatctatagaaatcatttgaattgttttggttttatatctgtgactcaagaaattatatgatacccatcctatctaccaaccctcatcttgatggccctctgtatgtattttggaggcatctcaaatgtgaagt

SEQ ID NO: 30793 - DNA, 1161 bp, Mus musculus
gaggcagacactggtggtttcagtgaagtgacccctagcatgttgggcatctgaacacttggtcctcagtcggtggcattttgggggaaggcttaggaggtttggctaaaggaagtatgtcactggggcaggctgtgaggctttaaaagccatgagccattcccagtgatctctctgcttcctgttttcggtttgcgataggagctactcagctgtccctgccagtgcatctgcctgctgtcatgattccctactgtggtgggttcttatcttcttatttttccaaaagttgccttgattgtgtggtactttagcacagcaatacaatcctaagacagacaccgttgtctaaggggtgggagaactttctggactcaccctcagtgactgacggagatctaccctggattgcctgctcagtcatgtgtagttcaaacccaacagccaaggtatggagctgttttctccagtccttagtagagcaggagtcctggatcgaggccagtgaaagaagaagccattgccaagtctgagtcttgtggtaacatctgtaagagcagactgtgggatgacaggagggagcacggggaaagagatagagatgtaccagacaaagctctcagaagagaggggcccgtgccaggggagcgcccagtagaagattaagtatcctggcagtgggacctggagggagaggtgacaaatggccctttgctctgggaagtgagccagtgatggcttcgcatccaggtcttagctcagtgttccttacaggcaggatgaagggcctcattccttccaggaaactccctagagcaaacaaggcgaggaggcagccaactggaagagcctcagatggaatggaggatacagcggagagagaggccatggcccaggccttctggcagctgttccttcaaactctggctcccactggagaccttctcctggctctgacatccgtcttttttttgaaatcccacatctggcttaaggttgcaggtgaacttcaaaaaacacactctagatatttctgtctctctgtctctgtttctctgtctttctgtctttctgtctctctgtctttctgtctttctgtctttctgtctctgtctctctctctttctgtctgtctctctgtccccctttgtctctgtttct

SEQ ID NO: 30794 - DNA, 1212 bp, Mus musculus
gactactgaaactagtcagaacaacatgttggccactaagaccccgccacagcattacacaagccacatcagcgacatacagaagtctgctgaagtcctgcactgggatccacatgatccacaggacccaatgcttgcttcctgcacagtgggtgagactttcctctgacctagcctggttatctcctcagctgttagcacttaagaccagccatgagcggccacctgagcttctttccctggtggctttgggaactggcgtctcccttctttttgctattgcaagtgaagagaggatagctataagctaatggttgtctgtctataagcaaatggttgtctctatccagatccaccgcacgatcagatcaggaccacaatgcctcgcccctgtaagctgagtctgcggcagctttgcttgctctgaagtctccagtgtcggggagagggcaaagccggacccctcggcagctcctttctgagtcccaccctagccagctgcagtcccctaggccgctggcctgatctcctgctcctggggtagacagaaggaagatccagagcagggcttgtcttgcgggattctgtaagcacagcttggatggatgtgtttgcgggctggagagggagaacactcatttaatcatctgatcaacggagatcaacacgtatcgatcgcctcctgttgtgtgacaggcagcttgctaagtgccggggacacagaatcaatgcagaaaacaaatggtgactaagcattgctcagatttgtgaggtcaccattaagaacgacctgcaagggtggggagcagagctaccgaagggttccttttcctttttcctttttccttttccttttccttgtccttgtccttgtcctttttcttttccttttccttttccttttccttttccttttccttttccttttccttttccttttccttttccttttccttgtccttgtccttgtccttttccttgtccttttccttttcctttaatgtcaaggccttgctctgtagtccaggctggcctcaagctcacaccaatttttcttcctcagcaccttcagggatgggattttaggcatgggtcatcccttggctgaggggtggattttttttttttttaattatttttaactgtatatgtatgtgtggagtttgtgctcttggtgcccatggaggccaggagaggtcgtcctctttgatt

SEQ ID NO: 30795 - DNA, 1085 bp, Mus musculus
aaacttgctgtcggcggggagaaggagtctgtgtgaggaacgggcagagaaagaactgtggctctggctttgctgctcgggtcagttagtggtcaaatagtgatgacccttaagtaacctcttcttcctaccgccagccctcagcagccccctgcagctcctggcagcccaggcaagttcatccactccagtggtcatcacccgggtgtgtgaggtggggcctgaggagccagcagcagccgtctcagtagccgctaatgcagcgccaaccccagccgcctccactaccacatctgcctcttctagcggagagcccgaggtcaagaggtcccgggtagaggaacccggtgggacagccaccacacagcccacagctatggcagccaccggccctcagggcccggggaccggcgagtgaagtgtcgcctgcaggaaggtggagtgaaactcacgccacaggagccctagtggccagcagctacattcaaggaccgagtggaaaagcccatcacagcctgcagccctcatgtgggtggccgccgcactcggacagtttcctttttatctcctgtcctcccatggtttgaaacaaacacataaacacgtacagacaacttgattgtatgaatctgggggttctgtgtgtttatttacccctctctcatgccatcgcctctccccagttcttgggggagaaggtctatctagcccagctcctcaggaatggatcccaggcagcgcccacaacaagagcctgagccccaggcctggacagaagcacagtgcaaacccaggctcctctctctgagagtgggtccacggatttcctatttgtgactgatccgggaatagaccagaaaacagaatggcaagaacttcccagccacaggctaggatacagagccctctccccaaaagtgacagagactgtggcattaactggggtcagggagatctgctttggctttggaccctaaatatttctttcagctaaatatggaatctgggctcatctccaacctgagacacacagagcagaccatgtgtctctgaggttcccttttgtaggcagccaagcaacacca

SEQ ID NO: 30796 - DNA, 1878 bp, Mus musculus
aggaggatgatggatggtgggtggtatgcggcaggaagacagcagaggatctgggcggtgatctgctcacaccgtctcctcccccacccaccccacccccattccagttaactgagaaccctgtccagtttgaaaatggaaaccctcttttctacctgaccgttatcctctggaaaggaaactacctctccggacagcagtcggtgccaagtttgagtacagtgcagcaagaaccaaagcgtgggtgtcagctgaggacttggacgcccggggaaggtccctttgcatgccggacaagtgaccaacagcactttaacatacaccacaccaagtctcgtgagcaggagccatcaaatgtttctctctgtgagaatgagagttgattttatagaagcagtcatgggggctgtgcgacaggaaactccaaagcagccagaaactcagtgttggtcctcctagagggtggtcggtaagcagctggcaacaacttggacagagccccaggccctgtcgttggtatcaaaccacccaccagtcagccgccttctctgcctggtgccggtcagaagaggcccaagggccctgtgggcagagagcaggctggacaagctgcctttgctggaagggactccagacctggaggctgtggtcacaggagagcagatgaccgggatggataagtccaagctccgatgtatggctgctgccattgaagccaccagtgccccccacacatcagggaccagggcggagcacctgcctcctctcttgagctatctcccaagctccccagccagtcatttctgtagtactcggcttcaagccagtgttttggaggtctcctgcctattgcctggaaaggttcagagaagtggggctggtgtgatggtggctgggggaggggtttcccctcagagggggcagagggctggctctgtctcacatcttcccttggtacctggcatgaacttctctctgtgtgcctggtgtgagcctggggttagggaagaacgaatggggtggagatctgagttgcgtagtgggctgaggtgacaagggacgttggtgccagctgctgatctttccctccatcaccctttactccagggctgtccatggtcaccctccaaggcagattaagattgtggatggtcatgagcaggttgctgtcccagttcctgaaacgtgggctccgtgctctgaggcagatcttcaccattaacaggggcgtggaagggtatggagagagagagagaacacacactgtcccggtacacggcctgacggcctggttggacagcctgagctacaaggaggctagactagtgctgctgctctgcggagtgggtttggtcatctgctgggcagaagctggcaccagagcgtgctcccacaagctctgagccaggagggccatgtccacgcactgtgtggcccatggctggcaaccctggagcaccccactaagccctgggttgggggaacaattcaggaacagatgtgaagcctttatagacaaaggaaccccttgggcagtggtaaaacagtgtaaggtgggggttaaaggtcagtgaaatgtaagaagaaacccttccccatagagagaaacgggtggattgttcctgttcttcctcaaaatcctcaaatttcataacacccacgtgacattgctcgcccagtccctccctccccatccgaactgcacagtgcctgcttagaataagtcagaaaggggtggcgtctcagctctagtgaaaggtccctcatgtgtgggaaacatcacatcctggccaggagaggcaaagtcaccacaaatggccacagggtaccccgaggctaggtcagggggaacagagcggccacctatatcctcacctc

SEQ ID NO: 30797 - DNA, 1178 bp, Mus musculus
actcccagtcctcttgcctcagcttcctgaatttctggggtgatggcctacatgctaccatggcccagcgctgtttgcgttttgtctttttttgtttgtttgtttctgtaccaaaagctgctacactggtgacacagcagggtgtggcctaggtgcccccacagactggcatatggcacgtctctctctctctctgccctccctaacccctaacgtcacagctgcttggcaagggaacatttttgaaccaaccacagatgtttccttaggaaaagtaggttttctactcgtggtgaagaacaaaagccccctgagtggtcctggctgctcctctgcattgcctcactgctccaaggttccctctatcaggcctcagctctactgcagggaacattctagaacctgccccccacacacacactcccccccatgggcacggggcataacagcctgggcaggcctgtcccacagatgaggccagccgcatgccttctccagaggtaccatctgggcacgaggcaggacagaggatgctcgaagggaggaagcggccagctagagggagagcagtttggtaagagctaaggggaggtaagccggtgggactggaggctgagggctgccctcacagctggtgccgagccagcagtggtaaagatccctcagtgaggagtctgtctgtctgtctgtctctgtgtgtgtgtgtgtgtctctctctctcaaaatacttagagtgcttcagtcacaatgaaaagcatgtgtttctgtacttgggctaagctgtcaaacacaggctgcctagggcccccaggacctcttcccctaagtccttgtctgtgtgtgcacgcacacacacacacacacacacacacacacacacacacacacacacacgcacacctgccttgtgagagttagaggactagaagggcctgctgctttacctctggaatcctgttcctgtgactactcacaggtgaccagtgtggaggaatctggggcccaggcaccccaaaagcctgagtgcagacagtggccaggtgtggtccacaaccccatatgtgaagcacttaccaccattagagcaacctcagcactgtcccctgtgtccctgggactggctgactctgagctccgtgacccactgaatgttcatgttctctgtcctgtatgtatcc

SEQ ID NO: 30798 - DNA, 1152 bp, Mus musculus
ttttcacgtgtaactctgggtgacctggaactcatggagatccacctacctctgtctcccaagtactggggtgaagagtgtgccaccacacccagtgtcttagtcagggtgtctgttactgtgatgaaacaccatgaccaaaaaagcaaattgggcagggaagggtcggcttactccagatcatagtccttcactggaggaagtcaggacaggaactccagcagggctgggacctggagccaggagctgaggaggagacggagagggtgatgcgtactggctggttacccgtggcttgtccaatctgccctcttatagaacccaggacccaccatgggctcggccctccctcattgatcactaactgaggaaatactttacagctggatctcatggaggcatttcctcaacagagactccttcctctctgatgactctagcgtgtgtcaagttgacacacaaagccagtacacccagcctccttttatttgggaatggtttgtcaagtgttgcccgggtcggtcttgaacttgtaattcttctgcttcgacctccagaatgactgagattattgttctgtgccaagctcaggactctgatgtaccatgggcccgtgaaagtcaaaagttgaggcctgctaccttcccgacaatgtcgccgtgatttgggctctgtggcctcagggaggtgtcaacatctccaggaggcctgttatgttctgaagattcatgcagccctggaggctcgaccaggctgcctgagctctggcctgcagcaggaatcctcgtgagtcactgcagatgctgctgctatagagcctaatgccctgccggctcctggtgtctttcaggggaagcggccgccatggacgcagaagccgtctacgggcagctgctccgaggtctcccttctgaacgcttccacagcccgaccctggcctttgaggtcatacacttctgcacacacaacctggctctcttcgactcccactttctcagccttctcaggctgagcttcccaagtctgttcaaggcatgtgtgggcttcatcggggtgggcccagggctcccctgcagatgatttcagtctggggtacagtgaggggtgaggctaggggttcccctgtatcatagcatccagagtcagctcagg

SEQ ID NO: 30799 - DNA, 1152 bp, Mus musculus
cccatagactgttgcacggaccaatacatttaaagtagaatcctgtcccaaggaccgtgaccgcacgcgcctttccagtctcagacccaacatttggcaaatcgtttgcagttctgcgcctcgcttttcaaatctgcaaaacggacgtgcgacattctcttcgagcaacgcggtgcgccaaagttcctagaacaatgatcaacgactcaggaccaacgaggtaactcgccgttctcagacagcaagcccccgcccactctccgccacgcgcaggcgcacccaccagcgcacctttatgcatgcgcagtcgaccggaaacacccgcggatgcctgcggcgaagaggcggggcctacgcagcgggcctgcgcggaacgccgccgtgcgacgcgagggtgggcgggaccgcgcaagcgcgcagcccgtcccggctctggagcataaacaagagtggggacgggatgaggcggcagttggtccccgcgcagcgagaggcggcgagcggggcgacctgccggaccggacgtcgatcctgagtgtagcgtgctcccgcgggccgcccgagtcgagctgcgcgcgctcccgccaaggggggtccgaggccgtcgcgcgctcgcagccatgaacctggcgagccagagcggagaggccggcgccggccagctgctgttcgccaacttcaaccaggataacacgtaaggccgggcgcggacgcggggccggggcagagaccagggctggtcaggttgaggggtatgggcggggggcgtgctgagcccgcgcggccgctcgagcgctgctgcctcctgggccgggggaggtgatggaactcggggtgcccccatccacctgtcctgagacctggcctttcgcaaagttaggaaggaactgtgcacgccggtttgcgcctgtcacccggactcggttttgcggccatcctgggcatcgcccgcctccccctttctatacatctgtatcctcactgcttctgtcgcttttcatggcttttctttttctgtttgcttatttcttctctgccgacctttctggcaagtaactttggtctcctccaaaaaaggaccaaacggcagtagtaatccaggccttcgatctgagactttatcctcaaggggtctgggagcttcaaaagggg

SEQ ID NO: 30800 - DNA, 1130 bp, Mus musculus
atcccaggaccctcacgatagacttgtgctctggtcatggcacacacccacaccccacaatacacattaaaaaccaacatcctcaagtaaacgtagtgagtgtgccttcaagccctgccagcagcagggcacatttacatttcatgattctgtgctttggcatcagagtttgcatgtagggtgtgatctgtatttatactgacagaagccatggctccagatagactttccatcccctctgctgaccttcgactccagagagttgtcagcccatgtatcccttacaatgttctgtgttgtgtgtgtgtgtgtgtgtgtgtgtgtgtgtgtgtgtgagagagagagagagagagagagagagagagagagagagagaagtgcatgcacttgtgccctaacctggaaatgtatgtatccacacatgtgtttttcttctttggttccagctgacactgaagatgtctgcattgtggagagattgttctcaagcagcttggtggccattgtcagcctcaaagctcccaggaagctgaaggtttgccattttaagaagggaactgagatatgcaactacagctactccaacactatcctggctgtgaagctgaacaggcaggtgagtggcaccaagccgctcaggtgatgagcacttgccttgctccccgtgccctgaagctttgggtaccatcccaagcaccgcataaaaccagctggagtggcacacagctggagtctgagcatagggagaggtataagcaggaggatgagaaggatggcagcctgtctgaggaggtgtctctgtgctaagtgctcttgctgtataaatatagggacttgagtctgaatcgccagcagctgcacacaaagccatgtgtatctaaccttagcattgcagtgggcagagcagaggcaggaggattgctgtgctttactgacctgccttagcttcaggttctcagtaagagacctgtctcaaggggataaggcagaggataactgagcagtagtacagctgacatgcctggcttctaaccaccatttttacagacatgtggatgcacacacatacgcgaaaccacacaaggaaacccaagtgtactgcctgttgtccggtgttcctcccttgtctc

SEQ ID NO: 30801 - DNA, 1837 bp, Mus musculus
gaaccaagaaaggtgatgtcgtcagtgtcgttaaatgctctgtctcctcctgtccccatccataactgtgacttggctttttgttttttttgtttttaaaggagagtctatagctactccaattcccaaaaaagcacaaaggtgtaagatgctaggtcagggtcagcctctgcggacctggagcagtggtgtctgccagaggctctcctccctccccagacatagcagagagtagaggggcccctccccctcccagggaggcggcaggagattccctcccggggtgatgtgccttttcttttggtcttacaagggcaggaaagtgaggtcagatgtcagtgctgccctgtgcctgtctgcttttgattgtttgctatttggggggaaggtgtggtctcacactacaccccaggccctggaactcactatatagcccaggctggtctcagactcaaagtagtccccctgcctcaacttcctgtgagttggaattacaggtactgctgtgctaggctccattctcagctctatagaataaaaagttgaggtcctcaaatctgcattctaaagaacagagcctaacagtggagcccaagggcgtggctgtggcttctgcatgactatggctttaggtgcaggggttttggagtaggaaatctggataatgttggggtaccaggttaatccagccggataagagggactacaggtagctgccttcaggcctgtgtggttatgtctggtagagtatatctgcagggtgcctgtagctaaatctgctgaggttccctgtttctgctgttcaaggatagctaatcacataattggggtttgaggggcgcccactgttagctctggctgctgttggcacctgtgccctggagcatccgaggagccaaacagtatgaggcagggttaggctgcgtgtgctggactttaaactatgaattttctggaccctaataacatgggaccccagcctgtggcctagttcagtgactgcttcactgggagactaaaactggccttcacaggaaccgactgtgggaagcacacggggctgattgggagccggggtttcctggaaccaaagagtgtggctgttgtgctggtgaccttggctttgtgctctgggtttggagctcagctccctctgctgaggcctctctagggagctggggtctcacagacagtggagttcacgtctccctaaagcataggtttcctcacttggaaacttggttagaaaaaggccgctcctggggtctggggctgtgccttccatcagtggtcttgccaggctgtgcaaatttggtgagccttcctctcttgggacagatgtgcccgtgcatcccacagaggtcagaaaagcaaaggattaggctgtgacctcaggcaatctgtacagcactcgcaggcctcaggtgagggaggagagagtggctggctgaggtcagcactcactgttgggatgcacacggtagagccaagcctcagcagggctcaggttcaaaggtaagaacattttggaatccggtgtggcacacacctgtaatcccagcagtcaagagagtgaggcaggagcatggctgtaaatttgaggccagtctagactatatactcctgggcaaacctggcctacagagtgagaccctgtctcaaaaaaccaaaggatgatgactttaagaaaagaaagaaacaaaacaaaaacaacggggaatgggagttgtaaaaccccccaaaattttaagattagtatggattgggaccaaagcttttgtattttctcagacaatgaaagcaagagttggagtcccttgtcctgcctacaccaaca

SEQ ID NO: 30802 - DNA, 1199 bp, Mus musculus
atggatggatgggtggatggatggacaggtagatggatagatgggtgggtgggtggatggatggatggatggataggtggatggatggatgcatgcatgcatgcattaatggcagaagtaagtcacagcagatagtccaaagtgtacaaagcaggcaggtcagagcagcctggatcccagcccaggctgagatcaccagaagaccagaagccccaccagattaggtcaggcccactcagagtcgtttatctgtcagatgaactcaaggaccactttctgcaggacctccatggccacacctcaatgagtcatggaacaaccaaggcccaggcctcagctgctgagtgatgaaagagcccctcgcagtgtgcagtttgccaactcaactccttaaccatacttactacccagataaagccaaatcagggtcatgccaccgctaagcgtgacacagctcatgtttgggcccctgaaaccatgggagcccattcctcagaggccaccgctaactgccagcaatccttgcagccctgtaacctcaatacagctagcaatttggagctgtaaaaaaaaaaaaatcatttattttgattttatttacattggtgttttgactgtgtgagggtgtcagatcccttggaccaggagttatagacacttgtagggtgccatgtgggtgctcagaactgaacccaggacctctggaagaacagccagtgctcttaatcgctgagccatctctccagtctcagagcacatctttaagtgtgtgtgtgtgtggggggaatctggttgtggggtgcatgtctttaatagcagcactggggaggcaatcttcgtgagttcaaggccagcttggtctatatagccagttccaggaccgtcaatgctacacatagagatgccaaacccactccttgaatgaaggaaggaaagaaagaaatgggggtgggggtgggggagaaaggtttatgtttgtttgtttattctagcggggtggagggcacacacgtgttgtggaggtcagagggaaacttgcaggggtgaattttctttcaccaggcagggtctgaagactgaattgaggttgtaagctttggccacactcgccactacccactgagccttaggttactgataagggcatgcaagagggaataaaaaatatttaagggccagcgagctggctcagtgggtaa

SEQ ID NO: 30803 - DNA, 1505 bp, Mus musculus
cgggcccacccaatcctgccccctgcccaggaagagctgcctgggccagttaccccaaggcctgaggaccctcccacccctgcctcagtgcctgcggggtcctggccacctcctaagccactaacgccaccttgccaccttgtcccagttgtccaaaacagctggaacttgtcttcaccgcccagggcaccgcctccccgtgtcctgtgtttggtcagacacctgcccttcaccctctgtgtccagaggcccagcatctgtcacacatcaagggggcgtttattcagtcttagagccactcggaatggctggccacagtctgagctgactcccttcagtgtgaccccactgtgtggttccatggtcttcgatgtggttttcatttactggtcagggggcacctccctgtattagaaatcttggaggaaagtccccaactccgttctgtccctttcttgttcttagacacttcttcacagccctacccctgcacccgcacacataaagcgtcaagtctggaaaactcattcctcatacacaggcctcctgtagtcatagcaacagagatgacctaggtgcacccaccttaggtggaggacttccccatgcacaccaccacccctcttagagcacaggctaagggccacggctaacagggacgtcccatttctttcctgttccatccaacttacccatcatgcagggacagctgaggtccactcgtgacctaggccgccccactcccatccaccgagagtcaagtgatgacacgacacacttgaaaccctggcaagtggctgcaaggtgaggattggactcgtgggtgccaggatcggctggaggacctcctgccaaagagagcttttgctgagccgggacacttgcctctccacacagtggccccagccgtgaccaccctgtaccagtccctgctgtgtcctgtctacctgtgtgttctctgactaccgcactggccattaaatatggcagagactgcccaccgctgtcctgaggaagtgtttgtggggggagggctgggaagtgagccactgggtagggtggggagattaaaatggggccctgatggggtgtcttccccacaatgctgagacacttgtggtcccacctgtcctgagctaggtgtttttagaactgatgattgcctagtgctgagcacctggggcttgcacgggccttagcaaccgctgcctctgtgaggacaggaaaagatatggatttctacatctggctcacaggaggaagagctcaaaacggggagtgtgctggtcctggctctaccccctctgggtctgggagtcaggctgctcaaagccagtaatgaattcttcccggttacagtccccagttctggtgacaatttagagacatcttctcttctctcttctcttctcttctcttctcttctcttctcttctcttctcttctcttctcttctcttctcttctcttctctcctctcccctcccctcccctcctctctttctc

SEQ ID NO: 30804 - DNA, 1188 bp, Mus musculus
gggtcctaaagggctgttgttggggttgccagagggtttcataggatatacgtggagggcggggtggggggagaggttgtgagaggtgtcattgggagtccggactactgctggctggggattcactgccacctttggcctccagggcatggccggactgatgatgagtgtgatcgagccaggcatcgggaggatcggctgctagggacacggctggaccgggaccaggagaagttgctccggtgaggactttggggcccgagagcgcgggctgggggcttctggagtaggggtgttgaggtgacctctgcgctccctctaccatggtcctcgatcaccttaggcttgtctgtccgcgtgactcaaggtccctccagccactgttgaagacccttagctgttcccaggcgctacgtgcctgtcagctccctgggctgtggctctcgttcacccccccccccccatccctaggctaccagctgttcccatactgtttctctttgcagagaaagtaaggagctggctgacctggcccgtctacaccccaccagctgcgctcccaatggcctgaaccccaaccttatggtgactggtggcccaacgctggcaggctcgggacgctggtctgctgatcctgctgctcatttggccacgaacccctggctgccacgctcgggtagtacatccatgtggcttgccggacacccttatggtgagtgtagcttgagggaagactgggaccaagttagtctttctctgactcccagtaaggtgggagtgacgtatgtgtccccagtctgcctgaactcttaaggttccttctgggattctcagtggacatcacggactatggtgctgtcagcgggctgagactctcctgacatttgtataaatttggctttctccccctaggcctgggacccccctctttgcaccagggcatggcccctgcatttccacctggcttagggggctccttgccgtcagcttaccagttcgtcagggacccccagtctggccagctggtggttatccctagtgatcacctgcctcattttggtaagtgacccttgagtcacagccagggactttcctggccacccatagggatggaacagctctgtatatggggtggggacaagggggtccagggaagcctgaacctcagttgtgtcttgggaatttcat

SEQ ID NO: 30805 - DNA, 3242 bp, Mus musculus
tccaccagatgtcaatagcgtgcttattttcgctaagtgctattttggcactggtgttaatcgaaatttatagcctgcagcatttgacgctgggaaaagaacccaccctaatggtccctgattggcaggactgggctgttaagtggcagaccatatgctgcctgctgagagcacggtgagcgcttgggcctctgtgtgtgtgtgtgtgtgtgtgtgtgtgtgtgcgcgagcgtgtgtgtacttgtacctgcacgtgtatacatgtatatgtgtatgcctgtgtgcatgcgtctacgcctgcatcttctggtggtgtgtttcacattaaggagggtcagacatgggggaattcatcctttgtaaacagaaagcccctgacctcccaaggctgcctgaatccctgccttggcccacccctggctgtttttgcttccttttccagaccttgtgggtttttggtttggtttggtttggtttggtttggtttggtttttgtttttttgagactgggttttcctggtatagccctggctgtcctggaactcactgtgtagaccaggctggccttgaactcaaagagatccgtctgcctctgccttccgagtgctaggattaaaggcgtgcgccaccactgcctggctagaccctgtgctttgtgtgctgcctttgatgccatgtctcccaaccctcttgctcggcgcaaaccagcaaaccaggctcactgagtgactttcctgttttcttcttaaaactctgtgcatgcgcgcatgcgtgtgtgtgcaggtctgtgtgtgccatggcacatgtatagagagcaaaggacaatcttgggtgtctcttctcacctccaccttgtttgagacagagtcttttgttcgctgttgtatacaccaggctagctgacgcatgaactaccagggactctgctgtctccacccatccgtccctcgatgggcattcaatgatgacagatgtagctaccatgcctggcttcatgtgggttctggggctctgagctccggtcctcgagaaacaagttctctatccatagagctgggtcctcaacccattttcctgatttttatagggaggactcttactggccagattgaagagggctctgctttgatatgacagggacaggctctgacctgccagtggcccctagaggccctgtaatagggccacgaggtccaggcccaggctgtgactaggaagggctgggcccagacacttgaatccaccggtagcttcacgtttgggcatccagggcagattctctgactatctactgtatcaggcccagagttaaaagccaatacttagcaagatgatggggttgggccagtctagggccgtaggggtctgagggaaagatgggcctaagcagtggggctgttggtgccaaaggccaggcctcaagcaggatggaccgccaccctcacgcccactccaagaggggccagcatgccgcctctctctccagcgtccactgctacctacccctttgaagactgggagctgctgaactcttctaagggaaaaataagagaagccaagtgtgattgtgcatctcatcccagactgcaggaggtgggagcagggggtcaggagttcaaggccagcttcagctatgtaatgaatttgaagctagcctgggcttcctgagatgacactatgtcaataaagatcagagtgggggtagtgggagagagagagagagagagagagagagagagagagagagagagtgtgtgtgtgtgtgtgtgtgtgtgtgtgtgttggtgttgaatggggtataaagaaacaggagacaagaaattttgaatggggcatgaagtatgaccaccagcagtgagtcccagactgtgacctcttcctgtgaatgtgacccattcattggtacctgaagttattagtagtatccaatgccctgttgttgggtttttgtgacaggtctcatctgtgtttggggttgtaggatatgatagaggtctgcaggctcagtgttaatgctgcatgagattctagactaggcctagctcctacgttagctgcttagtggtagcacctacatccctcagaaggatcaccagcgagtgagcatcatcagacccggagcttggctgtacctcccaccctaccccaacccctgcccgacctggcaggcttcatagggctgctgttcagagaggccagggtccctgaggctgcctctgctaatgctggcctgggatctgcttcagaacttggaacctggggtggagcagggtggggtggggtggggtggggttgggagggagcagggggagcactagctctgtgatcgatcatggggtgctgtgcaaggcatgtgtgtacgagccagggtttccacagcaggaggagtgggcatgcctcagtaggtgtgtctgtatgtgtgtgcacaagagctcctgtcctctcgaagcccctgtcaaaagcccctgtcagctcgaagcctcttcgctactactgactgtgatctactgcacgtgacttccccgagcaccaactgagttcagtgtgttgtttgggggcatggagaaaggccttgagaccaggtgctaagtgaccattccctcccttttgatgactgaccgccctgactcctgtccagctgggagaactgcctgtggttggtatctggcagtgacagatgtcactatggtgctgacaaactacattctgaatgggtgtttctatgtaaatctgtagcatgtggaaaatctctaataaatggaacttgatttagaaagccaggcagccgtgtggtccttccagcagggactcgactatccatgtatagccagcttcatgggctcacgtggggagggtccctcattctttttttgagacagaatttcatgtagcttaagctagcttcaaatctaatatgtagacaaggctggctttgaactcctaatcctgctctctggttgtgaaccttgacctcagcagagccaccgttaaaacacccataggtggccccctctggactggttggggggcttcctcacaacatggctgccagactgaatcacaagcattccaagaaaaccagcagggtgtgttgagctttggaactcaccatttggttgttaacctccacgcttaatagtcagttatagagatacaccatgttcagcagaaatggacacaggctaccctaggatccagggggtcttaggatctcattgcagaagagctggtggggtgggagg

SEQ ID NO: 30806 - DNA, 2690 bp, Mus musculus
ccgttaacggctgacctctggttcagtttccaggccgagaggcccgcgttgaacgtcgtcatcttccccctgctccacgagggcctgacagatgtcatccgagatgtccccatgctgcacctggatgagatcaccttgttcaaaagccgtgtggctgaggaaccgcccaacctatggtggtgagaggaccctggccagcccgcccaccactcctgctaccacgtccaccactcctgtcgccagagcctcttctgtctgagtctccacgagggtgcccggagccagcagacagtaaggccttgttccgtgacaggaagaaagtttccagttctcctgagacactcaccccagtcccccgggattctctctgtcactctcatgagtacagtgacaagaagtaatctggtgagccatggacgaatgggccgtggatgagccaggctgcccttcagggcctggctgtgctgggggtggggggaggatttgtgggctgcggtccccagtcctctcgcttgcttcagcttggggactctcgcctgctcctttgttcatggccgtctacacttaagctcagtcatgtgaccgcacccacgtgcagtcagggtgggccgggctgtcactgtgaaattctcgaatgttgtctgtgagcctgtggctccttttcctgttgagctccatttagggtgtgggccagtggcagagctagtgtgtgcgaggccctggctgccatccccgccacaaaaaaaaaagtttaacccattgatgtctccaggatgttttcagctcagtgatacttgtaccagagagtcccctgaagcagggactgtggggtggcttcacccccaaactgagcctgaggagttgagcctgtgtctcacaagtggtcacctctccttacagtcggtgctgtggtgctctgaatgccttccaggaacactgcaaccgctggccccattaagatagctgaatacggtaaaagccagcgttgggtgtaggttggagcagggagcgcctacctgtttagtccttacaaaatccaccaagagcactgctttagttagtgtgtgggcatggaccccaggttccatccccagaatgtggtgccagcactccagaagtcaggacacaagtgtgagtcaccctcagctacataactgatgtagaggctaacctgggctacataagaccctgtttcaatctcagcaaatgaaaaacaaaggccagacaaagctagaggaggagccagtgtctgtggcttcacgccagcgagactgagccagtagcccctggagggacgtctgagagcgtgtggtgtgtgggagcgtgtggtggcatcgatccactgactcccacctgggcctccccaggacgggctccagcacgtgtggacattgatccaggtggtttccagcctagaccacctcagtccgtgccgtgccgcccaccaggcctcactcactgctggtgaccgccccagacccagcctgccctcacatctcctgtctcccggtcagcatcccttgctggtgaggagcagcgctagactgtgcctggggagacccagctctggggacagtgttagggaaacagccctcaggcccaggccccaagaactgtgcctctgtctggcccttggcattctagcttcagtgtttacatggggtctccagtgccaagccctctcccctcagccagcctcttgcctgagggaatcctcgattctctccggagcccacagtgctcttccctgtcctgtggctgagcgatcttaactcctagccagaggtattggtctgtctgcaggctgatcccagggacacccagcccacacccagagctcttaccctcccagtcggagagttctaagccttccctgtcccttcctgccactgcaggccattggactgactgccaaggttccagggggcagactgaagtcccacatggctgtagacaagggacccaaagatagtggaacccacttcttccagttgagaagaagggtgagcatgtctttagaacattaagctggcacctgaggaccacccataggccctccaggacccactgctgcttgtccttaagatgagaatgtggctggtcccagcctgtgatgggagcaggctgcttggaggtatctggtcccaagaatccttgcgaatacttcctttaaaggcagcccccctcagctggctgtggtggtgaaggggttttttgtttgttggtttttttttttttttttttttttttttgtggtttttcgagacagggtttctctgtgtagccctggctgtcctggaactcactttgtagaccaggctagcctcgaactctgaaatccgcctgcctctgcctctcgagtgctgggattaaaggtgtgtgccaccacacccggccagtagtggtgaaggttttaatcccagaggcaggtgaatctctgtgagttcgaggccagcctgttcggcatagtaagttctagtctagccagggctatatagagactctgtctcaaaaaaacaactacaaaaacccaaacaaatggcagccccgttcagacaggaaatcacttttctcctgggatgttattcaaaaagccagagccattctgtcaatcctgtggataggcagttcttaggaccagcagtgctagcctctggcattttttatgcccagaaactgggctgacaggg

SEQ ID NO: 30807 - DNA, 1187 bp, Mus musculus
acaccgtgctgctgcagaaggactaccaggtgaggcacggtggacgggagggtgagcgagatcaaccaggtgccagcctgtggggccagtggcaggcactgatgtttgcacacaagactggctgggaatgatcttcaggttacactgaatgacagagccagggtagaagagggtaggcggcttgccccatgatggagtgggatgggtgggggctggatatagtgcatgtgggtggagttctggaagggagggagcctgggcctcaaacgcaggggtcagtgggaggccttccatgtaggcactgcagaatggagttgctgcaccacagggcagactgcggaaggttgttgttgagtggcacagcagacagatgccacagtagacattgctgcagaagggctgcctgccattgctccgggctgaagtctctgatcaactgagacataagcctgccatggtagtcccagcactcaggaggctgaggcagggggctcgtggctcagaccaggttagccccaaacaaacagataggtgtgcctgtgtgcccgatggtggcatgtgcctaaaattccagcacttaggagtcagaggatctataaattcaagctcagactggtctgtagagttccaggacaggcaaggctacacagtgagatcctgactttaaaaaaaaatacaacagcatgccgtgcaatggtagtacatgcttttagtcccagcactaaggaggcagaggcaatcagatctcagtgagttcgaggccagcctggtctacagagtgagttccaggacagctagggctacacagagagaccctgtctcaaaaacaaatgaaaattatagctttaaaaagctagttattgggctggagagttggctcagtggttaagagcactgactgctcttccgaaggtcctgagatcaaatcgcagcaccatctgtaatgagatctgacgccctcttctggagtgtctgaagatagctacagtgtacttggatataataaataaataaataaataagtctttttttttttttttaaagctagttatttttagatgtgtgtgtgtgtgcccctgtgtgagttcttgtgcccagaggtcagaggtatcaaattcccttggagctggagttacatgcagttgtgaagcccctgatgtgaatatttatttatttatttatttatt

SEQ ID NO: 30808 - DNA, 1098 bp, Mus musculus
gcagaaaaaaaaaaaataagagacaacattggcatggctttgtttttttaaattttttttaaagtttttttttttttttttttttttttttttaagtttttttgttttgttttggcgcttttgactcaggatttaaaaactggaacggtgaaggcgacagcagttggttggagcaaacatcccccaaagttctacaaatgtggctgaggactttgtacattgttttgtttttttttttttttggttttgtctttttttaatagtcattccaagtatccatgaaataagtggttacaggaagtccctcaccctcccaaaagccacccccactcctaagaggaggatggtcgcgtccatgccctgagtccaccccggggaaggtgacagcattgcttctgtgtaaattatgtactgcaaaaatttttttaaatcttccgccttaatacttcatttttgtttttaatttctgaatggcccaggtctgaggcctcccttttttttgtccccccaacttgatgtatgaaggctttggtctccctgggagggggttgaggtgttgaggcagccagggctggcctgtacactgacttgagaccaataaaagtgcacaccttaccttacacaaacagcttgtggctctgtggctttgctgggtgtggggagcaggttgggtgggtgtggagctctattggggggggcatctagggtgggctaggccttgctgatggtatctagtgggagggctacaggccctttaatgaagtctcacaaataaccacaccttcagactgtcttgaagagttgaaaaggtactcctccagaaacctaggccaagttggcctgcactaacactaccttcctcaaccgaggggtgtccacaccctttgcctccatctgcataactgggtttcaagcccctctgctagtctgaagctgccctttccagagctgtgactgacagcaggaaggtgtgaagcctatggcttccttcccagggatgggcatcttttccctggttttgttttgagagcctaggactgaggaacacctcagagggaggaagggggtcatcctggaaatcagccccttccacatggc

SEQ ID NO: 30809 - DNA, 1932 bp, Mus musculus
ggagggggcggaggtctggcttcctgccctaggtccgcctccgggccagcgtttgccttttatggtaataatgcggccggtctgcgcttcctttgtcccctgagcttgggcgcgcgccccctggcggctcgagcccgcggcttgccggaagtgggcagggcggcagcggctgctcttggcggccccgaggtgactatagccttcttttgtgtcttgatagttcgccatggatgacgatatcgctgcgctggtcgtcgacaacggctccggcatgtgcaaagccggcttcgcgggcgacgatgctccccgggctgtattcccctccatcgtgggccgccctaggcaccaggtaagtgacctgttactttgggagtggcaagcctggggttttcttggggatcgatgccggtgctaagaaggctgttcccttccacagggtgtgatggtgggaatgggtcagaaggactcctatgtgggtgacgaggcccagagcaagagaggtatcctgaccctgaagtaccccattgaacatggcattgttaccaactgggacgacatggagaagatctggcaccacaccttctacaatgagctgcgtgtggcccctgaggagcaccctgtgctgctcaccgaggcccccctgaaccctaaggccaaccgtgaaaagatgacccaggtcagtatcccgggtaacccttctctttggccagcttctcagccacgccctttctcaattgtctttcttctgccgttctcccataggactcccttctatgagctgagtctcccttggatctttgcagtttctgctctttcccagacgaggtctttttttctctcaattgcctttctgactaggtgtttaaaccctacagtgctgtgggtttaggtactaacaatggctcgtgtgacaaagctaatgaggctggtgataagtggccttggagtgtgtattgagtagatgcacagtaggtctaagtggagcccctgtcctgagactcccagcacactgaacttagctgtgttcttgcactccttgcatgtctcagatctatccatacagtttcacctgccctgagtgtttcttgtggctttctgaacttgacaacattatttatttttctctacagatcatgtttgagaccttcaacaccccagccatgtacgtagccatccaggctgtgctgtccctgtatgcctctggtcgtaccacaggcattgtgatggactccggagacggggtcacccacactgtgcccatctacgagggctatgctctccctcacgccatcctgcgtctggacctggctggccgggacctgacagactacctcatgaagatcctgaccgagcgtggctacagcttcaccaccacagctgagagggaaatcgtgcgtgacatcaaagagaagctgtgctatgttgctctagacttcgagcaggagatggccactgccgcatcctcttcctccctggagaagagctatgagctgcctgacggccaggtcatcactattggcaacgagcggttccgatgccctgaggctcttttccagccttccttcttgggtaagttgtagcctagtcctttctccatctaaaggtgacaaaactcctgaggccatagtacaagttaagtctgatttctgtcactcttctcttaggtatggaatcctgtggcatccatgaaactacattcaattccatcatgaagtgtgacgttgacatccgtaaagacctctatgccaacacagtgctgtctggtggtaccaccatgtacccaggcattgctgacaggatgcagaaggagattactgctctggctcctagcaccatgaagatcaaggtaagctaagcatccttagcttggtgagggtgggccctgtggttgtcagagcaaccttctaggtttaaggggaatcccagcaccca

SEQ ID NO: 30810 - DNA, 1941 bp, Mus musculus
ttcttgagtatttgaattatgggactgtaccttacatccagctgagcccactcagttctggaagctgacagcgggagggagtgttaatcctttggggactgacaaggtggggttaacatgtagtctccctcctcagactccacgggcaagtactggacggtgggtagtgattcctcggtcaccagcagcagcgacacccctgtggatttcttccttgagttctgtgactacaataaggtggctctcaaggtgggcggccgctacctgaagggggaccacgctggggtcctgaaggcctgcgcggagactatcgaccccgcctcactctgggagtactagggccacctgccctctgcaggccgctctcgtcagtccctcctgttatccttactcatcgggtggccctgcagcaggtggcaaaccccttgcctttcaaactggaaacccaagagaaaacggtgcccttgctgtcaccctctgtggaccccttttccctaactcactgctccccatgggtcggtggctgcagactgtccccaggagggactctggttccctctgtccccttctttccatggggaactctggcacctttcttctgacctcagtcaactctgagccttatttccccccaggaagtggcctaggagaagctacagggcctagggacttaccctgagcttgtaactggaagaccccgtccctatccccgctcccgcccccaccccaccccacccctgctctggccccagcctctggaggccagccttttggcgggactgaagccgggcatggccaaccttgcccacaagtgtttttctggatcttggctggaaggcagtctgtcccatcctgcagtgtttgggcctggctctttgactcaaagctagctaggtggcactccgtgtcgctcctgcacattctggaaggggcgggcctctcacccacctcattccttttccccctggcctgactggaagcagaaaaatgaccaaatcagtatttttttttttttctttaaggaaatgttactgttgaaaggccctaggcaagcctgccctgttggttgtagtcgtgagtggtcttggggggagatgcttggctcctgtccctgcctccccagcgggttccctccctccctcctgcctgaccaccccagctctggctctgtgattggtgctccacgtcttcccagacacctcggggctcctgggcgggagaaagccggatgtgcccctccctgggagccctggagtaaacctcagggggccctttcccaatcacccccttccaccgacccctcaacaccatgcatctcactctgggtgtctcgctcctttatttttttgtaactgtcatttctataactctgaagacccatgatagtaagctttgaactggaaaataaagtaaaatcaagtctgcggcccgtgtgtgtctcaggggaagtggatgctggagtgggcagagggccggctgggagggaggcagcgctgattgattggcagcccgcagactcttgtttcggtctcggaccctagcggcttcagcatatgccttagtaactctggactgagaaatggctgacacgaggttcccgagccttacaagctgggcaggctagagggttcagcaggtaaagttgtgtgctgtcaagcttgatcagactgagtccccagcaccgtgtgaaaagttgggcacaacggtgtacacccaccccagggcctctggcaagcacagagacaagaggatccttggagcctgctggcggcccaaccttgcccaatctgtgattcccattgagtgagccataaggtggagatgggttttggaagataccccacataggcctgcggccccccacacccggaaataaaaacaagccaggcttgtcatcccagttattcggggagctgaggcaggaggatcacagatttaaga

SEQ ID NO: 30811 - DNA, 1288 bp, Mus musculus
gatgccctctgggtgctgattgtcactgggccaattatagggcagctccctagtctgccatcttagcagccaatccagtggccctgaccatgaagcaaggcctctaatcgtttgccatacttcctccccagcagcccaatgaaagcccagggggaaatggcctaccatccctaagccagggctctctccttgttgcccaaggcccacttaggtccaagagcctccgagaatctgtggcgcgagttttgttctgttgttatctaaagaggttgctcctattcatgtagtttgagctgaagttttttttgtggtctactcatgcgtgtccctatccgtggaaagtcaggttgaaagtatttccccagggctggcaactgctgagagccagaagtcctgacacttgccatcaaacaaaagggccctttaggaagctgtcatttattcccaggtgggccctgttctggggtgagcagcttctttctcctaaggtgttgggggttccctggcagtgcagatgacctcatggagctgctacagtcatcacagcaaccctgctgcctgctccccgtccctcactagttagcagtgggtgcacacaggagagctcccagctcctgtgtgatgagagtccaggcctgcacagagcctttgccatgttcccagtgcctgtgtcccctcctgtccagaccaggcttttgtcctccagcgtttgctgagcaggaccggcagcaggtttctcagttgtactggctgtccttgtcctccccttgctgtgggggtgtcccctgttcagagtgtacagacttagaagggggaaagtccctgggaaagggaaggctccctgagctgcccattatcactggagtgtgggtggggcacacagtggctcaggagccctgccatggtcacctgaactgtgatgttagtctgaatgacagtgccttggaaagatgggccacatgctgcatgacaggatcctccaagtaccttaactgttagagtatccgtgttctctgcacttgtccagaagccccacgcatgggtgggtggctgggtgggtactccaagcactgcccctccacggcctcgtgagccgctggactgggcacccagttctaggttgactcagtacccgtctcacatccttccaccaggagaccagatgcaaacaactggcagtttctggggtgaggccagggtcgtgtcagtctgtgggtgcagggaggctgctcctgcctgtctccatccaggagtgaccctcccaacacctctgtgccagcagggatcc

SEQ ID NO: 30812 - DNA, 1150 bp, Mus musculus
ccagccggcagtagtaatagagtctagtctcctggacacactgggtcccagttcaggaggcagacacagatggatctctctgatttcaaggtcagcctagtcaagtggtgagctccaggccagcctaggctttgtgacaccctgattcaaaagattaattagttaaacttggtctcctattaaacaaaacttagaaatcatttgttcttctgtaacttgaactgggtgtagattgtttccaagctaaagttctgcttttcttcatttcaggtcactagcagattggacctcaataagtagcagccagtgttatattgcattttactgttcttggtacatagtttggtgtctaagtgacaaactgctgcagtgtgagtagctgcagtgcacacagtgaaagcatttgctgcctagattgcactcacctttacatcgcagcacatcctgctggacaccctctctgcttcactttgtagctggccacccaccctttatctcaatagcaaatttgttttgatcctgcctcccttccctctgtcttcaaggccctcagtgtaacagagaaaggtgaagggtgtcggtttgtagttgggagcagcaatacaaaataccaacacagtaagaagtatcctggcagtagtgggccctccttatcagttgaaatgcttctagaaacagtctcgctattgggggactgtaggagtgtgagcttggacgtgtgctccttcaacagagggattgcctactcccagaccaagtattcagagatccagtgtatatagacttggctcccacttcttaaatcactagctttgcacagaccaggtttggtttaggaaggagccgagtttcttctccctcttgacagcctgcaggagtcctagaatgaaaaaatgccacacatcatgtcagatggccttatatcttatctgaattccaaaactacatgagaatattatgccctcaatttgaaagtgaggaaactgagtctccaggcagttgggaaatttatccaaggtagtacagttgataaacttggagccgagttctcagactccaaaacatgggccctttccactgtctgaatgtctcggaaaggctcaggccgtccttacatacgggaaatagtaaaccttagtggccatgatca

SEQ ID NO: 30813 - DNA, 1158 bp, Mus musculus
ggtagatggaaaccaaatggctcttacactcttttgtccctagagggcagcattaagacagaaacccagatcctcctgaaagaggtgcttgactttctagccttatggggagtgatgctgagtggttcctttactgagaagtagtgcagtatctgtccagtgcacacacacttcagctttagtgtgtgttaataacatttctaaaacttaagggaaatcttttccttcagaagcccttttgctaaagagaaaatcaagatgaatgcaagattcgcagcacttagctgaccacacccaggttgaagttctgagaaatggtttgttttgaagcagggaaaactcctggatgtagagtgcaacttctggaaaggtgtgagctggttgtcacgtaccactttttagaaaaagtgggagaagagcaggaacatagaacctgtaacttgggaagttgaaactagatagatagatacaaggcctgagctacaaggagaccttttcataaataagtaaataaatacacgcatacatacataataaataggtgctggagagatggctaagagcactgactgctcttccagaggtcctatgttcaattcccagcaacatggtggctcacaaccacctgtaatgtgatccaatgccctcttctggtgtgtctgaggacagtgatggtgcactcacatatatagaataaatagaaatcttttaaataaataatgaaagataataattataataaaaaacttgaccataccaggtggtagtggtgcatcccttttagtcccagcactcaggtggcagaggcaggcagatcttttgagtttgagcccagcctggtctacagtatgagttccaggatagcccgggttacatggagaaaccctgtcttgaaaaatccaaggggggggggggggagaagacgaaggaagataaggagaaatactgtaatggcatgtaagccaaatgtcccaaaaattcagggtcatcaaggtttcccagattctctggtatttgaaacatctagccatgggttgatgtagaggatgtggtcactggcaagaggctatgggccttggccattctccaggctcctcactccaggtctgaatcacacctcagtcccccttccattctctctgtatgcaacagcttccc

SEQ ID NO: 30814 - DNA, 1201 bp, Mus musculus
cttcctgtaaccaacatcaagggtcttgaccacagaaatgacaggaccagtcttacttacttacttacttacttacttacttacttacttattatcatctgatagcagtttgatttaaaaactgaagataagaaaatttggagacctgcacaaggtccccatttcttgtggggactgtgaaaccaccttgctaaccggcctgactggctgctctacagaaagactgatctgaaggttcccaagttgctagagtggggctggctttttcatccaagcatgctatcctgcctactggagtcagtcctagcatgggcagttctaaaactgtccttactcccatgagaacagttatatggaaaatgctagcaggctactaaaggccttctgtcagtagtgtatgtacacctgtgcctcctcctttctccccctcccacttcctgaaacagtacattccctcagcagattccatagtaagaatgttccatcttgcttgcttgattccagggtctttgtggtccattgccatagctccagaatacagtccttatcaaacacttatctcatgaacacttagactccagaacaggcagcaggaagactactctcaaggactccctgatcagctttcctgttgctggagccccttgccaagtttcccgtggtgcaccagcatcctcagtaacttattatcaatatatgaatgaattatattgcatttatgtcagtgtccaccatcacctatccacctcttgagctgaccacatactttttgttccataccacactattctggagcttatttgccccaagtcatgtcactaaatgttcagaacccttggtaaggactggctgaggtcctgttgcctgtgtttgaatgaccttccctggcacctcgaatttcagctacacttagttcttccctgaccaaaggcaagggttgcagcaactcctgaagaggaatgaagattgatggcttggtgacttaaccagttccttaagagatggctgacactactcctcgttgttcccagtcttcctgctctactcggtatctttaagatcctggcttccagctaggtatagtgcttcatttctttaatcccagcactcaggaggtggaagcagatgaatctctgagttggaggccagcctggtctacatagatagttgcaggagctacatagtgagactctgtctttta

SEQ ID NO: 30815 - DNA, 1193 bp, Mus musculus
ttggttaacttatttaataaagtcctcagaactcagagaaatgcttatacttcaaatttgttacataggttgttataaagctccaggtccaaagactgatcgggagggagggagggagggagggagggagggagggagggggggaggttggttggttggtagaggggtagatagttacatagagcaagcaagatccctaatatacaagctctgtctctgtagagtttggagacatcgccatcccagcaagggaatggagttttgtttgcattcctgtaagcctctggtgttgaacacccaaaaattctctagatcctgtcctttgaatttttaaggagtctttattacatggataagattgaagtgccacagcttacagaaatggcattagacaagagcctgatagtctagagaaacccaccaaggcttcagatccttcctggcctgtgatatgacccatctgaaattggaggtcttagtgtgcagtcacataaaacgttcagagaattgctttatggctggctccaatacaaaagacaagaaagaaggtagtatatatagttcttttggactggtcttgaagagaaattttgtagtctgccttggggaagaaaaaggaacagttgaaatggggcatgagcgggtcaagtggactgatttctcaggccaacagtgcccagcattgtagtaaataattgtctctcaactttatcactcacaagttgttgtgaagctgcttctagaatcaaggacaaagtgtcaaacactttaaccacactagtcactaagaaagtaataggggccatgggaaacatgattgagaaaaaaaaaggcctaagtggaaaacctggtgagatctcctgcctaagcttcttaccctggaaaaggaagatgctcaggggactgggaccattaagtcaggtcatttccatgtgttcactttgggaactatctttttcttcttatggttccccagaggtctagtaccttccccacccccccccctttttttttcctttctttttggtttttaggaacatcatcttctgtataacattcttagtaatgatgtatttgaaagatttttgagccatgggcatataggccaaatagtgaccttgggtgtctgaatagttagtgcttcttgtgatcctgccgcagaccctctgggcccctttgtctgcgtggaacgg

SEQ ID NO: 30816 - DNA, 1178 bp, Mus musculus
tgaatagatcattttaaactaagccagaagtctgtaaaggtgaggaatagccttagcactcctgtactctgtacaacaaagaactagacttagggtgttgtcatttctacacgccattggctcgcttgtctcacgtggatgcttacgcgtgtgtagaactcaatggctgggtagcacggtacgtgctgtggttaccgccgtgctctgttctcctgtccctcggaagtgagcgcacacacagcggactgtggcagacttcacccagtgccttctgccactccctccttggctttcgtatgtcgtcagagtgcattcctccttagatgatgggacgcagctcccgggaagttttcattgtgggggtgagcctttctcagaaccttggacccaagtccagagagttcgaaaaggtcatttcttgaaagggtctcctcaaagcagcagagccttagtgaacataaccttgtctggatgcggtgcctgatgatgactgccaaccatgtataccctgtagtcatgacgacagaaggtcggaatgacgtcacagagccactaaagcaacgtgacctgtagccactccgtgtctggactgtgggttttgttttttgtttttctgagagactgtttctaaaccaggtgacttagggacattctgttaataacaacaggacagcctggtgccccattacactctgtaggagttatgcaattcagaagtggaatttaggaaatcatttattttgatgtgtcaatagagagatttattgtctgtaaatttggatgtaaataatctgatcattgaaaatgaacttgaaacaattgtgtatgcttccttaagctgtcatcagcctgtaagatggtttccgaatgtgttcatatgtgcacatgtatgcatgtgtgttcatatgtgcacatgtatgcatgtgtgttcatatgtgcacatgtatgcatgtgtgtggatgccccaggacaacttcaagtgttctttgggtgctgtctccgttgtttgctgtaaaatggcccctggcattgtgtcaggagcctcctgtatgcagcttcccatcatcgtgggtccctcaagtgtccagccttcatacatgggacctgggagtggaacccaagtactggtcctcgctcagcaggcagcggcccatcggccacccacgactgcatcggca

SEQ ID NO: 30817 - DNA, 1256 bp, Mus musculus
tgtgggtagatgtgtggcatgtgcatgtgtgggtagatgtgtggcatgtgcatgtgtgtgtagatgtgtggcatgtacatgtgtgtgcatgtgtgcatgtgtgggtagatgtctggcatgtgcatgtagaggctagaggttgatgttgggagtctccttcagtcactcttccttatacatggatgactgagctggtgctccttgaggtagccagcttgctcaagtaacctggccgagcctgcctggcatctgtccatcggggacctgagctgcaggcatgcttgcagagcaggctcttgccccagagctatttcccagcagcttgccctgcagctctgaaagccaggtgacagcagctgccctgcccccaactgtcagtgttggcagtgaaaactccagggtcattttgtattgtctcaccaaggaggagcccagctgaagcagtcctttctctgcagggttgtgtgaccgctgtgtgcaccggttcgaccatcactgtgtttgggtgaacaactgcatcggggcctggaacaccaggtacttcctcatttacctcctgacgctgacggcttctgctgccaccatagccaccgtgactgctgcctttctgctccgcctagtgacagtgtctgatctctaccaggaaacttacctagatgacgtggggcatttccaggctgtggacactgtctttcttattcaggtaattttgcggtgggtctcaggaaaacatgaagctactcttttatcatttaaaaaatattccttttattaattctttgagaatgtcatacatgcatacagtgtatcttgcccctcccaactttgtgtcctctctgggctgcccatatatactgataggtgtggggccatttactagatcatgctcaaccttcctggacccacaccctgaaaggaaactgactgtccctgccccagaagccattagctgcctacagctcctcagctaggctgggggctttcccctctctgctctgtggaatgttgcctggcttgatcttatgcagacaaccatgtctgctatgagttcatgattctgtcttgtccgcagacactgttttactctgatctcctggcctctggctgtagaggctttctgttcccctcccccatcctgtgattgtccctgggccttaggtttgtctatgtgtatgtttgtctgtgtgtatatgtatgagagagagagagagagagagagagagagagagagagagagagagatatgaatgttctgt

SEQ ID NO: 30818 - DNA, 1113 bp, Mus musculus
tgccgtctcccagcctgcttccgagcctcccttgtctcctctgagcctgatgcgtccgggatctggttgtgggatgggctccattcaccactgcccttccctggttccccgcagctgcagattctgtgacctcaagcatgcaagggccttgaataatgtacccggaaagtgtccagcaaagggaaacgactggggccctaccccatgtggacaacctcaccatgcgtctggaccccggtgtgggcgcctcagtgataggcgtagtgacagtgacagtgacagctagagggatgatagacccccaaactagtggactttgaagttttcttcccaggtcagcagcggtacagcatcctctacttctgaatgcctttcacagtgcactctgccatggagacttattcagcagtatgtaagtgttgcgtttgattgtctccgcagccggttccagcctcctggaacaaccatgtcgccagttttgcgcgtgccaaattcacggcgctgcccaagcggagctgctatctgaattctccttggatgtggcaaagggaaatgaacgcaaaaggtgccgctggaagtgtccgacctagagaaatatgtagaccggagccctgttaccttgtgagaatggcatttttttgtttgtttcctttttgttaatagtttctgttttgattctctgcgttggaattttggtccagaatcctgcctcgtaaagccaatgtcagtgttcccagtttcttaacacgggctttttatatttcatcattctggtctggagggtgatgggtgacatcatgaccactgacctgttaaatatgcccaagtttgggtgtgggaccctgactacctctaggagttgctcattctgatgaggtcggcgcaggttcttttgcaggactttatcagtatccatgtgaatatttaaagatgtaaaagggtgtattgctgggtgtggtggtgcacttctggaatcccaaccctttgaaagctgagacaggagaattctgagttccaaactagcctggcctgcatagtcagatcctgtctcaaaaaacaaggggttggtgggctgggagctcgctcggtgagtgagggtgcttgctgtgcaag

SEQ ID NO: 30819 - DNA, 2522 bp, Mus musculus
gtctgtcaggggcctgcctgcctgccctgctcccttcttggtgctgtggtaaaccacaagagcactttgctttaatgctctcagcggtgttttcattgtatgaattacgctcatcaagctggtggctcagttggtagcatgcttttctagtgtgctccgtaccctgggtttaatcctcagcactgcagaacaccaggcatggtgatcaaagcactgggaggtggagacaggaattcaaggtcattcctaggtacatttccactttgaggctgacttgagtgccccctgcatgagcccctttctccaaacaaaatgaacaaaaaactccaaggttcagtcagggctaagatttctgacagccatcaaagctcttaccactcagttgcagtaagtgcctcattaaacagtttgaggtagctgtgctcacagatctgggggaacactgcatgtgagtctgtagcctgcccctctccttcatgtcagtaaacagaaccaacacagagctttccaattgtacctttactttcgcagactctgtttgctggtattcagggtttctggttgctgctgtggaaatgcagtggtgagctcagcacccttatatatgtgcatttgcacatttgtgtaaatataggacatacagattactagctgaaaactatttgtggtccctgttcagaaaagaaagatgcacatctgatggatgcaggcagactcctgcagagctgagctcagacctagcctgggacccttagccacacagccaggtgcctggtggtgggcctgctccgtgccaggacatagcatcttaggtttgttttctgttttgctttgttttttcttgagacagagtctcactatgagcacaggctagtctaagtctcgtactgttgctgctctgcctcctgagtgccgggactaaaggtgtgcgccactcccgactagtctggctgtgtgcgtttctgttagctccttgtatttgggcatgtgtatgaagcaaggaccggggaaaggagactgagctcgcccacgtggtaacctcttgtttgttctatctgtccaatcgcagtactcaaagggaagaagctcagcctgccagcctaagtgccaaagaccagcagcagcctctgcccttcggggtgctcggacagggtctcaccatggcgaaggcgaaggcgaaggctcgggatgctcagtgggcagaagcagaggcttctgcggcagccactcactggtggctcttcgaggatgcagaggaagagaccaggaggcttctgtctactgcatcctgccttatcttttttattactatgtacaaagatttttttacacaaagaaacttaatgctgtgttaataaattcagtatgtagatgaattgggacagtttccaaaagtgacgattttgtgcacaataagtacaagccttttttattttttgagaatttgttgaggtggtcaattctttgtgtctacaatgaaattatactccttgacacttggtagattatccaaacatctgtcaaatttccatgctatttattttctttcttttctttctttcttttttttttttttttttttttttgccaaaaagataagttgtgtttgtttgaaatctgagacattgtgttccattggtgtttctgtccaaaagagtcctcgttgtcctggaaacccttcctcagatgtcacactacatgtcaggttcgggaggatgactagaaagtcctaaggtttcattaccaaaacttgaaggttcccagcagaaactcagctgatgctcaccaaacgctcacccttcccccgctgaggtgtggcagcttgaggttatccgagggtgctgagagctgccacacccagagggtctgagccacctgccctctgactatggagagggctgggggtgatggctgttttggatagaggactcagctcctctgaggaatggaacacaaatagccacctgtcactgtcagtccgaaggatcactacaaccatgttagactcaaatgtttttctcatagcacttttggtgataaaatgattgacaatctttttaattggcaacaccagttatcattccttacattctttttagtattttttttaaactgggctcttgcatgacctatattgtgttaacatcctaaataaacattttattaaacagaatgtatggtcttttctatgaatcaggcttcaactattcagtgttagatgcagcaaaagctctatagggctgcatacatttaagactgacctaaggagacggagagatggcttgatggctaggcacttgttgtcctttgagttcaattcccagcacccatgtggtggcttacagtcacctataactccagttccaggggctctagcacccttttctgggctctgaggacatacacatgcatgtatcacccttacatacacaaaagtaatatggataacgccctgttgatgggaacactagggtttttcatcatattgtgactttatacgatgcaccgttaatattagaagt

SEQ ID NO: 30820 - DNA, 1154 bp, Mus musculus
cttaagactgattgactgtgcgtggcttctgtgaggctggtatggtggtatctgtctatcaacagttacctgaggggtccctgcagaaatggacaccaaaatgaccatacaatttatacaaccttttctttctttctttctttttttttttttttttgcttgttttgatttttcaagaccgggttcctctgtgtggcgctggctgtcctggactcaccctgtagaccaggctggcctcaaaactcagatttgcctgcctctgcctctgagtgttgggactaacggcatgggccaccactgcctggcctatggaaccacttttaaccatagtattaacaggatccggagttgggaacacgcataggtgttgggacttgtaggccagcccatggcataagccacctaagaagtctacatctgaagacccttagtgggtctgcaaggcccctgctcctgatgggctcccatcctgctgtttacacgagtctgaactttaagacaacagatgagcactttatacttgcctgcgtctttccggggtcactaggacagcctgagtgtcctctgagctggcactgcagcccctccctcatggatacatgagctagctgatcactaactcttatgtatgcttaattctcacattatcagacctctgagccaggtggtaggctcaggggaatttaaataaataaataaagtagttggtataccatcaaaagcctgcaaggaaggtgtgggattcctgagagccaggaacttgctgagttccagtgtgccatttccccgtgtcagtcaggacactgggattacaagcatggactactgtacccaggggtgatgaggtttcacctttccattctaaatcaagttgccttgtctctctggttactaagaactacatacattacggaatccaacaagcacagaacacaattaaaaataaaaaaaaaatccagaaaacaacaaaaaagtatggtggtggcttgggcctgttatcttcaccacttagatgtgggcaggaggaccagacactggaggtcacaactttaaaggatccaagccatcttttgctacacgagatgttgtctccaaacaaatctccaaaggggggcaagtaagcctgaagggaaaccctgtaggatactaagtat

SEQ ID NO: 30821 - DNA, 2526 bp, Mus musculus
atggcagagagaagaggggaggggcttcaccttgtttctttcttcacgtgtagtggtatcctgaagtgcgacaccactgtcccaatactcctatcatcctcgtggggacgaagcttgatcttagggatgataaggacaccattgagaagctgaaggagaagaagctgactcccatcacctacccgcaggggctggccatggcgaaagagatcggtatgaaaccctcatttcttgtgtctgccttgcagtcctggtgccaggcagctggagtccacctgagagagggaagtttctccttcttggggtctctttgctttgggcaaccagccaggccaggcctttgttggtgtgggagttgactgctgggccacgccatgctgactcaggggctgtcctgcggaacatctgtcattgcctgtggctgtcttttctaggtgctgtcaaatacctggagtgctcagctctcacacagcgaggactcaagacagtgtttgacgaagctatccgagcggttctctgtccccctcctgtcaagaagaggaagagaaaatgcctgctgttgtaaatgtcggagcccctcgttctcggtcctgcctggaacctttgtacgctttgctcaaaaatcagcgagccttcgcatttgatgccaagtttttgttacagattaatttttccataaaaccattttgaaccaatgaaccagtcaataattttaaggttctgttttaaatgtaagaattccaacttacagtctattaaaattcagccctaaaatgacaaagccttcttaaagccttatttttaaaatcccccattcttgctcagattaaaaattgccaaaataccttctgaactaagttgcgttgtgctgagaacacctaagcactaaactctcttgagagacttctgttgctaagaagaccgcagcttctggagccaggggtgcagacccttccagagttcccagaccgtgtgacacagcacagcctccttaatgacacgttgccatgtaacgcacctgtaacttatcagcccatgttcattacgtaactttgtactgtacgtcacagtgatgagtgtgacagctcagctctttgatttcatagtgagttttctaaaagaccagccgactagcttttgcagactttgaacagaactctggttcctgtgttgcctctaatgaagtattctgttcctagttgtgggtgtgctgggtggagtgtgaaacacgacatgatcaaaggagacagacagtattttgactaatatgaagtagagattactttacactacattgtacatggagtaattcaactgaataaaagtgtcacgggtaaagctttttaacggttaatttctgtcaaacagtaggtgacaaatggccgatcttatcagtgtctcttgagcatcccttcgcgccccccaccctccactgccgtccctccccagatggggcgttgagtccatatttaaactggccaccctcacagttctaacttagcaagtgcttttctttagaaccccttcttaacgagcaatatgtctgacctgtactataagatctttctgataacgcagagattttttgtttttttttggtagctcagtagaagtgcgtcctgttttcgccttactttactcagagctagttagtgcttccttagtttcctagcaactaggtgtgcaaatcatgtgttgcagctttacggtttttaaactattttagatattcttaaactatgaaccttctaaacagtaccaacactgtcatgtgactaatgctgcctctagacctcgcccacgtggacagacgcttcctgtcatggctctgcctagagatgttccttggggtctgtgaggttctgtcaactgctagtgctaacgctgtcctgtacaacctaactcactggcaagaatgcagtgttgggcctttcaaccactagaacaaacttttttcaattgacagttgcagaattgtggagtgtttttacattgatcttttgctaatgcagttagcagtatgttttgcatgtatgaattaataaatccttgaatcatacaactggttatgcttgtgtttttggaatttgacaagctcttggcgtgtttgctctacttttaaaccctggatcactggagggatggagtcccaccttcagagaatagggtaggtgagcccacagccacatttgtggagtggggctggtttgagccgttgttaagccgtcgtgaggtgcttgtgtggggctccccacagtggggtatgtctgcctgagccgtgtgtctgggaggtgtgccagggctgagtgctgcagatggggaagctgagccacggggcttagcatggaccacatctcaaccagttagacggccattaggattagccctcattggtgattcttaaactttgaatctttaaataaaaattacatgtgtgtgcacgcacatttctctgtgggatatagatcaggctggcctcaaactccctcgtgctgggattaaaatttgtaccatttcccagtctaa

SEQ ID NO: 30822 - DNA, 1172 bp, Mus musculus
ttgagacagtctcatcaggctgacgtagaactccttttaccccaagtccttctgcctcatctttctgaacactgggattataggcttgtaccaccatggcaggctcccttgacttgtttctgagagagttctagaaatcattgtgtgtggttcgggcaggtgttacagtgtacagatttggggctgtggtattggtgagaaccaacagcagagattgtcctgtgaccttgacacgtgcactcactcacatgtgtatccgtcacacacagaacagctgtttgaaagcatgtgagctcactctagttatactaatgttaaaagctagttatcctatctaaggtgataggaacaaatgagcttcaaagtgcttgctttccttgtggggctaccctgtgtgtcctgggctctgggctccgggctccagccccggtgtgcctgtacctggggaaagaagagccagtttcttcacctgatagttttgtgagatgcaattaaatttgaggaaatatgaactcattctacatgcaaaaaaacaaaaacaaaaaccaaaacgaatggaggagaagctaaggatgtaggccagtggtcagatgttagcttagcatggatgatgaggtcctaggtccatctctaacacgttcaagaactgaagaaaacatttattggtaaattaatttggtaaaggattaataccctaaatacagaaagattttttacaattaaaaataaataaataaaatacaaaccccaagtagcccaatccagtcattggcagagtgttggagtagaggtttgtctgagaagatagacagatggccagcatgtccttgagactggactgtagaagaaagcgcaccactcaggagcagtgggaggccacgtcacacctgtcgggatggctgttgtcagggcagtggtgggaggaggggttgcaggagcagatgttgcagtggctgtcctctgtcgttttgtgctgctgggtgggagtctggtggttcttcacacagttgaacatggacttaacgcacagtctagtaagtctacctgagaggtttgaaaacggtttaaagtccgggactccagtcttaatacacagtggcccaaagacagcagcatcaagtctgtggacaggtgagtggatgagtagatgaaaatgggcactgggaatgtgg

SEQ ID NO: 30823 - DNA, 1136 bp, Mus musculus
gcagtttcttttgcattaagtctggcgtatgctgcagccgttcagttcctgttgtttcctgtgaaccagacgcacctcggtggttgatgcagagggggacgttttcgagcatgttctcaatcgtttcggaaagacgctcagaactgggaaccccccctcccccaggaaaatgattgatgtgctccgtataagatcagacaggaacctttatcacagagttctaaatcatggagacccatcctcaagggctagcgtccggatgccgcctgcctccgctcacctctggccatctgatggaagtggaggcctgtaggctacgccttccacttcttgtaagccttgcttcagtcatgaagagtcttgcttgccatttctgcactgtactgactcggccagaggtcccttctcacgtgtccccctccttccgcccgagttgcagtttttaatggaggcactttggagaagttgcaatattaaattgaggataatttacaattacagaagagtctgaagctttcctgccgacagaacacagacagcaaacgaagcaatgaagcattttcctttataccggcccaggacttgtgatttcttttacattaagattttcttccaaagtgaccctccctccttctgtggtttggtaactttaataaaggtcatttaaagagtggacattttacagcctccctacccaagacagagttaaaaacagccatgggagagttgggggaccctgactgtatatgtcatttatattgtgtcctaaattactatgccatgggctattttagtgttttgggaaaataataaaatctgttctttagcataataaatatgttttattttgtgtgtgtgcgtatgttctccttatcttttcgttaatgtcgtcgtcttcctaggatttcagcatctttagcagtgagtgaaaggttgctggtgaagacttaagaatcagctcaaagaaaaaaaaacctaacacaaagatgggtttgaagttttcctcctccctctccctcctcttccctctcctccctcctcttcctccctttctccctgctccctccctccctgcctgagctcctgtccccctccctctctccaggttatgaaatagtgcactatagctggttaat

SEQ ID NO: 30824 - DNA, 1119 bp, Mus musculus
aagctccagcccactttacttcctttcttccccagagcaagcatcagtagggacccgttctatgacatgttggccacgaggaaaaggaggattgccaataagaaataggtaaatgtcaggatccagactccagcagatacactggcctccccagcggcaggaccggggacgatgtggtgcccacgggccctccagaacagccagccaaggcctgagccctcaagcctgtgctctgggacattggtcagctgggagtgtctccttcctgccaccggcctggcattgacctttggggacccttgtccacaacagcacctggtgatacagcctccagatctgcacagcccacatgggactcctgttctggagccagagcctcacccacaccatgccacacctgctctttggggcaacactagatgttctagaagtcgctgttttatatcaaaatgggaaaggaaaacctaccacttttttattcagaatttttctcagatatataggattatagcttttatatgcctttttatattctgaaaattataatgaaagatacttaatttctaacagtagtatttttagaatggcagctataaacttaactcctggacacacgtatatactgtgcactgaaaacagtctatatatgcagcccccatgcacttggggccagagcagctggggcacagtcatcctgacagagtgtcagctgggtgaagaggcattggggtgagtgtggagagcagtgtgcttgggagattcaggcgtgactgccacttcccctcacatgcttctctaagatgaatcagtaaggtacagctatggccggggtatttatcctgtcagtgccaaggcctggagatggagttccttctctggaaaacaggccacttatgtgcagaacctcctcttgtctgaccttcatacaggacagtttcatgtggtccgagtgcacatggctcatgactttggtacttttgttgcttgctgtttcaaacttgggttaagtgctaacacatattttgatgtagtaagcaagcagaagcagccagaagtaatccacctgttctctggagtgccatgttttccaacatttgacatcctttggaggaggtgaaa

SEQ ID NO: 30825 - DNA, 1184 bp, Mus musculus
acatccagacccctaacacacacacacacacacaccagtgcatgccttcagggcatatgtgcttgggctgagactgggtaagatgagagggcccattcatggcttatttggaaaatggtcttcccctgcacgtggagctggtgttctgagagcccttgaaaaccgccaaccaaatgcccttacacgagactttcagtgagctgtcttaaggctttttgcctgaccttggtggtagctgccatctaagatggcacagaaggatgtgcaggccagagctccctcgctcgtgcaccagactgatcactttttggtttattcccaagcttctaggctttgcttttactgatacctcaaatctgaaacccttgcatttgagctgcctggctggtgtgtatgcagcctggcttccagtcttccatgatccctatcccctattccccaccccagacctgaatttactgctggtggggcacctgtagggaggtaggaactggcatttttttcaatcaggaccatggtgagccggtcagatgttcaacccaggtgtggccctgggcaacagagctctctgtgggatattgaggtcaggacgttaagcatgaggctacctaatgttgtctttgatgccatagtcatctttgaggggaccttgcctgatggctgttggtgctaagaatcctaagttactggctcttggagtatccacatggagtcacttaactcaggttatgttgtgacagtgttaaacccaagggcatctgccactcccagagcttgtaaaggctcaggcactcctgcccttcaccctttgtctgcactcgtcagtgaagcattaaagccctactctgcccaaagacagttccctgtcctgctgggccctgggcatcattcctgggtttcagaagacttgatgtggtactgcagagtaactaggaaccgtctggggatgggacttactgtgcttcctgtcatgctgagttcagagctacaggtgtgctttgctgacaagttaggtcgttacagaccagaaaccatgttgtgatttctttttatcttagaaaacatttctatttacaataaatagttactatgtaaataatgtacatatgtattaatttcttcagtgttatacaatgtatatactcctacaacctgcatgaagaaatatcctattaatgttgata

SEQ ID NO: 30826 - DNA, 1117 bp, Mus musculus
ccagcagggactcgggagatgccacgcctctcctgctgcttgtttctttcctattcttttgccagtttgcttattttccttacagaatactaagttactttctgctctcagacttgctgggatttactctgtccgatttattcggtacagggtcttactatgtagctcagactggtctttaatttaatttgtagcccaggctagcttcactttgacagttctcccgcctcggcttcctaggtcttgggattacagatttctgaccccctgtcaatattctaaatctcagtgaatgctgcccagatttgacattctctctctctctctctctctcttgaatttaagacagtgtcccatgtagcgcagccttgcctagagcctgctgtgtagctgaggagctacggcttctcctgcctttggctcccagttggcactggggtgctgaggctgcaggcgtgtgcccagaaggcctgccttgctactcacttagcagtgtaagcttcccccaggcttggaagagcagtgcagacacccttgtcagttacgttcacgtttgtgttactgttttttacttctagagaccaaggtggtgttaaagataatgaaagcagttcgtccattgtctttgctgaactcaccccagaaaaagaaaaaccttttggggagtctgaggttaaaaatgagaataacaacctggtgagctacacggccaacttagtggtcaggaacagcagtgaaagtgaatcgtccattgagctccaagaagacggcttgactgatttgtccgtcagaccagttgtcaggcatcagctgccgctggggcatagctcggaattggaagggaattttacatccacggatgagtcttctgaaggcaacttgaacctgctggggcagacggaggtagagtgctttcccagatcccgcagctgtgcaaggggttgactctgtatggcaatcctttttcctcagctgacgtcccgcctgctggacatgctccatgggttttcttctgtttagtctcatggactcagtgtggttcctttggctatatggtatttttcaggtttgggtttctttttccccctcacacagggtttcatatagcccagggctg

SEQ ID NO: 30827 - DNA, 1139 bp, Mus musculus
gcaactaagcctcctttctcaggacagagggctgaagagatgagagggaaaatggggcctaccctgtggcctgagttatgccgccaagcatgtgaaagtggacttgcattatagtcaataggaatgtacatttccaacccttagtgaggacaggtgtgactcccagttgtactgagaaaacctatgtaaagacttaaaaggaccccagcttcctttccctcaacccttccatgacccaagactggactaaatgaagcctcttcctcccacctcctccaagttttgattcctcaatttcctactcaaatgttactccccacccctgaacctatttttttaagctctgcctattgaccaggaatcctgccttccttcccgagggctgtactacagaatcagtgctccctccccacacccgcttgcctgccccaggatgactgccagcctggctgctgttgctgtggcagctgcaagtcttccctggtccttctgtactgctgccatggccagttaccaggacacttgatcactccttggctcaaaatgtctgtgggctctgtactgcctggaaggtcagagttctgcttcgaagcactgtgcactcttccagccctctgttctttccacttggcatcatcctgcagcttgccctaaagtgatctcagcagctaaaatgtcttctacctttattctgtatagtctcccatgatccgttgcctccttaaagccccaactccccaaaccacctgaagtcctcagatagcaatctctgacgccataaagtgcctgcctctggctggcagccatctcagtgcactgcacttggttttactcactttaaaataaaataaactccatagatgatatggtactttattggacaagtccctttctgacaacagactggaagccgtaccattcttctgttgaaccctgcaagacaagctgctcgaattcacttaaggagctgaagggcagtgctgaagggggccaggttttcacaggacttaagccaccgctgcacattggtgggtgctgccccactgctgcccccagtctgctggagcacagaccacagcaccacatctgccacagtgagctcatttccaaccagccacgggctcctccccaaagcggag

SEQ ID NO: 30828 - DNA, 1135 bp, Mus musculus
tatgcaagagcctttaggttttctgtttgcttggtttctcaagacagggtttccctgtgtaaccgtggctgtcctagaactcccttagtaatctaggctggtctcaaactcaagagatctacctgcctctgcctcccaagtactgggacgaaaggcgtgcgccaccactgcccagctgagcctttagtttttacatttttgttgtttctgagacagagtctccactatgtttccttggcttgttcgatagatcacctggcctggaactcagatccactttactctgcttgctaagtgctgggattaaaggtgcatgccacaccagcttctaagtgcaacctactcccttcaaaaagtgatcaaggcccagtgagatgactgtgggtacaggctcctgagttcagtcctcagggcttataagcagaacacaggacaacgtagaagacttgttcctgacctctacaggtttgcttccatgcaaccacacacatacacaatgtatgcttaaaaagaatttataagtgactagccctttccgcttttgtgtttataatggtcttcatcaagctagacagaactcagaccatcaattccatccccttgccattaactttggaggctacagcccagaaactagacgttccattgcttgcccagggcaaggatctcttcactctggacgtgaggctgagggagatagcactgggtggctcagcataaaggtgcatgtgcagaattctttctctggaagttgagataagaaaaccaaaggccagagtttggagctagcttgggttatgaattgagacactgtctcaaaataggacaggtatcactgaacgggtgacaggcaataatgtgtttctacctaaatgaagctcaggcaggagaggtatttctctgtggaacaatgaataaataataccctgctgtcctttacaggtcaaacagaaagacactgttggtgttccttgttttttaaatatgaccagtggggagggatagctatttccttggtttgcaaggttgcacaggaggaccccttcctccaaggctctgcttccctggaactgtctcactgagaaacccctcattcggaacactgagggcatctggtctcagacttacctccctc

SEQ ID NO: 30829 - DNA, 1207 bp, Mus musculus
gataatcttgagccctttctccaccagtggagaaagagcttccaagtgctggggttagaagtgtgtgcctgcctaactcagaacaattatcttaccatgcttatcactattgtttgatctcattttctttctttcttttttttttttattttggtttttcgagacagggtttctctgtgtagccctggctgtcctggaactcactctgtagaccaggctggcctcaaactcagaaattcacctgcctctgcctcccaccatctcgttttctaaagactaaaatttgttaggtctcaaatggctaactgaggtgccctttaacatatcaaagcagacactggccctcaggtccacccagcacccctcagtctctaccagtgacagggcctcctggttggtttaccccatcccctaccctgaaatctccagcccagaactgagcagggcttccctctccctagctcctctggctgctacataactaagccgtttggctatgccaacgtcccagctcaggctggccacgttcactccggactctccagctgtccctgcctctgctctcccttttatctacaataaactttaccctccaaccttaggagttgtcgcgctcttccttttacgttcttccccacccctttcagttttctactgattatctatcgcagcccagatttccagcagatagaaaatggggcattttggataaatacgtaaagagatgccgctgtgggcatctcctgatccttgtcatccctgattttgcctacactgggagagaagtggttaattcagaacctggtggtattaacagttgtccagctgcggaactatgaaaacaagagcagacatggatcagtggtccgtcagctagacgccgtcttggccccataagtgagcatctgagtttgacccctggaatctacatggaaggaaagactcaatgcccctgtgctgtcccctgacctccagtcacatgtgcacacataataaatgtagaaaaacgaaataaagcctatagcaactgtgattggtttcttaatgcatgccagactgtacttggcaaagaggatgcgttggtacaaaggatgagctgttggctctctgtggagttactctctcagtagtgactgctccagatgaccaagataggagaatgccagtgctgccttaaagcagtgctcagacttgatcacttgctcca

SEQ ID NO: 30830 - DNA, 1348 bp, Mus musculus
tctctccagccctggtttcgtttctttgagacagagtctctgttccacacaggctggccaggaattctctgcctccttatctgagccttctcagtgcagggatcatagggtgtggcatctgctcagcatgggtgggcatctgtgatggagcagcagagctgggtcacagatgtgcatacgtcaaggcttcatttatatcccctttaggatgggttctggccagtgttgctgtattttatttgcagtttgccctttgctttgtggactgcctgttcacgtgaagataaccctcctgttcctgctcagcacactccctgatacttttttctgttcctctctgctaggtaacttagtaaagctgcatactgcagaactagaaaagcctgtgccaggaaagcaagataactctccttcactgaagagcacagcagacgagaaaagggtagcatccatctccaggctgagagaggccttttctcttcatcctactaaagagatcaagtctaggggtccagagactgctgaactgacacggagttttccaagtgagaaaaggggcgtgttatcctcttatccttcagacgtcatctcttacagaggcctccgtggctcgcaggacaaattggtgagtcccacggacagccctggtgactgtatggacagagagaaaatagaaaaagactcagggctcagcagcacctcagctggctctgaggaagggttcagcaccccagaagtggccagtagctttagcagtgactataacgtgagctccccagaagacagaccttctcaggaaaccataaactgtggtgacttggactgccgtcctccaggtacaggacagtccttgaagccagaagaccatggatatcaatgcaaagctctacctctagctcgtctgtcacccacaaatgccaagcgcttcaagacagaggaaagaccctcaaatgtcaacatttctcaaagattgcctggtcctcagagcacctcagcagctgaggtcgatgtagccataaaaatgaataagagaatcgtgctcctcgagttctctctgagttctctagctaagcgaatgaagcagttacagcacctaaaggcgcagaacaaacatgaactgagttacagaaaatttagggccaagatttgccctggagaaaaccaagcagcagaagatgaactcagaaaagagattaggtactgtgtgttcttaccggtcttctggccaggcttgtgattggttactttgactgagtgaaggcttgtgattggttactttgtctgagtgaaggctcagtttgtagagcttcagtgtcggctgctctaggtatcttgcgtgtcttcattt

SEQ ID NO: 30831 - DNA, 1256 bp, Mus musculus
gcatgcagagataaaatgggagtttaaaggggtgggcatggagctcagtggtatagcatttgcctggcatactcaaggccctgggctctctacttagcaccacagaaattaaaataggtggatttgatggatcaactaatccaaggtgattatctctggaaaacccttgatcgacatctcaagactgtggccagggtttttgtacatccatcccgtcagcttctcaggagcattgcacttctagtgctgacccacgaggatctcaggctctccgcaaaccagttcttttagaaccaaaacagtggtaccctagtgtgttgggaaacatggaggtctcaggagtttgtgagctgtttctctgactgccttctctgttggttattactgcgtcctcttcttaagagaaagtcaaaattaatgcagacatttacttatttcctacctttatccccatagaactgaaggcactgatcatagcatgcagccctcaagggcagaagctatgctccttgacacactgttttctgttctttctgcagaagaggtgaagaaactgtgtgccacgcagttcaacaacatcttcttcttggattgactccactggctcagcagaacatctttaaaaacctcaacaacctttgtgtttaccattacaacttactggtcatgctagtgactgggttagggacacagtaaagcaatacctgcttggaaaaccacatttctacttggtctgatgattccctgaggtttctagatgttaaatatttatgtgaaattaattaaatgtagtcagctgaataccattccattctgctgacattgtatgggtattttactgggaaataagactaataaattgttaaagtttttaaaaatactggtttcctgttgagtcctgtgttgctggctgttttgactgcactggccagtagggctcataactccaggtcaggggccaggccaggccaggctcagaggacttggatccagttctcaccgccttcgtcaggctactcacagtctcctgtagcccaggccaggttctaaggcagtggttctccagctgcctaatgccgggatactgtgctcacccccagccagagcaggattttattgctactgttacatgaaccatactgtaaatatctgatatgcagcccctgaggaaggctgggtccaccctgaaggggtcctgaccctgtagcaggttgagagccactgctctcggggtctgatgctccttttgttctccc

SEQ ID NO: 30832 - DNA, 1368 bp, Mus musculus
tcacagaagaaggatctcctactgcccccacagacccaattctgaagccagaagaaaccaaatcctttagagatgtcagagtccccgaggactccatctgcttggagctaggccccgaccccgtgactgttggagttgaaattcctgctactgatgccaaaaccctcgatgggggcaacagacccccagacgtcacttgccaaagcaaggaggccttgagtctaaccaacagacaccccatccttgtgaatgatattactgctcagggtagcgtggagagttgtcttccagaatcgagacaggatttacaaaatgagccattttcagaagaccctcttagtgtcagctcactggagaaacactcggaagctgcggagactttaaaccagcttaactctaaggctgccccggaggatgcagccttggcgtctgccctctcctcggattctaccagccaagatagcctcttagaagacagtttgtcaacacccatccccacctcagagcagtctgtggagacgccagactccctggattcagtggatgtccgtgaagcattgctagagtccctaggctcccacacccctcggaaactcttgcctcccgataagcctgccgacagcggctatgagacggagaacctggaatctcctgagtggaccctgcaccctgcacccgaaggcactgctgactcagacgcagctgcagcaggtgacagtggccacagcagtttgcctcccaacccggtcattgtcatctcggatgcaggcgatggccacagaggtgctgaaggtcctcctcagagcttcacacttggcccccagagttcatatcgagactctgcatacttctcagacaatgactcggagccagataaaaagcccgaggaggtcccaggaacatctgccaatgccctggtgttggtaaagggccagtccccacctgagtcagttgtcccagaagaaagctctgatgtcagagaaggctgcctggaagccccacaggacaagccagatcaaagtcgggtgtctactttgcagaattcttgtcactcagaactacaagaaacattgcagcccacaccagctgatgcttccagagagtcctgtcctgtgaacgacgaggccagcagccccttgagtttgttgaattcagaacctagcagctgcgatgacctggacacacaggaagatcgcccatgcaccctggcctccacaggtacaaataccaatgaactccttgcatacatgagttccacactggataaatctttgcccagccacttggagagctccaagctgaaggagccagacattgaagggaaataccttggcaaactttgtgtgtctgggatgctggacctctcgg

SEQ ID NO: 30833 - DNA, 1099 bp, Mus musculus
aaacagcacccgtcttctttattgctgcttgtgggattagctgagcctgacgtgtgggtgggctagccgactgcctgcccacctccagctgctttcagggctctcccaaggctgacctccagaaccagctggggcggctcctaggagcagaggcaagcctgcctctcctgtttgtagagttggtttgggttttggctttctttggtttgcgttgctggttgctgttgtccttggctgagctgttagggccatggctagattgatgagtagggaagtggcttcctcccagggagcctctccaaagaacggctttcagcttcctggattttttttttctatattgttttctcttttcagtttcattgctatctccttcatctttagtacttccttatactcacattgggttgggtttttccctagtatttattttttttagtgagtatgggtgttttacctgcatatatgtctgtgtatcgcatgcatgatgtgcccaaagaggtcagttgagggtgtcagatcctctggagctggagttagagatggttgtgagctgctgccatgtgggtgctaggaatcaaagccaggacccctgggagagcagccagtgctcctgagccagctctccagacccttttcctagattctgggagttaacttttttctgttagcctttaattgttgctgctgttgctgcttcccggaggttttacatacgttgtatttctgtttctatttcatccagctcaatgagctcctggactcccttaaggcttcttcatcagagatttatatgcacattatttaattcctgagagttagagatccccttttctttatggttaatgcatttatcttatttactacatttctacttggtgtgtatgcgctcattgccgcctcaccgctgtgtgcatgtagaggtcagagagtaagttgaagagtcatctctctgccctgtgagccctgagagtccaattcaggtcattgcgcttggcagcaagcacctttacccatggagtatatccccactttcttttcccacttactcgtctgtttttgcagtgtgtgtgtgtgtgtgtgtgtgtgtgtgtgtgta

SEQ ID NO: 30834 - DNA, 3966 bp, Mus musculus
caggtgtacaggtcagcgcccgagtgtgaccatggagcctctgtgggagccaagcacctgtgtgtgcagccctgcaggttgtgggaaggaggggagacagggcagcacaggagggcaccagctatgcttccttttcctgccgttctggtctgctcgcctccatgctggcactctctgggtagtcggctcttaaatctgacctgcgctgttatgttgcttctgtctggacataggcagcagtgaagacggagacaaggactagttggctgtagacactctcccagccagcagcgctcctgcttgtccacctgagcaacgcaatccactccatgctgactggcaccagacagtgagcggctcaggagtgatggaaagcggggccaccacgccaggaagcaactccctctgcagcgctcgtctgcccgctcgcctgggctgctcctgcactcgtgctgggcatcctgccgaagtggccacactgccacactgctctggctcacgagtattggaggacctgagcacctcaggccgtgggtctgtgtggggtgtgtgggtgtggatgtctgcctcgccacaggtgccacagaggggcaggcgcaccaggggagggagtgctcacaagtgagccatatttattgtctttaggaaatcactaattgctctttgactgcactgtgggtgagtgttctgagctcccaatattgtacagcatcgtaaattatccaaggaagatatggcaggccaagctggtgctgaccgctggtttgattttcttttttgtttttgtttttgtctctgtctccttgggtgtctgctctgcatggcactgtaaagcttcggtattttgagtgttcttctttcttagacccacccgcgggaaccgttcacaggtaccctccctcgggcccttttgattctgggagttaggttgtgttttatgttcttagaggacatatttttgatgaggccaaaactgctgttctgtttcgttgattgcatcgagcatgtttctatataaggtgggtactctgagcagcctgccctgcctctcgtgctttgaaattcttttggtagaaatccctgaagaggtgcacccatcactcagtgcccagggtccttttctggcgagatgaggccatgcaccacttgctcagcacagaggccagcttgcgggagctctgcgtctcaggcaggtgggacctctgagacactggtccccacagagctgtaagtgagaagagcagtttgtccactctgggtgctgctgagggagctgtttgggaagaagccatccctggccatagcccccaggatacagccagcccctgtagctgcaagtagcagggcagagaccccagcagggcctccagcagccctcatggcccctttcctgtaccaagcacccagctctcctcttgttctgaaagggatttcacatcttcagcgtagcttcagtacatcatcggaggagtctgctgtccctaacacagagggagacctcgctttcctaccccaagcaagtattggtggccatggcagcgtggcgaagccatgctgggcgggagctgcacctgctggcgtggctcttctcactgagctcctcgccccaaatatcccggtgctgcccctgctgtccaggctccagtgtgacaatgggttgagtctccaggccctggccaggacatcctgctatcaatcagaaggacttggactctcctgcagagtgcaagtgtgggtgtcggtgtgagttcacctaacaaatcatgacctttatcatcaactctgattcgatccatgcgttttttttatactaagcaataactttacgatcaacagaagaaattttaaaacagagtctccttttcccatccttggtgcagactgtgcctgcctggactccgtagaaagcactggattttgtgacatgtatattaaaaacagggcatttcaaagtaattttgccaaaattgtcataactgaatttttgctgtgtggactttctgatttttttttaattatttttttacctctatctaccagctttagttgagaaagaaaggaggtgtaattataataagttttttttgtttttttttttcaaattacaggtttcagaagttgagattcactgattacagtcaggtggatccatatgtgtagcctcctttcgcagccagcctgggatagagttactgacatttgagggctggccatctttcaccatgctgaggggattttaacaatacaattcccgtttatatttatatctatattgttctcatggtaaattgccaaaataaaagcattttatatattgagttggggtgggggtgggatagatcttctgtgtcgttgcatggaagggaagactttgtataacacgcatcaacacatcctccccaaatctcaagcaatagacagaaatctcagtagactaaactccagcccattttttaaatgtgagcatgtgctttgccatccagtgtgggttttgttttggtttaggttttgttttttgtttttcaagatagggtttctctgtgtagccctggctgttctggaacttgctgtatagtccaggctggcctcaaactcagagatccacctgcctctgccccctgatgctgccaccatacccagctggttttatcttttaatgataacttaggtgcccttggtgggctttccaaacctggttactcaacgttagcagtgaagcgagccggtggtgactgtggctggaatgtggtgggcttggtgacttttctttctgccctcccttgagtgctcaccctccacctaccagactggaagctgactttaagtcctctaataaaaataatgagccctccaagtccctcttgatagcttctatttgttagaagatgacctaagtcagaaaaaagtagttcccccttcctgagagactctgtctgggccagaagccattcattgaaaggttgcgatggcaaccagcctccagccatgcaggcctgtttttagagagatgggtctctctgaggaggtctgtctccctgctgtacaatgccttttaaaccttcccctttttccatacttcccatagggcatttgtagaattagtgacccactgcatgtctgtccccaaggccgggaaaagagacaggcagctcctcagcctgagaacgccgccgatgcgaccaagtgtcaggctctatgtgccatgcttcagagtgcccaccttgagagaagccaccttgtagtcagagtgagcagacacagttacgtcaaacatacatctcaatatttcttaagaagcaaacgggggcaccagtcttggcttttaggaagctctgtttaacttacacataagttcttaagatgtgttggcagtattgcgtcacccacggccgtcccgggggctgaacgtgtggcgtttggttactgaagcctgctcaggcgaagctgggtcttgtgcatgttcccactgtttcatcctgtcctcgccagggatctgggtgggacagtcacacccacggcctgctacccaccaggttgtacttaacgcaatcagaaggggttcatggcaatataacagttaatgaacttggagtttaaattgtgtacatttttaaattgtaagatttttactgtatattgaagcttagtgtgattcaataaattgcttgtaatttaaaaactatttaatattcaaaataaatatagttatatatttataataatctctgttgctacatttactccttgttttttccatgtgcgggtttggcctggtgctgtggatctctgagctccccgtggtcctaaggcacgagggtgattgtcaggggactgcagcgtctggtgcgtgtgtggttgtgggctctgtaatccaagcctttctacttactgaggagttgtagcgagatttggcttataaggatttggccttggcccaggccccacatgctactccaagaggtcaca

SEQ ID NO: 30835 - DNA, 1101 bp, Mus musculus
gttatgcacacctggatccctgcaggtgtgttcacagtgccctctgctgctagcccctggcttttcaaggctgatcagtacaaaagcaggcatgcaggatgttggggggtgggggggctccctctccaggagagcagcacaggaggggggccagctttgcctttggtttagggaaagagtgtgtctgtttttggggttggggcaaaggtgttcccctgtaaacatctgagccctcccctgcctggtatgttaggtctgaaagagaggacacttctcatgtgactaagctttctcccttccagatgtggcctgccgggccctgtcctgtctttccctagtggcttggcaggaatttgtccaagtcacacgtctgtgattccctctgagtgagacttggcataagaggccggtgtcgcttgtcacgttgccattctgtctgagtcggagttaagcagcctgactccggttccttttatagacatttgcaagaagcagttctctcacccccagtggatggggcttctctcaggccccccaggcttccgtgccccacctccagcagtcctgtgtccgtgaaggtcctgggtctctgaggcgggtgtgtgcattccagcggctgtgggttgtccctagatgcagggcaggtgaggccgtgcccccggagggagcacaggtcacccgtggaatgtgcatgcacagggtgagtggcatggctgtgagtacagagcctgccaggcacaggttcctcgtgcactgcctgggctgtttgtttttgttactgcggatttagtttcttagtttcggaggtgaccagagagactagggagaaaggtgggagggtggggtctgggtgctgcactgggtagctgctgtgaaggctgtttaggaaagcccctgtgggcctgctgaggagggtcaggggaagatggggcagtggcagctttaggcttcgaagaaatggtgggtgggggaagggctgctctgccctgactgtggctgaggaagggggtgaaggagctgaccacgcctggcaggaggtggaggctggtgtcctggctgtgtgctggtcaaggcatgcaacctgagggaagcccagttggt

SEQ ID NO: 30836 - DNA, 1191 bp, Mus musculus
cttgccaagggctcatggctgagggtggctggcagcctccgagccagcgtgatggcagaggagtgagagaaataggaagtgagggtttggatacattaaaaacggagctgtctggggtttagtaacgtattatacctgaccttttccaggaatatggcagagcccgtttgcccttgtaccattttggaacttggggaccgtgttcatttctagatgaaagctcgctggctttgagtaccattgattaactgtttgaaaaaaaaatcttaactgtgttttgggctttttatgacatagaattgtagatgttggccaaatttttaggctttttggtaagagaagaaaagcagctttttcgagaggagaaagtgagattcacaagtttcaaatattgcagggaagtaatttttgtctgactttgaaagcctttccctaccaaaaaggcggcggcggcggggggcgggggggcatcagtaaaatgttctctttgagccgctttggaagctccttgctgtgtggttgggtcactggagctgcgtgccacagtttctattcagctggcctgaatctctctccctcccacccttccaaagctccagctccgcacaaatgtgtctaacgctgggctgccgagcgacttccgagaggtgctccagcggaggctcggggagctggagaggcagttgctacgcaaggtggcggagctggaagatgagaagtccctgcttcataatgagacctcggctcaccggcagaagacagagagcacgctgaacgccctgctgcagagggtgactgagctggagcgaggtaggtgctgtgcgcccgcccgcccgcccggcgctctgtctgagagtggcctcctttttaccacttcaggcagatctaggatttccatttatggacataagtgaagcagtggtagtggcacaacatggaggtgtccttagatgtctgtgctcacagggattagctcctagccctaccagcattaccctgggggggggggggaacaaaggcactccagaccagcttggataaacagcctgacctctgacctcctgccggatgtaactagttctgcctctgttcatcttgccatctcatgctgtgttaggtaagattcagacagaatctttcgtgagagacagaggaggagatgaaggctcctaaaggcttcagtttgtagtc

SEQ ID NO: 30837 - DNA, 1781 bp, Mus musculus
gagatcatcaacatcgccaactgctccacgaacatgcccggcaacatcatcccgtgggtggacaacaatgtcgatgtgttcggcggggcttccaagtggcctgtggagacctgtgaagagcggctcctggacttgtagctgccctctccgtcccagaggccacgatccatcgggctgttctgaggacttcaaggcatctcttccccattcacctaaaacctctggcctgaacagaaaagagccggagctctaatgcaggctgtgtggccgcccttgtcttaggctcatttgttccttaccattttgtcgaggttttttggggggtagtgacagaatccctggaagagtcttgagccacttcctgctggggtttctagtaaagtctgtgagcctctccaccagtccctgtaaatgctaatgcagcccagccctgcctgttgttttggatccttggtgtctcatgtgtacttcctgtctgtcccctttgatggctgtgcggtcatcctatcggcgtggcctaggtcccttgtgtgtgtagcacatccctgcttttgactgaacactgcacagaagcccctgaaatagggcctctccctcgttgtcatgtgcactttccgtctgagggaactgcagctgctggaaggccagctgctcagacaatccccagcatccccggaacagacaccccccccccccccccccgtggagaaggtccccctctcagacccacgctcgctcagaggctcgttgctgggctggctttgaggggctgctcttctcatctggtgccaaaagttcatttgcagcttctacaacaatccccacaaaagatgaacagccattagaagcctcccctccttttgatgctcagcccactgtgaagagtgagcttgttttgtaagccacattggttcctgtgagcatctgaccgtcccccatcgagtatttcccccggaactggagattcgggcgtcatttggctgctacttgcttagtgactccaggctgcatcatatatcataatttattttaaagagaaagtgattcagtggggaaatttataaagctataaatattatatattttatttttcatacatgtttgaattgcggatccatggatgttccatctgtaggaccaacttgatgtgcccatcctgacattgtatgccacaagagctcttgtgatgatggaattttgattaaagtgcaccggaagacgctttgagcttcttgttctctcccctccccccatctctctcggtctcctctccctaactcaccctatcacacacacacacacacacacacacaactggagcccagctcgtctgggagggtggtgctttgtgcttcctggcagatgcacagctgcttccgtttaatgagacctcaccccagtggacagtcacagccgtatgtgaaggacatggagtgttgacccttgggataggacattgtccaaatgtgtccccctccttccgcagcatgatatgggagtccagcaggctatctgtccctggcccatctaagaagcccctgagctctcctctgccctttctctgtgtaagtgttcttgctacatctcatttaatctctttaatacagctccctgtaagccaatctcaattcacaggtgagttcaaagaacaatgaaaagttgtgtgtgtgtatgtgtgtgtacgtgtgtacacaggtacatgtgtgtgcatgtgggggttgtcattaaggattatccaccttaaaaaaatcttgtgtgtgtgtgtgtgtgtgtgtgtgtac

SEQ ID NO: 30838 - DNA, 1237 bp, Mus musculus
cccacagaaaacagtgatttccgcaaatcctttagagcttgggcagtggaacagctcagcaggtttcggttccaatcaccagccctgatgacctgagttcgagtccctggacctctgtgtgattcctctgacctcaatacatctattaaggcacaggaacctccccccccccccaaacacaatgaaaatatgaatgtaattttagaaagtactgaggtaaaatatttcacaggttacaagctccccatgtccctgccagctgctgacgggatgtctctcttcacaggctggataaactcatggacttggcagctcaggcttgagaaaaacacaaactcagaagaaagatggcgttcgttgcaacccagggggccacggtggtcgaccaaaccactctgatgaagaaataccttcagtttgtggcagctctcacggatgtgaatacacgtgagtctgtccttttttgcacactgagaggaagagcaaaccttagtgtttgtccttggtctccccgtctaccttgtggagaagcacaatgatgaacaatactgctggagccacagagaggcacaagtgtgtgtgccagattgcctgtgtgtatgtgtgtccttgtctgtgcatgcacacgtgagtctgggaggatggatgtgtgtgactggtggtagggacctagccctgtgccatcttctgggctgtgacagtcaaactgataagatctgattgcttctcttcagtccctaaatccagtgatttttgaagcctccctaaggcagtttcaatgagctgactgttttactatttacagctgatgaaacgaagttgaaaatgatgcaggaagtcagcgagaactttgaggtatgagcatccccaccccacccctccctctcttctgtttttgtttaaattatacttattttaggtctgtgtacgtgctgacacatgccataggcgctgtgtgcttgtcacaggacaatctgagggagtctgctctttccttccatcgttgtgggcctggggattgaactctggacatttcaacagccctgcaatttcctctgttatccatgctttctcctgtccttgctgtcaatgtttttacaaatgtatttttattattgttgctgtataagatgtgtgtgtgtacatactaccacagtgtttacatagaagttgcgccagcgttgtgaagtggcactctcctgcctttacgtggcttctgagtattgaactcaggttg

SEQ ID NO: 30839 - DNA, 1227 bp, Mus musculus
ccaggttttaatgtattctgtctcttctagaagctcagtttattcctaacaagcaattacaacccaaagaaactcagatttacatcaagctggtgaagtatgcgatgcaggccttggatatttatcaggtatgaagtggccgcagacagtgctgttgagtctagaggatgcctttggaacagagcgcccaagccttcggagttcagttctgtttgcatggcctggctttgcatttcttttttctttttcttttttaaaaaaccttatttattctttgaaagtacactgtcgctgttctcagacacaccagaagagggtgtcagatctcattacgggtggttgtgagccaccacgtggttgctgggatttgaactcaggaccttcggaagaatagtcagtgctcctaaccactgagccatctctccagcccctggctttgcatttagctgggataacaaacatgcgtcctcatgccagtttatgtggcgctgagatcagatccacggttcatgcatgttactgccagtttccctttcttgatactgtggtaagatactctgacagaagcagtttagccatccagggcttacttatccagtgggggtgatcgtgtacctttaccctctgcgctggctctctgggctctacatttacttaccgtttttccccctggtgtggacacctggtgtttttctttttcaaaattgagacaagaacagagaacttagaagaaggataaccattattgaattcagtgcttcattgaagtacttgacttgtgattttatgaagaagtacatgttcagtagaagcttttcctttctaactgccatggggcttctcccgtcctaggtccagatcgcaggaaatggacaaacatacattcgagtagccaactgtcagaccgtaaggatgaaggaagagaaggaggtgctggagcactttgctggggtcttcaccatgatgaacccactaacattcaaggagatcttccagactacagttccttacatggtagaaaggatctcaaaaaactatgctcttcaggtataaaactcttccgagtgtgtgtgtgtgtgtgtgtgtgtgtgtgtgtgtgtgtgcgcgcgtgtgcgtgtgtgcacgtgtgcgcgcgcctgcctacgtgcaactcctccaccacatagagcatagggactgaactcaggtcttcaggcttggtgcctttctgttgtaagccatcttgcc

SEQ ID NO: 30840 - DNA, 1142 bp, Mus musculus
agtgtatttttggaaatacttagaaaaacggccttaatgtggaatttgtctacttggttttcaaacagctgcaatttaatggaggttagtttgaagtactggttctggggctagggagacagctcagctagttaagggcgcttgcagataagcctgggaatctgagttcagtccttagaatccacacagggcaagaaaggaccaactcttgcagtttgtcttctgacctcttcataactgcaaaggcatgtggactgtgtcatatgtgtgcccacatacaatctacacatgtacagaataataaaatgtaatttgaatattaggaatggcttcagagttcttaaccccaggggaaatgaaactgatgtgtaatcagatgtcactctcgctcccatgagtgaccttggctttgtcctgtgcctgcttcccctcttcccaggtcctttcttgctaccttgctaccaggtgggtagccagcccagcacagccatgttccacagtgaagaaaatgggtccaaaggaatggatcccttggtccttattgatgccatagctatctgtatggcttatgaagaaaaggaactgtgcaagattggggaggtagccctggccgtgatatttgacgtggcgagcatcatcctgggctcaaaagagagggtaaggacgtctgaacagtttgcaggcgcttggtcagaaaggcagcaccgacttattcctggcttgtttctctccaggcatgccagctgcccctcttctcctacattgtggagcggttgtgcgcctgctgctatgagcaggcctggtatgcaaagctggggggcgtggtgtccattaagtttctcatggagcggctcccactcacgtgggttctccagaaccagcagacattcctcaaagctctgctctttgtaatgatggacctgactggagaggtaggtcatgggtggcttggattctcaatgacactgcttgcaaagagctgatctgctgcagagctcctggtctcagacagtctgccagcatggaagttttgtactgggatttccagtggcacctttagttcagggacagctcccgcctggtgtgtgtcatctctagatccttccctgttaccttgctggtttcagggcactcagaggccc

SEQ ID NO: 30841 - DNA, 1100 bp, Mus musculus
ccaggtttccaatggggcagtggccatggcgaagaccaccctggaacagctcctgatgagatgtgcgacccctttgaaggatgaggagagagctgaggagattgtgctggctcaagagaaatcttttcaccacgtgacccacgatttggttcgtgaagtcacctccccaaactcgactgtgagaaagcaggccatgcattcgctgcaggtcttggcccaggtcactggaaaaagtgtgacagtaattatggagccacataaggaggtaggattctgacacagcccggctctgagtgcttccagtctgagctccaagtactactcggttcagagggctgttgcatgtgttctctggagccttcagtgtacagatggcattgtgcccacagctgttgataagactagaaagaaggctggtttcccggtgtgtgtgttatcctgtgggacttgttttgtgaggtcactctgcagtgtgaccaagtgtatctgacccagtctctcctgcacctctaacgtgtggctgttcttccctaatgaaagtctaagcctctgtaatgacttcatgtcacgggtttcacattggctactgtggaatacaaagatgagcagcctttgctctttgaggaacatctgaccagtggtgcccctccttgcttttcatccaggtccttcaggatatggtcccaccgaagaagcacctgctgcgacaccagcctgccaacgcccagatcggactgatggagggcaatacgttctgtaccacgctgcagcctcgactcttcacgatggatctcaatgtggtggagcacaaggtcttctacacagaggtacgccgtgtgagcggtgggcgctgaggtcaggtagccttcagaacaggctcggcagatgtttgtttccccaggaaaagtgggataaataaaccagaatttgctttttttccctctgccagctgctgaatttgtgtgaggctgaggactccgctctgaccaagctgccctgttacaaaagcctcccatcgcttgtgcccttacggatcgcagcattgagtaagtgcgtacagtgggagtcagcctgtggggcatagaacggtcatgcagagg

SEQ ID NO: 30842 - DNA, 1547 bp, Mus musculus
tgtaccagagagcagagctttgtgcagtccctaggtctggcctggccctgacggctcagcacctccggtgacacagctatctcgccctctcctctgcgcaggtggacggcgttctgaaaactgtgctccgggatgagatcattgcttggcacaaaaagacacaggaggacacttcctctccactgtcggccgcagggcagcctgagaacatggacagccagcagctggtttccttagttcagaaagccgtcactgccatcatgacccgcctgcacaacttggcccaattcgatggtggggagagcaaggtgaacaccctggtggccgctgccaacagcctggacaacctctgtcgcatggaccctgcctggcatccatggctgtgacctcggtgaccaccctacccagaatgtgaaatgtgcctctcagcctctgagcccctggctgttgagacctctctctgccttgttccccactttattcagttaccttcccagtagtttgtgtgtggaagagcatgagattagtcctggagggagcccctgcacacagtaggccaggccgttggcgatggcagagctgaactcagcagcttccgagatgccttttaacttgaggagccctgaactgggactccctgtgtactcctgtctcagtgtgaagtgcagactgagaacgtcccctccatcccccaacttccagaaactacacctcagagtggctgctcactgtcataccgggtctagggaatccacagtgttagagaagcaggaagcaggatcagttcgacaggcgtgcatctctgagcacagatctcactctgtcactggtgtggacatctcgccaagtctgatgatgaggctcagcgagcccagggcctgcaggggaagctgctccaggcctcatcagtcagatccgatgcagctgtgcagaacgaagctgtgaggccagcgggccagcctttctctttttactgccggcttgttggatatcttttagagatttactatcattgtaccagaaagaagaaaaaaaaaagacaaaatcattttgtttttccttcctaatttaaaaagaaagcagtgaaagtttgtcccctttagatggttatgttgacatttttataaatctgagcattgagaatgttctagctaaatttgtacagtgtggtttttttttttttagaataaatattttataaaagtatttgctgtgccctatttttgtgttagcgtctgtgtccgtgtggcgcctcttccagttcagcacctgctggcccctcctggacagagtagggtgtggctttcagatgatggtgctggctgcctgtgaaggtgtggtggcccacggtcacaggtcggtgaggtcttggctcccagggtcagaagcagaccagcccatgtaaagcctcggtgatgggaacggccgtcctgccttggcggtgagcacaaccctcttcgtcctactgactaagcatgtatgaggagcctgtgggaggcgaggctggcccagtgtctatgtcttaaccctgggaaaacagtgtgaat

SEQ ID NO: 30843 - DNA, 1166 bp, Mus musculus
acacccggctgaaacactgtgtggcagacagcaacatcgtcaggtggttctggcaggcggtggagaccttcgatgaggagaggagagccagactcctgcagtttgtgacaggatccacaagagttcctctccaaggcttcaaggctctgcaaggtgactgacgtggagtcagggccattcctgaggtgttgaacagcaagacttggagtgtgggccatcctgctagagagtgagagtggccagtatattctcacaacatatagttagcagtggggcgcctggcaggtgtgtggccacactggagccccccatgggctgatggatcccatgtgctcttttaaaatccaggagcagcaggggctactggtagcttccggtgtccccagcccaaggtggatgtccccttacccttcttaaaaaacaaacagccaaaccccagcttgtagggagtagggtcaggtggaaggtgctggagcttaaatactccagagcttgactgcactggcctcaagagaccgaggccaccttattttgtagtgatacaggactgaagagactctgcaggggtgatggggttccccgcccagcaccggaaaccttctcttagcacaggctaagcctgcgcctgctgctgcttccaacactgaggggctgggcagagcagggcctgcaaaggaggtggccagacttcctgcccctacaagagcctcttcctgcccccagcactgccaccctttaccctgcacacaggagtgtgtaacacacctatatagtacaacatccactggcctctgtagtttcagcagcagcaggccgctaggaaaacctacaagcatccaggaagaccagagtagagaaagtctagtggctttctgtctagtaaagtgtgggaaccaattagtctctacttctgctaccccaaaaagaggttcttgggcaggccatatgtaggggcgctaagctccttggcttcaagcatgccacactgccacagagcctcctggccaggtactcctaggacttgtctctgaagtacagtaactagaatgttgtcttgtaaggctctacaggcgcggcagggccccggctgttcaccattcacctgatagacgccaatacagacaacctgcccaaggcccatacctggtaagccctgcctccgtggg

SEQ ID NO: 30844 - DNA, 1236 bp, Mus musculus
tgcctcggggtggggagtttgaggtaacagagaggactaatgggaacaccattctttggaggccttaaaaatatgtgaaaattgattgtgatctggtagccccctaacgcacaagaaaccctcagtcatgcgctgtttgagtaggggaattgtgtcgtgtgtggatgacgttcctacggatgtttcttaagagagaagtgtgcagtgccgcatgagcctagaccaccacatccttcagagccagcactgcgggccacacagtcccaacaggacagtgagctgtgtctctcctcggtgctctttcccgccatgtggcagatgtgcgacaagatatgtcatctattcacctagcatctagctgtccgtctgtctgtctgtctgtctgtctgagggcctggccatggagctcaggctggtatgaaactcattaactagtccaggctgtccttgaactcgtggccttcctgcctcacttcatgatggctgtgagtgccagtgtgagcccttcgctcatcagatgatgatggtggtactgatactatatgctacattcttgctgtctgccttctttgaagttacatcatttatttgttaatgtggggatggtgcatgggagctcatacaattcgaaggagtctgttctctctatctgtgggccctggggattgaactcaggtcctcaggcttggtgggaagcccctttacctgctgagccttcttgccagccctttacagccacctcctcccttccttgtcccttttgttgttgtttttgtttttctagacagggtttctctgtgtagccctggctgtcctggaactcactctaaaccaggctagccttgaactcacagagatccacctacctctgccttcagagtgctgggaataaagatgtgtgccatcattgcccagctctggtacaacctccaaagattcagcctgttaactttttccccacaacactctgctaaaagctctgctttttctacggttttccctgttttccagtttccagtaccaaagtttatacttgcaaaactgaccccctacacacacatagtgttatttatcagaatacccagagtgcatagctcccgttgttgttagcagctctgtaaaggtaaatgcacctgctttttaaaaattggtgtttatgtagctttaaaacacacaggaattccatctctgtgtttgtgcagttaatgttttaggcttaaatgatagtgtttacat

SEQ ID NO: 30845 - DNA, 1187 bp, Mus musculus
tctcccctctctcctgactcagctgtggcaccactgagaccccgctacaggatagtccccgctcctaggaaaagccctgtaaagactgttcccttcagctcgttgtcccctttgctgaaagatttccgtgtctttggtcccttccatcactagttaggagccaatgtgtttggctgtgagcctcagcctgccttccttagcctccgtgcatcgctttgtgtttgaaagtgtcatgtctcttctcgccacactaccgtgtgggctctgagcagggtggctggcaagggtggtgcaagtcttgaacctaaatttagattccttcagaggcttcggaagcccttcctcagacccacaggcttgcatgctgctgcgcatccctgccctcgggagtgagagtgaaggcggggctggaagggctgcctctgtgggagggagggctgggagatggcttggagggcagaggcacttgctgtcttgagttccagaactcacatggtgtcaggagagaactgattccccaggttgccctctaagtccacatgcatgctgtggcaccatacacatccccatataaaaacaacatgggggagaaaagataggaggggctgagtactgatccagcataataaacacacacacacacacacacacacacacacattcgtgcacacgcacacacaaggagagatttgggtttggtggcagtgtgtccacaagtactccgtgtgtgggggtatgtgtggttttcttcttttgggttcactgtcttctgttggactgatgcctccaccctgattgatctgtttgacttcggtagcttctcagtgagttttgacataggggatgaaagtcccttttcttcttatttcttttcttttttctttttttggtttttggtttttgaagacaggatttttctgtgtagtcctggctgtcctggaactcactctgtagaccaggctggcctcgaactcagaaacccgcctgcctctgcctcccaagttcgcttcagtttggagcccctgtgatcccatatggattttaccaggagtttctgtttctgttttaagaggcaactggagcttaggaagaggtggtttgcgtcgccaggctgatgcagagtctattgccatttttccgttactgacttggactgttaatgaccatgggctatctttctgttctgt

SEQ ID NO: 30846 - DNA, 1207 bp, Mus musculus
ctgacgacaatttcaggcctccagaggcacgtgggaacgtgtgcagcccatatgtaaaaacaaaacaagcccaaaactattttattatagaaatcttatatgactgtgtgtgtatgtgtatgtgtgtgtgtgtgtctgtctgcgcgcatgtgcatatgcatgcgtgctaggcatgatggcatctgtaatcccaacactaggaggtagaagcagaaggatcaggggtttaagagtattctcagccacattgtgatttcaaggccacctgggcttcttaacaccgtgtgccaaaagaaaacacaaattcccagttctgttctacctggctttgtaaggatcctgcgtcctctggtgtccttaggagagaaacagccttggttttgtatgagataataaccatagataggagaaggaggggaagaaaccactaagcccacagttaccccatgcccagctgtcacccgccaatagcccagtcccttgccactggccaggcgtagcaagtgacctgtgcttcacttttaggtattgactgggctcctaagagcgaccgtattgtcacttgtggggcagaccgcaacgcctatgtctggagtcagaaagatggcatctggaagcccaccctggtgatcctgaggattaaccgtgcagccacttttgtgaagtggtccccacttgagaacaagtttgctgtggggagcggagcccggctcatctctgtctgttactttgagtctgagaatgactggtgagccaagttgcatgtgtcctctcactctgctttgtatactccatgctgggatgctgtgctcctgggacctgttgaggctctgtgtactgcagtgcccttcctggcctggagaggctttctccctctcaactcgtatgtgcatgactcagctcccataccttttctttgactcttcacttcccttccttactcctctacttccttttgtccattacttcctccctaccccttctttcccttccctccttcagctccttcatttcctccttccagctcccgacttatcttaattcacatgggcaacatttcctcctggctgagctctctttacagtttactgtttgtgttagatcgtccccttccaggtaaattagacctgactgtggtctcatgtagtctgaaaagaagctgtatattcagtgaagtttcccagctgtagggcagtcatcaggccag

SEQ ID NO: 30847 - DNA, 1138 bp, Mus musculus
ggctccccaacactctcccttttttgggaaacattgtctcactgtgtatccctgcctgacttgccttgtactcacagagacactcttgcctctgcttcctgagccagcactgagattaaaggtgtgcactgctcagctttccagctcatttgcctgagtgagttggtaccgggcttgtttggggtatgggccgtttcttgcctgccgctgccgtggctcttggcgtgctgtgctgaggacggtgctttagtaggaagaaaaggctaccccttctgtcagtgcattctgacgcggggtgacagcagccctcttcacatgcggctaggagaccctcagcgcctctgtgtctgcagctgctgcagattgattggccttgcccgtcgtgttttgttcgcacgctgacccctttgttctgcaggtgccttattctatattcatatcttcatattgcttttttcttcttttccatgtttcgaacaacagagtgttctctgcctatatcaaagaggtggatgagaagccagccagcacgccctggggcagcaagatgccttttggtcagctgatgtctgagtttggtggcagtggcaccggcggctgggtgcatggggtcagtttctctgccagtgggaaccgcctggcctgggtcagccacgacagcacagtgtctgttgctgatgcctcaaaaagtgtgcagtgagtatttccttgcaggtggaagatgtgatatgggtggaaggtttcactgaggctgccctgccctggtatcattcgaacaccccaacaactgcagctgcctttaaagtgacagacaggtactagatacctgttaacaactttaaagagttgggacttccttccagaaacacttcttggatgcagtactggtagtgtccctttgagtgccctcctggtgtgttgctaacaagggtcccttcagaactgccaggttattctgtgtctgtgagcctttccctggggagatgtgagcaagcacccgttcacctgacgcagtgtgcacatgacgaccaaaggataattccaccaaggtccgccttcccagccagtgagcccattgggttcacgcacagagcacaggtcagaggccgctcacaggagcgtgggtgaccccaaagca

SEQ ID NO: 30848 - DNA, 1151 bp, Mus musculus
actgagtaatagagggtgctaggggtccaaccagggccttgcacatattatgaccccaacttgaaggcttcagtttctgaaggtcactttggggtcgccttattcttgagattcctgtaaggagaggtcaaggaactctttttagagaagtgttggctaaccctgcagaagccactctgagaatggggcctttgttgtcctctgtctgtgaaggagcgtgggctgtggttcccctagtgtaacaagtgttcttgtgttcagggtttcaactctgagaacagagttcctgccgctgctcagtgtgtcatttgtctcagagaacagcgtggtggctgccgtaagtatctgccatcctcagtgtgccacgtgcaactctaagccagaaacaatgcgtgctctgtgacaggcacagcagcacatcccttctcagaaacagactgagaggccacggctgtgagcactgtgctggggtggaaggtgccagggagccctctgcctgactgatctcccgtttcagggccatgactgctgcccgatgctctttaactacgatgaccgtggctgtttgacctttgtgtccaaactggatgtcccaaaacagagcatccagcgcaacatgtctgctatggaacgtttccgtaacatggacaagagggccactactgaggaccgcaacacagccttggaaacactgcaccagaacagcatcacgtaggtaccttcagccgcctcagcctggaggccaggcactgggcttctgtagaaaattggctggccaaggtgctcactccatgtcattcttttagaaaagtcgcctgtgctgcaggccccagtgttgctgagggaatgagagcagtagtaagcctgtgtcttcccagctgctaagcccttactttcagtttgtgacagagagggagttggcccggtttggtggcacaggcctctaatcccaccgttcaggaggcagagataggtgtggatctctgtgaattgaaggccagtctgatctacgtagcctacatagtgaattctaggccagccaaggctgcacagtatagctagtctttgctactttgtgagttctttttcccatcctttatcccccatttcaccccctttcactagataggagagaaagaaggatggagggg

SEQ ID NO: 30849 - DNA, 1270 bp, Mus musculus
ccaacatctacatagctgctcacaaccaaatgtaactccagttccagggcatctgtcctccacagacaccaggcacacaagggtgcatctatatacatgcagacaaacattatacactttaaaataaataaatcttaaaagtccaagcatagtgatgcatgtctttaatcccaggagttagaggatagcagatctctgaattcctggtctgtgtagagttcaatgctggcctggactgtgcagtgaaaccctgtctaaagaaggggggaaggaggcagggagggagaagcagggtgttggtgatgcagggcttaatcccagtacacttggggaaaaaaaaaaagaaaacgaaggaagggagaatatacagggttgggtgaggtggtgtgagccttctggggacagacatccggaggcctgcagggtgcggggtgaggaaggtgggcctgtgccccaccagtgtggcctgcagggaagacaggcagtcagtcctcgggctgatcagtgttgtgcttttcccaagaccctagagtcttccatccagggtctccggataatgtgaagccgagcgagcctctggcatccagcatgaggaacaggactgagcgcctctgctgttcacgtgctggtgaggatcgctggcccagggaaacactgtcacactgaagcaactagcgtgtgttcctgtggatgtcgtgggtgacgtgtggcatttagagacggcagtggttcgttttgatttttctttcattttgttttgttttgattttgctatctcattccatttttgaccaaagcttctctttaagtagtttattatggaagattgtcacactaacttaaaggggaagggaagtatgtacattgtgtgctaaaaaaaattaaagaaaaatcccaagtgtgcaaaagtgttttttctttatactctttctgttctcagcagagaaacaaatacatctttatttgtttaggttgtttttaggatcaggccctagatcttagtccttaactgcgccatcctctgcagcctttagccagagaggaccatggattgagccgggcatgtagaaagcactacaattcagcaccctaaaggctgagacaggaggattgcaagttcaaggcacaaaaacattaatgtgcctcatggggaacaggggcatctgttgatgggtcctgggacactgcattccatcggtaaagttggtgcagaagccctgtactggagagctgaggagccatggagaatccctcctgtactggtgagcaa

SEQ ID NO: 30850 - DNA, 1121 bp, Mus musculus
gatctctggtgcctacagtttcccaagagagaattcagaagcctggagctgggaggaatttgggtccacgggccaagagagtgaggttgtaggtccagaagtgaaaaataacaaagcgagttttgttgcggttaccagtcattcgtatgctagtggactaagcacacgccgttctccttcagtagaaatcaggagagctggagtagaggaggcaggggagggcttgggcagactttgctgacattcaagagatggcaaggactccctccaccccagggtgctaacaggccacgatggtgaccatttgcagagcaacctgctggacatgaggagctgggactcctcctccaccctccaagccctgctgcttgtctgataggggtctccttcccaggcagacgtccagctcacctgcacttgaagtcacaggagcctgctgccaggagcacgttgttgggatgccagtccaggctgagcactgtggagcggatgggcttttttatgtgtttgcacacccacctagacacatgggtaagaaaggcaggcaggtggataggtagcatggattgtagcattccaggtaggtcagaactctctgccttgtcactacccaccacataagatcatgtggttctaaatggttagggtggaatatgaattctgtttctccagagtcaaaactgtccttgtcctcctacatgggagatttaagacacaggtgggacaggcatctgacacacacacaaattataatagagaattgaattccagggtagccttggctacatagcaagacgcggtctcaaaagcctcacctcgggtggggaatgattgagcagcaggttcttagcatgcatgaagcacagacgaggcgtggtggtgcacaccggtcatcccagtattagaagggcagaggcaagaggaacacacgtttaggatcacccctggctatacactgagcttgaggtcctcctggcctacattcagaccctgtccttttttaaaaattgtggctgggtgttcatgagtggtctctgaagccagatgcctactgactgtcggtgttgaacccgcttaacagtgcagcaagggaggctggtggtggtgcgtgcatggagctc

SEQ ID NO: 30851 - DNA, 1173 bp, Mus musculus
aaagtaaaagttttagagacaggcccctgagaatggactcagggttaccaagtgtccccaaagctactgtcccttctggtcacttttctgttaatatggagagcttgttttctgtctggaggatcacccagctggggaggaggtctgcccaaattaagagtcccagccatacatgaagtagatgcatgccttgctggggcgtggggaggacaaccttcttatctgcccctacttgatacatctagggttaaggtctcttgtctctctgtcctggggtatccatttcctggtagccctcagaggctgccagatgcctcattaccatgtttcacctctggcctcagtttccctgttttagagtccctactacagatgatcttaagtggctcccattccctccttagggccacgactgcttcccggtgctgtttacctatgacaatgctgcggtgacattgagcttcggtggccggctggatgtacccaagcagagctcccagcgtggcatgacagcccgagagcgcttccagaacctggacaagaaggccagctctgaggggggtgcagccactggggccggcctggattcactgcacaagaacagtgtcaggtgcttccagagacctaagaaccactctgagagctgggtgggagccagagggaggtggagttgcagagtggggacagggaggatggggggtgatgggacaggccaggactagagggaagcaggcagacttccaggctgcgctccaacagaaggaacttagcagtcatcttggctctacatatctggctgactagggcttgcttaggcacactggagcctctaggatgcaggagagtgactggtaggcttcttgggggtggatatcttgctagattccttcccaggtgaaggaatccaaaccttttgtaaaaccctaaagctataagccacaggggtccacccctgtatcttactaggatgcatgtactctgctggccttctgctagctaagccttatgaggttgtttgagccagtgtctaaactaagcccatcctccagggttgttcagtatcaggcactgtgtcctcccttcctagtccccctgcccccagctcagcacgctggtggcactctacattcccaatgcgttcaggtctaggccttgagtgtcttgttccatagc

SEQ ID NO: 30852 - DNA, 1195 bp, Mus musculus
gctgaaggccaccacatccatggtctccttcaagtgggcaaaagccacacccacccttctgcacccaagccaagcagcacgctttaatttggtgttggaaccccacccacagacctcttacaaacctttttactactctgtcctacagctagcaacagggcattagggcgttgttaaaaggctatcaccttcctcattttggagccaaccttgaatctgggtagctgcaggatcctctccagaggccatcaatcagagtcaagcccaaaggcatgtggtagtggtcactaaaaatggactcaaatgtcatctctgccattaagttatgcttgagtctctggcagccacacccatatctgaccctgagacatccagacccttacgtccctccaacttagaaagcacaaaggacaatgtcattcagttgcagtatctcactcagatggggccaggacaggagcctttcactgggcctgaatgtacaagtaactcactggctagcaacaggcctgcttcctccctgtcacagtgccaaggactgctgtggggagtcctgggagccttcctccagcagaagactaggatatgaccaggcaggcagcgccagggcaccacaggggcagctcagcactgctccagtctgctgtaggttcaggactggccctcagaaacctcccaggtctctattacgtcacggacatctaggccctgatccttactttgtgcaaaagcctgacagtgtcttcccaggtaggtgtgtgcctaaaccctgctggtactgccatgagcaaagatagagatagctgatagagaaactgccaaacaaggaattacgatgttgtcgtttaatctgccaaatatacaagttgaatttgaggagcatgtcttgtctgggtgacgcatggtaaccagaggtttcttgaaatgatcaatgggtagggttaaaaacgggcactagcccagaccaggtgggtgggaaggggacagaacagagaggagaggcctcatcggacggaactggccaggcacaaaccttggccctttcacggcacaggctcctggagcccctctgagtgagcacccagacaatctgggctggttgtcatcaattcccacagcagctgcctgctggcaccccccctcccacgctagcgtgcaatctactggacaaatggaatctcctcaccccacttcc

SEQ ID NO: 30853 - DNA, 1231 bp, Mus musculus
cgtaagaaagggggcagaatggacatgagagagcgcccttagcctactttgctgcccatttacctaattatgaggaaactgggtcctagaactgagacctcacaagggcatccatatcaccctcctgagcttgtttaatcttgactcatttggcttcacaaacccaagcgagaaaggactcgatgtgttgctagatattgttgctgacttgagactttagacttcagaatacacagagagaggttggaattgcaggggtctgctagggtttccagaagttcccagtagccaccagacggcttgtgggtgggccactcagttgggcacagcaggaacatctggatggctggccctgtggcctcagcagaaattttctcccttgggtggcagcctggatgcttggctctgtgttagcgcagtctgtgtgcacagaatgtttctgaggcctcggtcttgaagtcctgtgattcagaggatgtgggaggtatgtttgctgtgttctaacccccacctttcccttccaatccctcagcaaaagatgacgcaactttgtcaggaaaacgaatgcagtcgctgtccctgaataagtaagctggcctgtgggaggagatgccggggaactgggccgtgccgccaggacctctgccatgtctcacccaccctgtgccctggcgccgctgcagcagcccctatggccaggggcccctacggcctggggcctcctcttcatcttggcacagaaattgttcaggggatgtgggggggctgggggaggggcagctgctatctttgagacagaaagatgcaggacagcatttcatacgtaaccatttgaatgtttctgctgtttttagaatttggaaccctggtttgggagggggggtgcctgggaagtggggtgaggagattccatttgtccagtagattgcacgctagcgtgggagggggggtgccagcaggcagctgctgtgggaattgatgacaaccagcccagattgtctgggtgctcactcagaggggctccaggagcctgtgccgtgaaagggccaaggtttgtgcctggccagttccgtccgatgaggcctctcctctctgttctgtccccttcccacccacctggtctgggctagtgcccgtttttaaccctacccattgatcatttcaagaaacctctggttaccatgcgtcacccagacaagacatgctcctcaaattcaacttgtatatttgg

SEQ ID NO: 30854 - DNA, 1190 bp, Mus musculus
agtctgtgtagtgaaggctgacgtctctctcaccttcctaaactactgatctttgtgcaggtagaaagggaggccacaaaggccgagtgaggcagtatacgagcccggaggagatcgatgcccagctacaggctgagaagcagaaggccaacgtgagtacatgtctgtctgctccagtggtccagtatgttgccttgttctggcttttggggagaacaggaaaggactactgttctccaagagacatcacacatgagggtgggaaggacaccagatggcaggtgtgagccctggagcagccagtcacagtcacagaaaggtggtcctatgattggaccaacaagaaaggactttgcccattttgcaggagctgtttggtggtctccactcgtggtcctgtttgcctgccttctagaggccctctctctaccagctgctgtccatctacagctcctatcaattccctgcagctcccccccacacacacacacacacaaggctacctgccagactctatacaacatacagcctgccttcccgttcccccactgtcctgtgtattgctattggctctgttcagcatcacctcttctgtgacatactagtgctgcctgccctcctccagctcctctgtgctgagataccctgtccagtctactcttacctgcatcctctgcaacagtgaatatccacacctgaagtaagggcttaaggaagcaggcagcccctctcccaggatccctgagaaggggagaagccatctctagctggaattctgggagttttgagaatttgaattttgaatttgtggagttcctggcatggaaccttggagtttttcgagacagggtttctctgagtagcgctggctgtcctggaactcactctgtagaccaggctggcctcgaactcagaaatctgcctgcctctgcctcccaagtgctgggattaaaggtgttcgccaccactgcccgggtggatataagggtttgtttgtttgtttgtttgtttgtttccagagctgaggaccgaacccagggccttgcacttgctaggcaagcgctctaccactcccctggatataagtttttattgggctttcttactttgtttttttttttttttggacaaactatgtgcagcccagactagtttgcactcttggcaatcctcctgccttagcctcccat

SEQ ID NO: 30855 - DNA, 1127 bp, Mus musculus
taaacggtcccaagtagggatgacaccatcgaccgttactcacagctcccgcagaagctgagtgaggaaactgaagcagtcagtcagagctcctgattgaagtgagcttcccgaggctgaagttctgacagttctggcttctcttttctaccctagacgcttttatagcatgagataaacaatagatccatcccttccagtagatctcaagcaaggcctcaagtgttttattcttgggctgttttgctgttcctattcctctggtgtagagtgtgtgtgttgagggtgggggaacagctcatgcccagagaagagtctggggaggatacggagacacctgcttgggtctgaaacggggcagaggcaatgcatggttacttaaggacataacatacattttactctctgagcttgacatctagaggagcaggggaatggctgtcaaagccctttggcaacctgaggctcagaaagcagttgattttcttgtagatctttataagctatcttgctgggaaatgcccaaggtcaaaagaagccggaaagcacctccagatggctgggagttgattgaaccaacgttggatgaactagatcaaaagatgagagaaggtgagtggggtctttctgcctgggtatgctggacagtatcaaggctcagcgtctccaaggatagaaagaaagaaagaaaaaaacaccgagaagaggcttgtagcaaactggtcatgttttttctatcagctcagagtgttttgaaggttctgaagagtaaagtaacattaatgaggctatcatacctctccccaaaaaggtctgttgttgtttcattattagtgtatttgtgaaagatcggggggtctgtgctacttttagtgttggctggaaacggggtctccagcagacatagttctggctatcctggaactcactgtatagaccggctggcctcaaactcatggagagctccttgcctctgcctccctagcactaagattaaagaggtgtttcccacaatgcccagctcactgtgtgttggggtttttttgtttttagattttattttactttggggtggggttgggagatgtacgcatgctagcacaggtgcctggggaagccagaagagg

SEQ ID NO: 30856 - DNA, 1151 bp, Mus musculus
aagagggctgggcattcctctgcactgtacgtggaatgtggtagctttggttgcagagctcagcctggacgtgcatcctcatgttggtccagcctgatgtcctgtcctgagaggtgctggtcaacatgttatcattagcaaggtgtatccatgccacagcacacacccagcctcaaactcccaatgtatagtccacccagtggttctcaagttagaagagttctcctgcgccacagctcataggtgtgaggcgtaggcagaatagtgatttcctggtcttaaaatatctagtttggaactaccttgggatgttccaggtcaagccgaactagtacccttcccgtggcagtgatgtgtgtgaaggcaggacttgtcacagccccacagacactgcccttagctattgcatgagcaagctggtcctggacgctagagccacctggtccctttggtttgggagacagtcccagcacagttccttgaggccatatgtacacatttcctgcaggggaatgcagcaataaggagtgccccttcctgcacatcgaccctgaatccaagatcaaggactgcccttggtatgaccgcggcttctgtaagcatggtaggtgacagcaggcctcctcgggctcacctgatcccaaggctagatcctcctgggacatcacttcccctcttctacctggctcagcaaaacctgacctactgtggccactgaggtgtttgatttatttattgttttctgtctcacggggtctcactgtgtaggccaagctggctttacactcagtcctcttctgttagtttcctatgtactgtgattataggtgggcgctaccctcatttccctaaagcctcccaacagggctgtgatacggtgttcccacttgcatggagagtgtagcacactgtcccctgtgaataagccatgcagccagcatttgaagctacactctggctctgtacctcaggcaggctgagcagggctctgactgaaatgggacacttacacattgcctcactgaaaggccatctgaacaaactgaatgctgggctttgcaggtcccctgtgtaggcatcggcacacccggagagtcatttgtgtgaactaccttgttggattctgccctgagggaccatcatgtaaattc

SEQ ID NO: 30857 - DNA, 1179 bp, Mus musculus
agttcgcatcagaactctcacgctttttcccattccttcccctcctgttcccagtgtggtgagaaaggacactacgccaacagatgcaccaaagggcatttggcctttctcagtgggcagtgacagcagcagcagcagcagcagctggaatcactgtggagcagcctgaggggcctgctgaggggagcacgcacttggctgctgactgtaggactggcaggactcgggctggagctgcaggcataccagtcagggctcattttgaggggccatgtctgtcctttcattttgctataattttttttgtttaaaaaagaaggaccatgtgcttcagttgggtcccctgagccagagtttgcctggacatcagtgcctcgtttttttatttttttattttttggactccctgtacactgtcctgttggggagagagaagctgggaagggctatgcttcgtcctgggtggaagacggctggcagttcccctcagggcctcatttaaacaccagcacctaaagaggacgggtggatcatgtggggctgtggccaggtcagcctgctttctccatgtcctgctgacatctgaaactgtgcctatgaatgtgatttgaacacaggagccccttcctcacaaacccggagcacccactgcctggcctggccctaactgtgggaggggcgccaggctccccaggctgagctgcttgtctgggcttgcttgtgggcaccttcagccagtgctgcagaccaccctgaaatagctgacccagttggtctgcgcctacctcctgccaagcaagctctgtgctgtcactcagacacctgtggcatgcagaggccgcccatcctcgagcctagaaaatgtgaatccatcacctgcaacctgctgggcaagtgggcctatccaagttcggttataagaatactttctatgaggttgattaaaaagcttgttttttagcctgtgtttcattacttaaagagactcctgaagaagagtcccatttggcagataccaatctcacagagaagtgactgctgctaggaagggcctctgcatcctctctagtgttaggtttgatacctagtcatcaaacgaggcttagctctatcccctgttcataaaggctccatgcagtgaatagtctccatccctccctcctgttgtatgaatatttt

SEQ ID NO: 30858 - DNA, 1153 bp, Mus musculus
ggctagtcaacagctagtggatggataagaggtgctggcctgtctgaagcaagctcatggctgtcccaaagcacccaccattcctgacccttcggatttaaggacaagctatcagttgcttatgggattaggggagtgtagtgggtttgctgcatgctgcttgtcttctaatgttaatttaggttcccaaaactgttcgcactaagacactgaaggactctgccccagttaattctgattggtaaatgaagatgccagcagctaataggtggggggagacataggcctgccagggcttgggaccaagagtgccaccatgcctcaggaaattctggggagtggggtgggggtgggggataaccagaacagccatgtaaaagggccaagagcagccaagatggaacactgaaattagtaataatgggtttatggagagaaagtacattttaacaacatggaagttaggcagttgccctgctattttctgcttaagaaatattgaaatataaaggccatgttgtgtgtgtgtgtgtgtgtgtgtgtgtgtgtgtgtgtgtcttccatccaggaacgtaaatggtcgaaggcgggaagtaaccctgcgccaggatctactaaaaatattcatacaacaggagggagggatggagactattcactgcatggagcctttatgaacaggggatagagctaagcctcgtttgatgactaggtatcaaacctaacactagagaggatgcagaggcccttcctagcagcagtcacttctctgtgagattggtatctgccaaatgggactcttcttcaggagtctctttaagtaatgaaacacaggctaaaaaacaagctttttaatcaacctcatagaaagtattcttataaccgaacttggataggcccacttgcccagcaggttgcaggtgatggattcacattttctaggctcgaggatgggcggcctctgcatgccacaggtgtctgagtgacagcacagagcttgcttggcaggaggtaggcgcagaccaactgggtcagctatttcagggtggtctgcagcactggctgaaggtgcccacaagcaagcccagacaagcagctcagcctggggagcctggcgcccctcccacagttagggccaggccaggcagtgggt

SEQ ID NO: 30859 - DNA, 1255 bp, Mus musculus
gtatgtgtgaaaccagtttaagtgaggagcctaggagaaagaacccaggaaaaataagatggagttaggctaaagtttagtgattgggaagcatactataaaatgctgaacactggcttactctcctagtagctactgtgaagaggaaggtaagtagtcgagtgtgtgatccagggattatacatgctgacaaagcacagcgctcctccgtcacagacctgggctgctggtgtccagtggacgactgggtgggaacatgggcctctgagtaggcttcacggctgttctcacagcaccagctcgccagtctcattggacctgggtgacactttttgtttcggggctataatggataactgtgtcgccatttgacacgggaagaaattagccaggtggcaggtcctaacttatctggaagaaaaggacaggaaggactgagatgactgtggtctgttgccgccactctgctttcacatggacacctggtacgagactggttttcctatttctagaacatgagcggcgacgcaagtaccactgaagaggggtcgctggagggcattgcatggccgagcataactgcccgccccactccgacctaggaagaattcaactggctgaaccttcataccctgactgagaactagtgtccaataaaaggtgactggttcacatactgcttgcctggtgtagtcattgttctgacttgtccacagtccaggattttggttcatgaaacctgtggggctctgtacaccattgtgtgcttgggattgcgagctagctcactgcagggcagcatattatctggggtttccagctgtctagagacttgtcctctaccataagtactgtggctgtctagaggtgctgtggccactggttgctaatacagtatgaatcatgacagtttttctctttagggacagggtctctctacttagctctggtcgttctaaaattgactacctagaccaggctagcctcaaactcaagagatcagcctgtctctgcctcttaaatgctggggcttaaaggcatgtgccaccacatctggctctttggggtatttttcctgcatgcatgtgcacagtgtgtgcttcatgcccacaaagatgagaaaaggtgatcaaatccctttgaactgcagtcaccgcatgcgctgccatatgggtgctgggaatagaacccaggtactcttaagagcagctaatgcttttacttaattaaaaaaaaaaaaaaaagtgtatgggtg

SEQ ID NO: 30860 - DNA, 1770 bp, Mus musculus
agatctgtgagcaggagtccatctgtcatcagaatgtaccagatgtgagtctgattgttatgcaaatgctaagatcaaaacatctgcaccagatgagactgatataatgcaaacggtgaaatttaaccactctattttccaggccttatccagtatcaaagtattagaaaatgcttacttctctgtgtaattattactatttagtctcagtcttttttactgctgaataactgaatccagaagataattgggaaacgaagtcattttctcacagtatcctttaataagtattctaagaaggtacaagtattttattatagaactcatttgagtgaatttattttaatttggccgatacacattaaaacatttttcttctttgaaatggattcttattcacagtttacctagaatgctgttaatgtgccagtgttgacatagcttctggagagtagctcaatgagccttctctgttctggccagagtactctccaaaggagactcaggcctattcttttctgaggaccctacagactattgtttctatagccacacccttggcttcctgttgatttctgcgttctcttaggcatccttaaatgatgttctggtgttagcttctcaccagctgataaagagttacttccacatcagccatccatacgtttggaggattcagtcttcctgagtttgtggcaggcacccaaacatttgcaagtgatgtccaagtttttagctgccttgtttgcatccacagccctctaatgagatgacaaggacatcagggagccagtaagactcctgttggcctagctacattcattcagtgcctactttgcatgtatgtgtatgtttagaattcttttatatgcctatattgaaggccaacaaaatgctcaggtctgcttttgatagggaaacaaagaacacacaaatcagaataaggatatacagccttccaataaagatattgctgttagtgatgtatctagacagtatttcaagagagtggcaggtccgttcctggtaaaaccttaatcattaggattgcttctttatctgttccctcctccactcccttcatcaagccagggtagtattttgaagcataaagctttgtgcataattatttgtgcattgccatacttttgtgttgggatgcagtctttgttgcccaggctggtcttgaattcctgggttcacacaatttcctgcctcccaaatagctgggattataggcatgcgctcctgtgcctggattttatttttgtattttaatagaatctgcaggccatataaaggatcatggctcttttgatttacagaagtggtcacaggtgttgagtccagggtccctgcccgatgccacagagttcatgattttttacatgatgtgaagcattttcatcttaaaatttgtaacatcttgtgaataagaaaagtgttatttcaaattctagttgtcaatcaagcagttgaggctttcatagttcagatgtcataatgttcactagggatcctcaaccagtatataaaatatgctgctcactgtaaatcttgtggctgacctctagggtagtcccaccactgtattttacttctttgccatcagcaagcgtagtgtctcatcaggacaagaaaatcaacatatatcaaattgatctaaatgtaaaagcaaatgaaaaatgcatggttttttgtccctgtcgaacatgtatattcttacttatagagaccaatagtcacttccagtgactgaggcagaggatt

SEQ ID NO: 30861 - DNA, 1093 bp, Mus musculus
gaagtgtgaactaagtaaaccacgatccttcggaactgtgtgctaaggcaaaactttgctcaccaagttctccaggctccggtattctactgcagaaaacagcagagtaatactgtctggtgatgccggatactagccttgcagcatgctccctgataggcagtatttggccacgccttcttgctttagtgtcaggtctataattgaagataacattcctaacatggctgatctgtactgactgactgttgcgtgtgactaagcctcagcaagtcttgctctagactgcagtgcttcaaggccctcttcagtctttactaatagtagtctcagaattgcccctgttctttccattttttcttgaatattgttggtgctttgcaaagtgagtgggtaggattattagtattagtaggaatactttcaggctaggaacacaaaactagatgagggcttctcctccttcccctctctcttgattagacaagctctcactgtgtcacatataccagtcttagttctgccacactctctagttctgttcttgcatcccctcgtccccagcttgtaggttagtaggctttttattttattttttcaacttcctgtttgagctgtagattcccagcaatgaaagacttaaatctaacagaagaataaagaaaacagcagccaggacacacagaaaacacacagggtagtgggatagtgtgtgtgtgggtggttgtatgaaagtattaggtaagcttgaggccagccagggctaccctgagaaactctgtctcaaaaaggggcggggggggggggagtattagatagtcttcgggaaaaccttgacatttggagtcttgtctgagtggcctttattatcttaatcatggattatactgtgagaaatgaggccaggaccttcacatgctcagcagttttaataaaaagctttcctactaatactgatagatgaagtcatctatcagtctcttcataccagaatatatacttttactacatttcccgattcaactccttaaccactggtaccacaaggaacccatcctgagatcaccagaagctgttctgtaatgctggggga

SEQ ID NO: 30862 - DNA, 1401 bp, Mus musculus
gaaaaatgaagattcacaaatctgggtctctgtgtttgaatatttttacattactggtaaaagagacccatgaatcttaacagtacaaattagtgagtgcagtgtcatgatagagatagattggaaaagaaaagaatgcttgcttgttgggtagaagagttggcaagagatggaagacatgcggaagaactatctccatgtcagctgtaggacccagccatttagttctcttcagcaacccagtgtaatgacagtagtaatgacagtgtaatgacagtagcccagattattttgatgccacacctggcactgggaagaatctactcaataagtcttgatccattagattgagttttaagaatcatacacacacacatacacacacactcacatacatacattcatgaatagtattttattacagatggcaatctactttgcacacaattgtatattttaagaaatacatctgagtgtcatgaacataaaattttaaatgagacatgggcgcgggaaatgtgtacggaagacgcactccccggcgccgctcgtggggggcccaagtccttctgatcgaggcccagcccgtggacggtgtgaggctggtcgcggcccccggcgcgccgggctcggctcttcctggagtcggattgcttgggaatgcagcccaaagcgggtggtaaactccatctaaggctaaataccggcacgagaccgatagtcaacaagtacctaagggaaagttgaaaagaactttgaagagagttcaagagggcgtgaaaccgttaagaggtaaactggtggggtccgcgcagtccgcccggaggattcaacccggcggcgcgcgtccgccatgccggtggtcccggcggatctttcccgcaccctgttccaaaaaaaaaaaaaaagaaaaaagaaaaagaaatttatattagtaaacacagaaattgacttgggactatttaattttatcttattgcttatccagagtccaaaggttgtgggcaaatgctaataacttttaattctattcgtttaataaaactaaaaactagaggtttctatatggctttttaaataacattctcagttttggttaatctttccccctatgtcctgccactgtggatggcaggagatgttagtgcagaccagccaaaagggctttttccaaaaatatacagatgccacatcactatggagcacaaaggggcccccaagtgactaccaacccttggggcacctcagcaagccagcaagagacctagaaatggcagatactctacaagctccaggcaccaaacaagcctttgcctagccagtgcctacctgcagaaggatagaggacttggttttttgttttttttaccaaaagtaatttaatttataatgtctccccaa

SEQ ID NO: 30863 - DNA, 1655 bp, Mus musculus
tgcttctttgaaacaagattcccttccctatcagccttgatggcgtggggccaagctacctcgagaagtccctgaatcacgcttttccctcgtcttctttccagcgttccaatccacatgctgcttatcccaaccctggaccaagcacatcacagccccagagcagcatgggatactcagctacctcccagcagcctccacagtactcacatcagacacatcggtactgagctgtgctggagtctgtcagtgcactgttgctcatgctgcaggactggctgcggcactcgcgggaacctggtgtgggccatgcgaatgtactgtacaaccacatcttcacaatgtccagtagccgagttccaccagttgtcacagattggggtggtagcttccaggttgtacctaagtttggagttagacttgaaatgaaagtgctagcacagttgtgttgtgggtttgctacttccatagtttacttgacatggttcagactgaccaagcatagttttcagtgacagtctgtagcagttgaagctgtgaaatgtgctagggcgagcatttgtcctcgtgtgtggtgactttgagtgtaacagcgtgatctgaccaatagtacacacagacgcaaggtttaactggtacttgaaacacagattatgttaacaaaataaccaagatttaaagattattttggtacacctttctttttagtgtcttatcagtgggttgattcatcttctacataaatcagtgttttatgaccaagaatattgcttggattgttttgaaagtacaaaagaaccacatagtttctactgacaggtttcagagctcccaaagattaatttccaacttagaggtttgtttttattttcaacctatgacgacttgactggtcttaaagctgctatttgatagtaattaaatatgttgtcattgatagaagcctgttggttcagcaaactgaaatgagtgttgcagacagggttttcttttcctcgttggtgttgctgatttgtgagcatgctttctgaatacaaaagcatgagtggcgacctccgtgaggcacggtgacctcctcgaggcacggtgacctctgcgaggcacggcgtcagtccgcactcttctgtcctgatttgaagctgcctagtgtagtgctattacaattttgttcagttaactttctttttaaaaggttgttcgcacatttttagggtgcccttacttcagcaaaggagagggagtaggagagccttagaacttttgaggggaaaataaaaagctataacatacaacgtactgtatcaaactattttacatgaatgacacaagtattctgaataaaaaaaaattgaacattgttaaaaacaaggtgttatgtaataaatttatttttcataaatcaatgtatggtgtcaactatatttttcaaattcaccaagggtcttttgttgtattttaaaacatgcctctgtataactcttcccagtgacttattggtgacaactgatggcttaggctgaggtgtgcactctggtcagctgtctaggtctgtagcacaggggacaggtagctttatagtcggctagttctggtaatggtagttccactccgttacccttggttcctcctttttagagctaacagatattttctca

SEQ ID NO: 30864 - DNA, 1169 bp, Mus musculus
gatggagacgggggtgtgccacctgcacaaaagtgtggggtgatagcacctcctctccacccagagcatccagctgaggcagctgagctttcctgcttccttctccatcagctgacagctccacaccgtgctgcctgcagcagaggagagatagctgcgtccatgaaatgtaccagccactctcctgtgttctttgcctgtgatagcccatcctctctatctcacactctgaaaggaggtatggtgggccatgtttttacacaggggtacttgaggacctgacagtagtaccttcacctgtgtctagagctgtgggtggttgatccatgtgtggaggtcaggtctctgcagaccacaccaccccatttcctcacctttaccatgtaggcttgggattcacaggaaatgtgtctggcagaatcatattggatgctgtaatgaagtaagtacttccagctacctggtcagagatgggatttaatgtcagagatacttccgctgtatgtgtgagtcattgtgcaggcgatctcattggcgtgatgggagtaccaggccacagcaacaaggaagtaagagcttctggtggcaaatagatctagagaatgcagtctgtcctggtggggaggcatggcggcaggagctgctcacagtgtgtccacactcagggagcaggaggggtggcactggggcttggctcactctctcctctattcattctgtgggatggggccacccacattcaggtggatctttacacctcaattaacctaatctagaaatttcctcacaggtgtgctcagaggcctaggtgatctgagagtgttaaccattacaagttcatctccatgtcaatttgacagcaacatacatcactgttaaaccacaactctcttcccatgggcttgtcgtcatctcctgatttataatgcgaagtgcatgcaatccaaagtccccgtgatttttaacagtgccattcagaagataagtgcagagtgtcccagaggtaaggtgtcccttacctgtgcgtccccacaacatcgggaaagcgaaatgcttccaacacgcagtggtgtaacggaaacatctccatttccaaagataatcagaccaaagcaagactgaacccagcagggaaaacagctctggaagctgtgtgtctggcatctgtg

SEQ ID NO: 30865 - DNA, 1125 bp, Mus musculus
atcccatggttggtcagcctgttgcattgggcctctggtaaagcatcatgggtcatgcagacaaaaatgggaagagctgctcacaccattactaagaaccaaaatggggaagccaccaaagtctgccagcctcctttgatggtactcctgcagtgatccgagtcccggaccccaactctagaagtttctactctcccctcaagacattgctcagagaccaggactgttattctcaggtctctgaaggtcatcggaaacccaaaagttggtgtgtatatctctgtgtgtgttcatgtgtgtagttcttttcaaagcagcattctttataattgactcaaagttaaaatggctcaaaggcattcaactgtagaatgggtaagtcagttgtggcactggcatgattggtgtataacaagaaatattctatagcaaagaactaagtattatgtagtgtatttttatgaacatacacaaatatttctggatgctccatagaaaaattaaaatccataaaaacgaatgctatggcatccttttaattttaaaaaagatgtttttaattaaaatagaattatataatttcccctttccttcctccatccctttccagctagcctccctaaaactactcccattcccccagctctcaagttgatagcctccttttatttgatttatatatataggcgtttgcatgtatatgcaagtacatatacatatgcatgcatactgagtcccttttcattggtagtatgtatatgatttagaggctgacttctctgcattggacagccaataagggggcttatccctgggagaggctatttcttgtcccagaagtaaaaagttgcctatagtctttgtctagactggggcctgcaaaactgcccaccctctctgtgatgccatggccgttggtattgctgttgctccagctttgttaatgcagccatttccagaagagcctgtttcacagtagacttcctggtgtgctgcctcttacggtctttctgatctttcttcctcaatgttccctgaaccatggattcaggacttctgtgtatccactggtctagcctgggtggttgtagattcttttctaagtttctagtaccagtttcaatt

SEQ ID NO: 30866 - DNA, 1105 bp, Mus musculus
agaggggcttgcatccaaccactgagagaatggaatacgccttggctaacagacaggactgtgtaagaatggctttgtgtctaagcaggtaagtttatctgtgcatgcgctcatgcgtcacacacatgtacatgcacgcacatataggggctcaaaagtatgtcagtgtgggaaataatttttatgaatggtattaccagatacttcacatgaacaatgcagatctaggcacaggcatgttaaacaggctgtaaccccagcaggcgagagtgctgacccaaaggtaaaggtaagcaactatgggggagcctgttgtatctgtagagacccactgtattcatgatggacctggtgagccccgaggcatgtgctgttagaattccctactgttggatggaattaggatgtgaacacctcttgcgtgtgcaccaggcttgttttctgtgcattgtaactgcatctaacctgctgttttcctttcccttctgtcttggcatgcttgctctcttttcttggacatcaggaacaaaagcgtgtagatggcaccacccgagaggtgaaaaaggttagaaaagccagaaacaggcgccaggagtggaatatgatggcgtatgacaaggagcttaggcccgacaacaggttgtctcagagtgtgcaccacggagcatcctccgagggatctctgtccccagatactaggtgtgtgcatgtcatggacccttctccccatgtttgagtccctgtattttgggtttctgtgtgccctactgtgtccttaaaattgacatctgtattttgcttttaaaatactgccttaggcatgctatttgaatgtgggtcactttgcaagcctttaaagctttctcttgggttctcttgggttaatctggaaggtggggcttaatgtggattctcaacttgggtgactggcagtgactcgggttttgcttagtcatcaggtactgctttaatgtaaaatgttgaatttcctttgttctttgtcagtaggacccaggaagaccttcatttgaagaaggcgcagacaaaaaggagggcttgctatctctttccaaaccactcaacttacacactcttatttcaggag

SEQ ID NO: 30867 - DNA, 2240 bp, Mus musculus
gggcttgccacgtatctgcgcagctgccccacgtcagctctctgcaagatcactggctgtgtgtctcagtgatgtcttccaaccagtgggtgatacgttttcctgtttcttccctttgcaaattgaattccaggtagatatggttgtagaggggaaagtttaacaaatcagaatgaaatgtttgtctgtttgcacactgggcctggtggcctccaaggaaatgtgtacgatcgtttgctttctctatcttggcgcttgcaaccgagagcggccatttttatgaggggagccctgtgggtactcatgtggaaagtgcccactgactttggcagatggagttcactttcatggctagccctgatagcgttgggcaccagttagccaggccatgttcaagctgcctagagtctgcagagcttgcatggcagagcggccgcatctggttccctcctactccacccagtggaaaagagacctccacgttttattttctgggatccctgctcctctgttcaccagggagtgagcacaggtcagcacctcaccccccttgctctgaatcatggaagcttggctttagctgagagatgccaccagctgttcacaacccatggtgctgtggctagattcctgctcagtctctcaaacagggccacacccctcctgaagcacagctctcttctctcctgttgtcggcacattttcaattttaaaaagtacctcacaagataaacttgattcagccagttgcccgggcagagacctgacttcccctctcctgccctgatcctttttaccaaatggcgattccatagtcctggctgaggcaggggctcaaagtccagtgtctgctttgcaattctggaaggacagctgcttatttaaataagtctgtgatatccgcaggcttgggttacagggaggaccttgcagagggaccaggacactgccttcccttaggtgcattatttacgtggcctgcagctcttaatatctctcactgtttatgaaaagaaagattcagatccggggtgacattgtgtcagttgacagggaatgcctgtgggataattaaaaatggtttttgctcatgagtttgggatgtcacccagccgcccacatcgcctgctatgtgtgtggacgcctgtccgcttggccagctatcctgtaacacctgccagtagtaggttttcctcatgtcactatgacagtgaaagcccatgtgcaagcccctccctacgccctgctttggcgtgtgtctgagtgctctgtgctgcgccatggccatcctggagcctgcgcacacgtggccgctgctgtgactcgctgtccttggtaattggtgagaggctttttctttctttctcagttctgcttttccacactgagacccaccatgttgacatcatcctcgcgacgttgacatttgagccttttgttctgtctcccatgtgccctgtagaacccagcactcatgtttggcaaaactttttttggtaaggtccttatgctctcagggtggagggaagacattaaagctacgcagccattgtcaggattttttctactgatgtcacatcagaatataactagtggctccttactcacaaatgttcacgagcttctccgttgtcacttgtcctgtagttttgccaacaagttaattttagtttgattttatagctagagagaaagcttttgcccgttgcattctgtaaccttcaaaagaatgagaaacgactaaaatccaattcagattatttttagagattctttttggcaaatttgatttagtctaaaatttaaattcaagttgcttgaatactttacaaaacgagaacaaagtaaaaagtttagatttttgatttccactttttttttaaaaagtactaaaacaaatggagagcagacatagtagcatatttgacttctacacatttcatgcttatacttaatctacagatcgcaaggttgttttatattatccccttatagtgttccatgtgtattgtagctgagtttcagatacggtattttctcatagtgtaaactcaggcagatgaatagctggagagtgggtggatggatgggtgagtatatgggtagataaatggatgagtggatgggtgggttaggtgggtaagtagctaggtggatgggtgggtggatacatggatgagtggatgggtggattggtgggtgagtggataggtgaatggatgataggtggtggatggttg

SEQ ID NO: 30868 - DNA, 1792 bp, Mus musculus
caaggtgaactgaaaattctagctaaaatcactaagataatcatgagatgattgcaagattgcagtgagcggggtcagtgctgtcaggagggactgtctctctctggctgagcatttcctctttggttatagtttgtcactttttttaaagctttaatttcagtaaagtaggaattccctgttgctagaatgataaaggaagccgcagcgtgaagccggcattcttgccagccagaaccccaggaccgtgcacagctgcggcggtggcatggcgtgttcttccggtctctttttagccttgggaagggctagtagagcagccagaaccccggcagcagggcagcgcacgccctttggaagattacgttttggtgaagtagtaatctcgaaaagaagcccctccctcccctcccgacctgatcgtcctattggagcagtgtgttcagacgcttacaactaggtctgttgggagtttaaggaacagtacggggagtctccatgtcccgccaggcatcaagtggtatgacagtggctgaatgtaacttgcagaaagtggatgaggattctagtcgaagctgtcagactctgggtagcctcacactgccctccgcatgccgtggtggtggtggcctgttgataaagcccctggttttctattttactaaaactgttgactgagaagcaaacagcaaaaagaaatgtttttgtgctgctatgattaacatttattttctacctttagctcaggaaatgacttcatctattcatcccataggcagatttgtggcggggtcacttagctaatcgggcttcgtggacagatgtgctgggagaaaaagatggcctttgacaaactctttctgatagtttctgaagccttaccctggctgggtttgtgatctgccagcatcgcacagagaaccacaaccaagagcatgggaggtagagccaggagcacaggcctgcgagggcctacgccagattgtgttggaattaagacatgccacggctgcagccttgggttcagagacaaggcatacagtgcggctgggtcctccaggcggccttgtgcagcactgaatactgtgtttgcttgcacacacatttttgaagttaaaacatagcaggaaaaacctagttaagttctccatgaggtgaggtgtagcatgggagccaacctccgggcgagcaggcctgcttggctcaggtctgcgctggacggtttgcaggggaagggctcctgggtgttggctcctaatttactttttatttatagtgcagatggatctgaggaagacattttgaattttatcagagactcagtaaacttaaaaagcatacagggtttgggttggggactggggaaggcaggtatggggagtgagaaagaaaggtgacaaaggtgacccgcccagcacacacttcaggggattgtcgtttgtttgcctgcgattatgatgagggcagatgcaagtttcagacaaggctagctgctgtgttattatgtacatgtttgcttgggcagctgtcccagattttgtatattagaacaaaagtttctatgaattagcataactaaaagtaaatattgtaagtgaagcccacttctgagccatgcggcttctgtcatggggatttcgcctttagaaggttactcaagacaggagccgagtggcttaggccgggccaggaaatgtgctatggcgtcagccatcagcatcgggtttttctttccatgatggccgtaggaagacctcactttcataacacgctcctcctgatactttgtgta

SEQ ID NO: 30869 - DNA, 1192 bp, Mus musculus
tttggattagttctatctaaagaatttttttattacagagtgaagaaagaatatgattaagaaaaatgtcttagggcttcactgagaatactgattctgttatatataaaattgggatctctaaagagtttgttttgaggattaaattccaaaaatttaaggtaatgtatatgaagttctaggtgtagatttttttctttttgaaatatttacaaattgtatctgcctgcctgctttcgtgtgggtatgttcggtgctcgtggagaacagaagagggtgtcacatgccctggaactggggttctaggtagtgagacatctgacgtgggtgctgggaactgaacctggggcctcttcgctgcagaaccagctctgcaacccccgtgctttcttaataaatggtagtttttctactatagatgaatagtatgcttataggcataacgaacatgaaatacatgtttaatatacttggtgatggcagatttaagatctcatattctaaaattacaactatactgacttgaaaatgaaaatttcacataagcatatactttactgagtttgaggctaaataaacacatgtgcttgcctggcttcagacatggacttggaggatctgatctggatgtgacctggaggccttctccttcctgaggaccagcttccatagtgctgacagctgctagttgagcttccaaggtgggaagcagccagtagtccttgtgaactgtaatgcctgtggtccacagcagagtccatccagcatggcagggtgtaatagcggcactgacatttcgggggcaaccacagctcaggaccaaccttaataggaggtaacttaatgtaacccaggacctgttgctcatgaagtcatggaccgcagtggagagccgtaccagcataattcctccctgcagtctgagtacttatccttacaccacagataaatgtaaacttatccttgcagtagttagagacgttataaaaagcctgcgactggttaaagtgaatagaaagtgatcaaggggtacctagccccatctgcaatacagttcttgcaacaaaggctcaaggagaatcactaaaaaggggatggaaagattgtaagagccagaggaccaggaaatgtgcttgttaaaccaattttaaatgtaataatttttctctagccttactacctcccaaataag

SEQ ID NO: 30870 - DNA, 1182 bp, Mus musculus
gaagtcctggcggagttcctcctcgggttaggtggagccccaggccctggctcgggaagggggcgtgtgaaggtggaaacttttaagagtgctgttgaaatgttttcttattttcaactctctgaagcgataggaactcttgcggcttccaacctgtgtccgtccagatggcagccttgtctctgggaatctgtgttaatcttgaaaagctgcattcgctttcctgtcatttgtttattttaatagagcagacaccgctgtgtggggttgaagtacacagattcccccgaaaaaaacgaaacgcgcgcgggtgggttccaaacgtgtttttgtgcattgccagaagcaccacggcttcccacgtgataaagcaaatccattacctcctttatgaacttcgccgtagagattgtgatttatgaatcaatgaaaaaagttactctttgcagtgtgggtctggagttatttaccaaagacctgcacctgcttcatctccgtttttgtgttctgggttgtatctaggagattctccaaaccatcttccacctgcaagtgatctgtggttgtgtgtgagtgtgtgtgtgtgtgtgtgtaaggagtggagaatcaggtaggaaaagtggactctgtgctactttctgtggaacagtattaaaaaaaggggtggaataagtggacttaaaatccacagcatcaaaaaagtcggaagattatggaatcactgaaggctccattttcccacgtgggtaattcttctttcctggggttgagaagggggctgtgtttacagttactgggattggttgtgctaattagacatgccacatgggataatcgaatctttcatagtgataattttgccagattgctgagctccgtgtattttggggtcatggttcattgacaaagtcgaaggtttcaggagtggtgtgattcctgtagtctgttcattcactcagtttagtcaagtatccatctagcaccagctgactggaactggggctacagcagtgatccagacagttgccacagcagggctttttatggcatgcttctagcccaggactttgggtgtagaaagatcacactttccaggcaagtgtagctaagacctcctgtcaaaagaactgaccctccctaaccaaagataatgcccactttcttgtgtttactactacttga

SEQ ID NO: 30871 - DNA, 1955 bp, Mus musculus
aggaaacatggtaagtttgttatgtctgtgcctgaggagaagtggcatgtcttagtctggctttgcttgtcagagacattgtcctttacagtgtatgtaactgccgaatgtggacttgggttggaaactggtatactcatgaaagtgtacctgtggttctagaagtcttgattttttttttttttccttttgcaggcgttgttcctttggccacatacatgcgaatctacaagaagggtgatattgtagacatcaaggtaagttgatggagtggagggaagggcacacgtgttaggaattgtgatttaattacttgaagttaatagcccaggatgggggaaaagtaaaagatacagttaaaaataaccttattaggaattgagagcgctgcctcatgcctttgagcctagctagcactcagtgcaaaggcaagcagatttctctagttcaaggccagatgaggctgtacagttagacccccatatgaagataatatttgttattaaagatggcagtgttacggaaccccccgtgaaggccgtgtcctttgatgggtcgttgaacagattctgtcgctctggaacttaatgatgattgtctgtttgattgcttgatgcaatgtgaaaaccacatttcaccggctctgagagttcttgagctgaccttgaaagggagccttggttagttacaaggatttgaaaagaggaatttctggaataatactttttctgttgactagggaatgggcactgttcaaaaaggaatgccccataagtgctaccacggcaaaaccggaagagtctacaatgtcacccagcatgccgtgggcatcattgtcaacaagcaggttaagtgagtagagcgcctttctttgactaagtagctggcctcaccccccctttcactttgccaattggacttaatgtcttcattggccattcaagtggggcaaaggaaataaccttttaaaactcaggcaaacttaagtgtttgtcttgtaacctgtcaggggaaacattaacgttggggaggccggattctgtgagtagtcggtgctggcttttatagcattaaaacttcgttacaggcttcctttgcctggtttggctaagttactgtggtttggggtctgtttttatcagaaaaaggagctttaaagtgctctcgaggcctcttcctttgggtgagaatgattgacatgtcaccatgttgatcttgggggagtgttagttaacagctgtcagaacagcgtacattgtactgtgtttctgagtgaagcatttagaacttaccggtctttgctcattccaggggcaaaattctggccaagaggatcaatgtgcggattgagcacatcaagcactcaaagagcagagacagcttcctgaagcgggtgaaggagaatgaccagaagaaaaaggaagccaaagagaagggcacctgggtgcagctgaagcgccaggtgagagctgccttggcggtgttcactcactgttaatcttgaggaacccttagaacttggctcactttgttaataagcttaagaagtgtgtattcattatttccaaaaaccactaaacttcactataatttcattttttttcttaccagcctgcgccacccagagaagcacactttgtgaggactaatggaaaagagcctgagctgttggagcccattccatacgaattcatggcctaatgtacacaaagaaataaaataccagcaccaggactgtgaagtgttttccttagactgtagtgtggggtttgctcattggctttcttgttcagattttactaattgttctaaatgatacagcttagtgtgcagaaaatatcctcttgattggaaaatagccaaatatttacaaaacaggtatactagtttgaagaggctctatatggggggagggggtgctggaaaacattagtgggtgaccagtaatggtggta

SEQ ID NO: 30872 - DNA, 1221 bp, Mus musculus
aatggcactaattctgcccctgtttgtgttttgttcaggtgtggagacatgatcgtagcagtaaacggcctgtcgactgtgggcatgagtcactctgctctggtgcccatgttgaaagaacagaggaacaaggtcacgctgacggtcatctgctggccaggcagcctcgtatagagtcttgacatcagactccagtctcaattcttcctgcaggtccgtgaaggaagcccctccagggtggcatatctgctgggcagcgacacaggacagcaatactgacatcatcctgtgtttccccttggctcggaatcggctcccaccagccccaggggctcatttcagatgctctcggtggctgccacgactgtccctggctggacggaagtggcctctgtgcctgcagcagcctgcagcagctcagtcatgaagcgagttccacccgcaactcctccatccgcagcacctcgctgctgcagcgtccgcagcaccccctgccccggagacagagctgcggaggggcgcatcttaggttttcctcattttccattggtgccaacatttcaagatttttataccgtttataaagtgacttttgggctcgtttctactgcggctgatcttcagtcctcaactgaagacataaaccgaacaccactgatgagacttaaataatgtactgcggttaaaataggagagagtcaagaataatgctattgaagggacagagcaacctgggaggcgacttctggaactggcaaagctatgttgcctggaacagcccagaagcacgaagactctgttcaaaaggaaagctttgttgcgtaggaaaagtttggagatgtttttctaaaagtcatttctagagtttatatttatcagcaatcttgtctggagaagtttttgtgatttatgcaattgaactaggtgattaaataacattacttcttaaacatgagtgcgcatacacacacatacacacacacacatacacacatacacacacacaccacagctaagttgaaagggagcctttgatttttgttcctgtgtattttagaaatccttagtttcccccaagagaccaaaaagctctgtttttgttcttgtttttttaatctgaaatagtagattttagatgttagtgtcttcagctgttggtcacttaactttctttatctttttttttttttaatgtttagaaagctgtttgtcctttattca

SEQ ID NO: 30873 - DNA, 1263 bp, Mus musculus
ttaacttggtggggtttttttttttttctgagatgacacccctccccctctttgctggagtcaaatgaagtagggaaaaactggagttaaatatctatggctagaagtgtggaggcaggagaatgaggcagtgaatcataaaaagttaatcagaaaacgatattccatgtgatcttattcttacaaaaaaaatatgtgtgtagaaaaatatcaggattgaagacctcaatggctgaaggcgagaggaagacagccctggaaatggtccaggcagctggaacagatagacagtgtgtgacatttgtcctgcacgaggaggaccatacactaggaaactgtctgcggtacataatcatgaagaacccggaagtggaattttgtggttacactacgacccatccttcagagagcaaaattaatttgcgaattcagacccggggtgcccttccagctgttgagccgtttcagaaaggcctgaatgagctcttgaatgtctgccagcatgtgcttgtcaagtttgaggccagcataaaggactataaagctaaaaaggcaagcaaaaaggagcccacattctagtccctcgtgcagggtacaagcaggaccaccctcaggatggtgcagaacccagaattgtgattgcagcatgtactgtcctgtaggaaagaaaatgtggctctagctattgacccatacagctgttggaatctctgcaagtatatttgcctaataaattctctcttttgtttaaactagttttgagtggtttctcttccttgaacctagatgaaccccaaggatggtgtcaccctcttaattgaaccaacactaaaagtgagcaaacagataattgggccaaggtaggggttttgatcatagatttttttttttttttttgagacagggtttctctgtgtagccctggaactcactctgtagaccaggctggcctcaaactcagaaatccgcctgcctctgcctcccaagtgctgggcttaaaggcgtgtaccaccacgcccagcttgatcacagctcttaaagagtctctttatttctatatgattgaggtgctaaggaaaggagaggtgacatagaacgagacccaggagactgtaactagaagggctggaaagaagactggcagagggacttgaatttttttttttaacattttactcattatttgtgtacacaaacttgccatggcacacagataggagtctcttctctccttccaccatatcggagctacttggtgattgc

SEQ ID NO: 30874 - DNA, 1141 bp, Mus musculus
agaaatcggtgacatgcctttaattaggggtcaaagaagaaatcaaaggaagaaataaaaagaaattggacaatgtttcaaactgaataaacacacatcaaaagatataggatgccactaagttggtggtaatgataggaaatgataggaaagttttttgttttttttttacaataagtgattatagcttcagccttaaaaactaggaacaaaatggtaagtcacacccaatgaaaacaaactctgagcagaaatgaataggaaaaagaaaaaaaattggggggtagggcagggttggagagatgcttcagtggttaagagcactaacagcttttataaagtgctagagtacaagtcccagtacccatgtagggcagccacacagctacctgtaattctggctccaggatctgatactctggcctctgcagacacccaccctgatgtcacattccccacctactctcacagagttaagaacaaagcgacaaatgtggatctgtggggcgtattgctttttttttttttacacacacacacacacagacacacacacacacacagagggatttaacaagatgaagtggacgatatctgaatgacagacactaaattatttgatgagccctcagtgtattaaagaattatgtttagtgtgttacacagggtctcactgtgtaccctcggaactagcgttgtagagcagttggcttcaagctaatagtgtatgtgccatcacatctacctagaaatgagctctgtaattatctcccctccccatgcctaccctgtatgtatgtatgtatgtatgtgagacaatgtttctgtgtaaccccagctgtcctagaacttactgtagatcagggtggctctaactcagagatccactccacctgccactgcctcccaagtgctgggattaaaggtgtgagccaccaccatctagctgtaatttactttaatacgaaaaagtttagatgtttttacttatggatttgctcctaatatgtaaaagaagaaacttcatattctacatagacttaagtagtaaatttttttttaaaatgctattataaaatttattctatgatgatttcatcatggatataaccctcgaatccatcttttcaactttctgagc

SEQ ID NO: 30875 - DNA, 1148 bp, Mus musculus
aatttaaagtttagtaagccccttaaagaacccatagacagaccttgaagaaatattacaattagttttatagacacaaatatgaccacaaacataatcaagatttgttatattcctggttcctaaggtcctctttttttaaaagtaaaatgtagctcatcaattaatgctatcctttgggggtatggttcatatattttggtgaggaaaagatcaaatgtatccacattgcttagattctccagaaaccctttaattttaaaccctcctgaatccttgtctgaagcacaaactaggttcccagcacctaataatcagccttcggaccaaccatgtaatacataaaggagcttcctacagaaggccaggcccttggagaggtaaatgtttcggtcttccgtgcttcagtccctgggataccctgtgaagtgcgacagtgcacagtgttttatggtattcctttttgtcctataacttttgcttttaggcttactattttacaaagtccctaagaatttaaatttaggttaaattgggcagcgtaggtcactgcatatattagcacacgagttcatttctgtcattattaattgtaaaatcctgaattgtgctcagtagtagctgagcagtgtgtaaggagtggggaatcttcccctacttttgccttaaaattggaattttgtaagtattttctttaatgaattagattctcatagtctataaacagtaatcttgcattgttaacttgcattaatagacactcaaaggggtgtctattaattgacaccaaggatttctaaatttagaaaattttaagtttattctgatattgattactagattaaaacatattatcaaggccatgcaaagaataagcataataaaatgtgcctgaagaggtgtgagggctgatgtaggttcaagcccagcctgtgctgcaaggcgaggacaaggccacccttgcatccgtcatgaacccatctcagaacaaagtgataggaagtctgtaagttagagtcttccaacaactcttttgtgttttcaatttcaaataactgttgtttaattgacattgctttgacttaaattgtcaggcagctaaagacagttttatctattaattgagtcactattacttttaaaactct

SEQ ID NO: 30876 - DNA, 2684 bp, Mus musculus
agggaactatttgcaaggacattgggaaacaaagggggcagctgttcgccactgagagatgcagaatttgctcttgggggatgggccaggtcagtacattagttcatagaaatgccgtgtagtgcatagtccttatgagtattgtgtgcaagctccacatgccacccactgttagctcaagttgaggcttgtattgtgtttaagaacacgcagagagaaatatcattgagctgtcagatatgaatttccgtttgttgatttaaatccttttccaggtaacgatcggaacagtaactgaaggagcaggcgctgctcttctccaggttcatctagaggcttcttcaaagaggcgtctgtctgccagtcacatacacttatcttgacgtaatttttaatagcaaaatgaaattgtgctgaaggcctaaaagtggaggagttatattaccttagggtctttccagtttatttgttttttgtttttttttttgtttttgttttttgttttttgtctttgaactacagctttataatggtactttacactggatagactcagacactgtcgaggaggtgagctgagcacagcagtggcctgatgctttgcggcctgactctggagggacacttttctgctgtgcctttgcactcactgcttaacccaaaggaacaggacttttgataaaactcaccctgtagggtcggtcatctgagaaggccatttcaaaagttggagttttcctccatggaacttactatttggacatgcagttgtcgccaaactcaagtattgtgggatttgtggtcacttcgatactgaagactgccaaatacattgggattttctcttaaacagccgccatgaagacttcatctccttcccggtgctgtgtgttgagcgcgcactgggtgtgcaccccatacctgggaagaaatgtggggatttggaggtcaggacagactccaagcacttgcaactgatgttactgtcttcatttttaacaagtatgcgtatttgtatatttcagagaagtttttaacatttctctgtccactttttataagctttaaaatgatttttctctgccttgaaatttgcatcaagaaaaagcacctctcttcactgaaagctttgaggactagagacacacttcccatgtctaacaagcacgtctgtatctgagagcgctagcatcagttgttaatgagaaaatcaattactgcatttgatctggatggattttagaagaacataatgttcaatattccaaggataatgaacatttgccaccatgatgttccttgtgtttaaagggaacgagaactttcggtgtaccacgcagaagtctttatcattagctcatgtatttgaggaagagcagctgtctttttatatgttttttgacaaatcatattgtaattcttttgtacaaaaaagaactacttgtattctagaagaaatatgaaatgcttaatttataagcgggctggagatttttttccaatattgttttctttgaaaatgaaaggggatcatctattttagttttgggggcctgggaactttttgaaaattttcatttgtggaccaatgttatgtgaatgctaaggaagggcaggggtaacatagggcttggacctctagtcctgcatagaccagcaaactcccctctgcaaggcaggttcacatcacaaccccgagtgtctgcatcagaaatgctagtctgcttccgccccagcaacctcaggacttgggttgggtataaaaggtagtcagctgaaagtacctaagtaaatagtgtcagccagaaaacagtcggtgtcaggtgatacgtattttttagctttgttttatatttatttttcatttcattttcattgggaatggttttcaaaagaactcttgagttctgctttgatgggtttcttttttttttttttctgttttgttttgctttgcttttttttttttttttttttttttctgggagccctcttttccacagtgtaaacccatatagaaggttgtctgaaagttactatttagtgcataggaagagtttaatatctgagagtatcgaatgaaggatgtgaactcatcataacttcctgttatgacagacacaacacggaaaggacaacccttgaaatcatgtcgcgtcgctcacttcagcagtgtacccatctccagtcctgttagtgtattcacttcactgcagatacctttgagggtgcccttgtgttctgctttgaccttggttctgtcattggatagcaacattgtctctagaaagcaccagtacgtttaagttctaatgtcacaatcccagtacctgttgctcatctttaaccctgttttcagtctctacgtgtatagcagtattttttaataaagaattgcagaaataaacttgtatttctgttgtttttattaccagttcatatatggtcttgattgggtttttgaagtctgttacctatgtattttgggtgaaatggtagcagatttgctcagtggtttagcagttatttgttgattgtggatcccctgtgcccttggatctgtgctaaggctaaaacttacagattacgaagatttgcaatggacagaatgtccaagaaactacttatctgacagagtaggaaatggcatggagctaggtcccttccctctttgggaaggaaag

SEQ ID NO: 30877 - DNA, 1169 bp, Mus musculus
gagcatcagaaccttggaagagggtctgtctgtctgtctgtctttctctctctctctctttctttctaggtttatttttatgtgcattggtgttttgcctgcatgtattgctgtgggaagtgtatgtagttgggtcccttcaagcaagatacaaacttgttttaccgcccaccccaacttcccttggcctcttggcccctttgcagtcagttccagctccagccctagccagcctgcttgttgtcacactgggttggttcagatgatcacagatcctgatatgatgactcctgcgttcccctctgtgtctgaatgcccactgatagcgcttctttctgtttctttccagatccatcacaaagtgaactgatgggtgagccccacgtgatggtggaacataagctgggcttgctgtaataaggggcccgcgcagggaggaacgacgagtgtgctcagcatagttgcctgctacagtctgatgttcacagcagtaaagtacagagaggatcactgggccatgtggaagcatttgaggcttggttttgggttgtgggtcagttgagagcctagaggtggttctgaggttatagcaaagctcaaattctgaaaatgtgtgtcttataaatgttataaaaacgcaataaagtccccgggagttaccttgagaatcatgtgtgtggttgggtttggtagcagcatccggcgcagagccttagtgttgctcggtagaatgctactcgcactttaagggttatagccaagtattcttacaagttgagaagtttaagtttgcagagtttggccttttttatgtgagaagttaggtatagcagccggggcatgaagcttgaatgattgtggttcaaagttttatctcacctgttagcttatcagtgttctgtggaaggaaggtacaggtcacttggttttaagttatgtatcaaggtacagaaatgtttttaagttatgagaatattcctgttatacacccatgaatagttccaggatgaccgcacaaccaccatgtctccctaccccctgacacactggcatctctgggttctaatatccagccgtctctttagaacactgaccacaaggcagccagcccttgttatcagccccttggtccatggagacctgttctgggacctccaatggatttctga

SEQ ID NO: 30878 - DNA, 1169 bp, Mus musculus
ggatgcttttctcaagaattatcggtcatgaatacacctgtcgataacttgagaacttaaaatgagatagtgccactggctgttgagaactagttgggggtggtggccttaggtcacagacatagaggagtcattttatgggactctaagattccacggcaaaacaactgagtatcttgggagtgtaggagagaggaaaaatctcaaggagtttattaattttcagaacactatatgtaacaaatcagtggggttcaagatgccaggataaacctgctacatagaacttgagcaatttattaaaagccacatgtgggcgggaaagacagaatcttggtaacttatgtatctcttaacccattccaaattcttgtttttgcagctgcgtcaagagcattggctgggaagagggaagctacacactcctcgtccacgaagaacccagtgagcacacatcagactagtgacagtcggcagcaatgcacacgtccctatgcagtgagcacacatcagactagtgacagtcggcagcaatgcacacgtccctatgcagtgagcacacatcagactagtgacagtcggcagtaatgcacatgtccctatgcagtgagcacacatcagactagtgacagtcggcagcaatgcacacgtccctctgcgcaactcctgaagaatataaactccacaatcgcatttcatcagcaatccacaggacaaaaccctgtctcctaacccaagtgagtcgggaggaaggcacccagctctgctgcttcttgggaccacccagcagcacactgtgttctacagagaacaggcccagcacctaccatgctcacttctccatggaccagagaaaccccgtgaagagccgaggaaggcttgtgaaccttgttaaaacttaaaagcaataacttcactggcatgctccagtctcccatgtgattgaggagttctgacctcagtctctccgtctgcacaatgggcttgctggcctctcagggattttgaagacataatgaggaatttttattcagaataatcactgttgaaataatgtttcaggcatttctagttcttcccatacttgactgatgttttaagagcctgttaaggctctactaatggaatgaaaagtccttgaacagaagtaccttttaaaatatgtggtt

SEQ ID NO: 30879 - DNA, 1166 bp, Mus musculus
gtaaaatgtagtgaatatttcgtttaaattttcccaaggccaacaactcccctactcggaactcttctcctctcatgaactttcagtgtcttctctctcacattgcttgtgcagacgcttgctgggtccaccggaatgctgcagtgaactgcaaccctagcgtatgacgtttccaaccacttattattatcatcattattatcattattattattatcattatctgctttggacaggagtcttgttatatcgttgggctagtctcgaactctcgatccagatacctatgactccacggcgcttcagcgaaaaccaataatcctatccagatacgcttagcagaaccttcgcagagctgccgggatcacccaacttgcccagcaactcggggagattcagccgctgaaccttcgggggcgggtgcaagagaatgacactgcgctagaccaatcgctacgggggcgccggccgccatacccaatcacaagcgagctagggaagcgggtgacagctccggccgaagattgccagctcttggcagagtgatgatgctcggcggccgagtcaccactagggcccaaagaccaagagtgcggcggcgcggggagcggcggggactgagtccagggccaacagagtccgggaggtgcgcttatttctctttgccttctaacagggctcgagtgtcccgtcccaagggacgtccccctgttgcggtctagctccacctcgctgccccttcctttggctcttcccagctggcgaaccgtgctgaaaacccgggggcgctacgccccgcactgggtaacggagaacacagtcccgactacggtcccacctgtgcctagcctagcaggaaaactgtaaccgtggggtgagttttaaaaacgaaaacagaaactaaactccccttccgatcgggagctgctttttacaaggcccttaacctgcagccaaaataatagtaattacataacctccgggtccccgggtaacttcattgtttaccttatgggaaccggccggtgctgttctgctcagcactgtgagcattagctaagcggagtcgggggcggaggttgacttagtccctgctcctcggagagaactagggtaccctctcccggcaagggcactctctcagaaatctggaactctttttgctt

SEQ ID NO: 30880 - DNA, 1106 bp, Mus musculus
cacctcaggaagttatggtggcagttctcagagcagcagctatgggcaaccccagagttatggtcaacagtctggctatggtggacagcaacaaagctatggacaacaacaaagctcctataacccacctcagggttatggacaacagaaccagtacaacagcagcagcggaggtggtggagggggtggtggaggcaactatggccaagatcagtcctctatgagtggcggcggtggtggttatggcaatcaggactagagtggtggcggtggtggtggctacgggggaggccagcaggatcgtgggggccgtgacaggggcagtggaggtggttacaaccgaagcagtggtggctatgaacccagaggctgtggaggtaaccgaggaggcagaggcgtcatgggcggaagtgaccgtggtgacttcaataaatttggtggtcctcgggatcaaggatctcgtcatgattctgaacaggataattcagacaacaataccatcttcgtgcaaggcctaggcgagaatgttacaattgaatctgtggctgattacttcaagcagattggaattattaagacaaacaagaaaacgggacagcctatgattaatttgtacacagacagggaaactgttgaagggtgaggcaacagtttcatttgatgacccgccttctgctaaagcagctatcgactggtttgatggtttcatttgctacctgccgagctgacttcaatcagggtggtggaaatgatcgtggaggccgagggcaaggaggacccatgggccgtggaggctatggaggaggtggcagtggtggtggtggccggggaggattccccagtggaggtggaggacagcaacgagctggaaactggaagtgtcctaatcctacatgtgaaaacatgaacttctcttggagaaatgaatgcaaccagtgtaaggcacctaagccagatggcccaggacggggaccaggaggctctcatatgggggggaaactatggagatgttcgacgtggcagaggaggatatgaccgggacagctaccggggccaaggaggggaccgtgggggcttcagagggggccagggtggtgcggacagag

SEQ ID NO: 30881 - DNA, 1183 bp, Mus musculus
tggttggccacttagctctccaagttaggacccgcctccacagctgtacctgctgagggcaggtactcagcaatacagagttcgatgtgattatagaatgtggtgcagtatgttaggctgttgtggtcaaagtggtagcaatgttagatctatgtaccctcattaggtggactagagctttgccctaatcagcctcgaccctgggcacttgaataaatctccccatggccctggcttcgtttctccatcacagacacccatcacatatggtaccccacttgaattaagttctgagatccaggtggccagagctgctatgattcctctgcctccatgctgctatgatccggacctctcggcatggaaacccgagtctgtctcccttcccaggctggggaactgcgccctcccctcctgccacagacagacctgccaaacagctctgttcttcatggagtcaggaggtcctgctggcctgcagcaactcagttgccttgggctgggactgcattcttgtgatgtctggatgggtttggggctggaggtcaggtactctgggattagctgaagggggcacagtgttctttgtcctgcccctccggttaactgtgctccatatttgtgttgaactctaaaagcatattaaagtgaacctgagggactcccatgatatccatgtggtctgtgttaactggggacaaagctcattcggtcccgacatggcagacaagggcgcaaaaggtatttttataccctttcctgtgtgggccagggttgattggaaccaagtctggagactcagcaaggccaaagctatgcatccctctctccaatttctccccaacagtccaccacccaggaaccaaacattcgaatagatggtcctatgtgctactccgtattcacaccaccacagtggctaagatacacatttgctcatttttttaaatctggaatcagccactcttcctatcccatgagccattgttgtggatggattatggccagtttgtccaaccttgcctggccctagtgtttcccacaggtgctgtcttagtcagggtttctattcctgcacaaacatcatgaccaagaagcaaattggagaggaaagggtttgttcggcttacacttccacattgctgttcatcactgaaggaagtcaggactggaactcaatcaa

SEQ ID NO: 30882 - DNA, 2009 bp, Mus musculus
gagaccgggttcctaggataagcgtggacacgccccacgggctcactcatgtctactggcaaagccatggccactgctgatctgtgtacctccctgcaatggaaacatggctggcttccgccagggcccatcctttctgacttgagcatcttatgtccccacagatagttatttcatcctaataaaagcttactgttttgttggctcccaagcattaaggaatcttaagtggggaatctaagtgccagggtgcccaccccttggggtgttggtgggtgatgcaaacagggatgtttgagtccaggtatggttgggctagcgaagggagtggccagacagagaatacatggcccatggaactgttagagaactcagagtcagcgctgaatgtatgtcatgttatataattcaaaccgcgtctgtttgccttcatcatgagaggattgtacataaggttcctggggggagagcgagtggtccgtttctttaggcttgttttggtttgcgaaatactttgattgtcacagtggtgcaagtgaaacgtgctacactccaatgtggttaggatgaaaattttagggcaaaaataaataaataaaaattaaaaaaaaaatctaccagctggttttcacctccgttacgctcgcctggtctttctgtgtccactgctccactgagccggggaatatggtgtagccaaaggtcttgagacacggtgatgaccaaggagccttcctggaccatcctgttacacgtgctgaatggctggctcaaaagcccaggagagacgaaagtccatgtccaaagatgttctcagggcgctggcacgtccagcagtgtcaggaagcaaggtttaggaagctacatcatgcacgctagtttattgataagtgtcacctttcgtgctctgacaagctttttgagtttggaacttattttccaatttgagaagttataatatatctttgtatttaagatatttactgctttgtttgtgccttgaagcttcgatgggtttaaggatcacagaggggccaggatactaacgagggctggtttatttgcaaacctgaatacttgtgttgtggtttctccaggacaatttttttattattatttctactgaacatggagccattattaaaaagagttatgtgtggtttttcattatgtaaattgtatatatatttttttgcttgtttgaggttctatttttctaatagtcttcttacagtttcttataatgatgacattagattaagtccgatactaactgtaaatcaagctggtttctgctggattcccgtggattaattctattttattttaaggccaagtgcaggtgtcatccaccacccttttgaaaaaaaatgtgaaatttatgtttcccctcgttgctgaatacattgtacactggcaagacccctcccatacttatgtgttgtaaaatcaaagctgttttgtggtacattgtgtcatgctcctgcagacgctaataaaccctgtctggcttccacaactcactgtgtggtctcaagcgggctagcagctcttgcctagttcccgagcgtgtccattctggagggcaaagggtccatttgtcatctttagcatctttctgctgcataggacgaagccagtggctttatttctatggcatggatttttctagaagccatttgggaaaggctgaggcctgcacttctagatccttgctgactccctacctcacccctccagactcacctggggttagggctacagacttcatcaaccatcggacttaagtaaaccgcaaaacccctcggtccacagacaccagaggcttgcccttgctgtcacacgcaccatcttggaggaaacaagttttatgcagagcacaggctgggaatgagattgcagtttatctaaggatgattgatagcacattcccatgcactccatggaagggcacactcttcattcattcattcattcattcattcattcattcacttatagcacaggag

SEQ ID NO: 30883 - DNA, 1502 bp, Mus musculus
ccaccctggcctggaccttattccccttcatttcccctcccccaccccacgctccatatctctcggggtgtggcctgagggctgacacctcttcatttactctttgtagatagaaactgcttgagagtgctggtggattctcagaaccagcagggtgcccttcccccaccccacatcccccttccaccatattggggtggcgaagcctagtgtcttagtctaatgttaatgctgtttataaagccaagctttcttttctgtctggcttttgacccaagtctggtggaaacaggctgagtaggtagactgatggccctgtctttcctctgctttggaagattcttgagaatggaagagttagtggggctggacaggcgtgtagcctagtggtagcacacttccccagcctacacagggcctcagcttccacccccagcactacgtatggaaaattagggagattagagaaaccacctaattgctgggtcagccagtggaggacagctgagcatccaagagccaggccctgaccaccgtccaggcactttgtctcctaggctgcctgaaaacactgcaaagggagtattataagaccctacatgttgagtttctaaaggtatttaaagttatgtagattggtgctgtaaaatattttgataaatattaacttattttattcgggtcttgattacctattgtcttcttagggtctgttaagtatctgtctgggttttttttttccttgttacttgagagagagagagagagagagagagagagagagagagagagagggcccagtgaggtgttggaagaatcttttaaagtttagtgtctttggcttcttttttgagacaaggtttcacactctagctggcctggaataggattatcgttgcccagtgtggcctctgcctcaggctcccgagtgctaagagcataggcgtgagcctccgctcctcctgctgaactgtctcttgctttctgggtaaaacctccctgtctaaggcagcctaaccatgtgtttacagttgacgtttcagccagcagcttgtatcccaccaaggggaaaggtgtgtatctaggggtttgatctgtcaccatccctcctgaggaccgcaagcaacggtctatatatacatctgttctatatgtttccctgtgcgacacaggagcaaacacaggccctggcggggtggggtggggtcgggggggggggcatcctgaacccacttcctagtcaggaaaagatgcttgaaggcggtgtgcctagttagttgattggccactgagctcttactaagagtggacacttttgggggtacacaggaacaatgatgtatatagttatgcctggagcgagcctctaatgtgctttttattatgcccccagttccttctgaaaggaaaacacaagccccaaacccaaacaacacacacacacacacacacacacacacacacacacacacacacacacacacacatccctccagaccaac

SEQ ID NO: 30884 - DNA, 1448 bp, Mus musculus
tcctatcactacagtgggaacgggaagatggtgaattagatacataaaacttcgctgatacctaccttcctagaattaccagttcaaatgaaagtatcatttactttcctaaattcaactatggagaaataagggcttttactggctcattctccaacattctggagttagttatatttatgccaaatgcattagtccccatgagtttaaggtggagtggagccaacttcaagtacgttttgaagtccacagtaggctttggagactctagagaacacattttcattggttgctatttacaggcaggagtgaaacacagaggccgctcttgtttcctggtggtcagctgagatttaattttgttggtgcagattgcttgggccagcaacagtaattccctagtcgtccccacactggccgtcataagggacggtttatacagcactggtctcctagacaaggtgacatttgttgcccaggtggagcctttaagtctgtctgaagactagagacactgctgctgggccgcaggggactctgatactttaggagccaagttctgccggcctggaacctgtttgttttattcaagtctataaatggccttgttttacttattcatttccctttttccagctgtagatatctatttctcccgatagccctgtgtacatatgtatgatgttgcttgtccctcagcgacaggcccacacttccccccctaaccccattcatcacgtggaggacctctggtaacgatcctaggatgtcctgagtgcttctctgtggctataggaacacactgacaaggaaaggattagtttggtttatacttccaggtcacagttcatcattggtggaagtcagggcaggaacttaaggcaggagcctggaggcttgacagcacatgtcagggagcggaggtctgaggcaaagtggggcagggtctctgtggaaggtttatccttgctcttgggtgctgcacccattccatcggttggagaaggctgtgtgagccccttgtcggagtcagagcatctgtcgtcagcaaggcacccaagcttctgtttctggtcatttatctgcgctgtccacatggcaagctccgtcttctccaccttcatttaataactcgactttgcttgtcttttttttttttaaagattttatttacttattttatgtatgtgagtacagatggttgtgagccttcatgtggttgttggggattgattttttaagatctctgctccccccctaagaagaaaaggaaattttctgaggagcctgaagttgctgctagcttcacaaagagcagcacaaagaaaaagaaaaggtcccagaaagcacaggaggattagaacggacctgcttggtgggaggggcataccttgtggtggcagctcctgcccataataaaaccccaataaaaacaaaaacaaaaatga

SEQ ID NO: 30885 - DNA, 2166 bp, Mus musculus
gagagcaagtaatcagaccgtttttgaaaaatgccaaaaattaaatgattccttaaaacaagctttgagcaaaactcaggcagtttgactatgcctgccttttgcccaggcacagcttggctaacccaggctggccctgtttccccaggtcagagaaatcgggagaaaactggtgagagcaactgctgtgtgatcctgtagcgtcgccagcacagatgtggcagtttgttggcactgcggggacagaggagactcagcagcttccaacacctgtaggacagtcgccagcacatccgtgggactgaatcactcatgaactctgtcatctcctctcacaaagtaaaaagaaccaagaacactttcagtgtggtcctttattccttatatctgtgtgtgtgttgagcagtctgaagtgcacagtggtccccaggggacgcagcaagtctctctgcagacaccggtggccctgctgccgcagagactcctccctccgcagaagtctgaaggcaagtgctgcaagtacaatttgcactaaaaataattattattttcctcatcacataatctgcacgtgtctgtggcgcccagttctcctgtgtgtagtccaccctggaggacaccaatcatcggtggagtaaatacgaggctggtcagccagggggacaggaaggaatcttacgtgctgggtgacttctaccaaagtcggccgcagtggctgtcctcacaggatatcaaactgggcaagactgttgtcactgcagcaagtgagaagccatgcctgctgctcccagcgctctgtagagggtgcccctgctgccggcccacaccgaggggcggcaggatgacccaagccttaatgtggaggggccgtcactgtgcagaactggtgggaagcctgagtggcagatatcagaagatcggaagcctgcgccatcactcatcgaaccgtgccgggttgcactcattcactagagcagagggatcttttaaagtctccagatgctaattttgttactttctgtagtttgcattcggaatcagtgcttgcaattgtattaaaatcacaagctgagttttaaggcatacatgatcaatagcaccactcttatttttaccaataatttaaagattgatatgctataaataaacaatttgcacagcactaaagcatgagctaatttcatctaaacctgtaaaaaaaaaaagattttatatttttttttcactgggaagaaatcttcctggatgaaattacaaatatgtgtagattatatttaataaaaaagacataataaaatatctaactgtagaacacaaatatagattggcgtgtagcattataaaccagtattccatatcaataactttatccagccttttgaaagatgaagttgcagactccgttgtgttctgtatttaacgagggctcctggccctctgcagcatcagatgtaaatggtctctaaggtcatccttgtttcaatgcaatcaggttactttattcattgttaatgctttgaggaaggaagaggctttatatgcagtagatctacgaaaatattgttcatactgatcagaattaaatttgtatagaacagagttttaaaatgaatgtaaatagcactaaaccttttctttctgcagcctgtccttaatagatttcttctgtaaactaaataaaaaaaaaaacaaaacattgtagtgcattttgttgatgatttaaaggtcgttaattgcttaagcattgtctcatctattttgcagttaattttctactcttctgaggcttttaaaactcattcacttaccactctgttgctacttgtgagtgccccagtgtctttaccagttagctggttaatgagtgaggcccatcagccggggttatgattctgttatccctaaaagatgcaggagatattaatggagcagttagccataatgactatattctttgggaaatcaaactacgcttagtcatctttaaaaaaaagagatttatttattttatgtatgtgagtacgctgtagctgtcttcagacacccaagaagagggcatcagatctcattgcagatggttgtgagccaccatgtggttgctgggatttgaactcagaacctttgaaagggcagacggtgctcttaaccactgagccatctctccag

SEQ ID NO: 30886 - DNA, 1228 bp, Mus musculus
gtcaccagaggggacttggagttggctctgaagaaaatcgccaagtctgtctcagcggcagacctggagaagtacgaaaagtggatggttgagtttgggtctgcatgattggtcagctcttccatctctgggagttttctttatgaaatgtgaagaaattcctgaaattaaaaaaaaaaatctggaagttttaatcagaggaatcttcacttgaaggccaaaccaaaacagaaatgccagaggtacagagaaatgtagttgagaaacaaggtatgatcatacagtctgctggctccaggctaccaaacctcatacttgtgtacagaataagagagccagtggcccgggctgaaggggtagctctgtgcagggagggccttgtttacaaagcattggcagagttttcttgcccatacgtgcactgactggtagtttggaattgtcactttgagtggaatgatcacaagttcttcaggaataatttttaaatctctagaatctaatacttcctgttagagttgaaaatgtagttagtactcactcctcttagcttaccagttcctctgttagctgccgccttacatccaccagggaagagtctctgaccgactgctccgttgacatttgccctggcctgtagtctctgtgccggggcctctcctgcttcctttgcaatgatgggaagagcccttcttagttagcagcagccttcagcctttgaagtcctcactcttccttcagtactctcaagtcaatatggctactgttttttctcacctccaacactgtgtgcttttgtagaatttaacctgtttaggtcggtaatctgagttccaaacaagactagtctcctaggcgaatgcaaaagaacctttcccctcttctgcatgtgagcgagcattctgccagcacgcatgtctgtataccacatgcatgcagtgcccgaggaggccagagaggacattgggtcccctggttctggaattacagggtgtgtgagccaccgtgtggatgctgggaaccaaacccaggtctctacaagggcagccagtgttcttaacggctgagccatccctccaaccccacaaacagaacctatgaacttgtgcatgcagtgggactagagcagacagctgccatgctcgttagatgcggagtaaccaggaaggaggatctcagacaggggccgcatgagtgtggtcacacgcactgtgccctgatgtccgtt

SEQ ID NO: 30887 - DNA, 1202 bp, Mus musculus
gtaattgcaaaaaaaaaattgcggctgttttgttgacattctgaatgcttctaagtaaatacaattttttttattagtattgttgtccttttcataggtctgaaagttttcttctcaaggggaagctagtcttttgctttgcccattttgggtcacatggattattagtgtgttatctttcatctagttagctggaagagagcttttgtccacatgccctgccattgtggtagggtaacattttcatccatagttgaagaatctcctaaatcgtgatagttggataagagatattatataacctacttggcaaagcaaggagtgatcaatactgtcacaccgtgggactattaggatcaagcaatctgaacgtctgtccttgaaggactgatagaaaagtaccttctaatccttacacgaggactctcctttaaccgccattactgtgtaatgacagttatattttgcagtttcccctactaaagaagacctgagaatgtatccccaaaagtgtgagcttaaaatacaagactgctgtactatttgttgaccttagtcccagcgaaggctatcacaagaacgctggctgtaaagcctttgcccttctatctagatatggattgctcaggaaacttgactgtttaaaggtatttttaattacttgagccagcttttaaaattatgccacatttaaaatgaagggtatattttcctatactgtggtttgtccctttatgaatcagatacaagaggataaactttgcatattagtaccatttgtccaatacatttgctttttctttataaaacccaaactcattcattaatcaggtttaatctgcttagtttagggaacaatttggcaattttgtggatttttttttgagattatcgttctcttaaagtgccagtgttttaaatagcgttcttgtaatttcacgcgcttttgtgatggagtgctgttatataattttgacttgggttctttacatttgcgttgttaatgtaatttgaggaggaatactgaacatgagtcctggatgatactaataaactaataattacagaggttttaaatattagttaaatgactttcacttaagaatttaagcttttggtcacactttataatagtgccttatagtataaacaactgaaaggctctttcccattaacaacccttgatgctggggccagtgaga

SEQ ID NO: 30888 - DNA, 1108 bp, Mus musculus
agaaatacttatactattgttctgatacagattatttataaagaacataatattttgtgggtagctttttaaattctgctggttatgagcctttaatcccagtgcttgggaggcacaggtaagcagagttcaaggtcctttctttctctggtagaacagtgggtctgaaggacttaggtgctttctcattgtaacaacgacacggttttttatagagactggaaagcttaggttcttcaacctagttgactagcttgctctgacaagtagctacctgtagggagagttctgtgtgttaggaagctgtatcctgtggtcactctcatacatttacacatatctacatacatggaggtgttctgaagactagagtctaggatatacttatccaagagcatgtagctcacaaacatacttaatatctcttgtcttataaaattgcaaactctctttttagagtaaataggatttttatttaattgcctgttgactttttttttccagggttcattgaaaaatccttagtgattttgacatgttccaagtgacataaattagccaatgactcggaatgacggatgattctctgaagattggaaatggtttgccactggttggaccagggactgatgtagggatatcttcactccccatgctggggtacttgggaaaagttagtgtacttatttttggcctcagtgcaaaactggttattttcctcttatgtttgaaatttaaatgaaatttaaaattttatactatgaataaaatcctaaaaaattctgtcttccacggaaatcttacagcaatggcgaaagatgattataatttgtttacctctctgttattgatatgtgaaattagaaactaatgcctagattttatggtttgttattctttgaaaatatggactatatacattttccttggcagttgatatttcctttttcttgtgaatgaagctaagtcaaattttaatgttgtttggataatagctgtttaagatagtaaatgtgtttagtcttggcagaaatcttctagaggaaaattatacatttttttttctggtcacccttccatttaactcttttataacttactatcatag

SEQ ID NO: 30889 - DNA, 1334 bp, Mus musculus
ggcagagagaggtgaatttctgagttcgaggccagcctggtctacagagtgagttccaggacagccaggggaacacagagaaaccctgtctaggagaaaaaaaaaaaaacatggtgttcaacaccagatctgacagacttgagtgggtttaaacaactgatccaatgccacgaggaacctggagaaagagcaatggggagagccaagcaccctcccccatacaatggttacacaccagagcaatcacaaaggagtctggcaagtgttatccccgcccccagcaaaggatgaccccttttgactgtgacaggagtccaactggagatgaaagcacagaacttcagtgagtggcaaacaaactgccataaacagggttctccaataagtcaagtgagtctcacaacaggaagcaaacgctatacgctgcagggagacattgcaccaaaaacccagagcctggtgacaagtttggaggcagtaagtagccatctttaaaaaagacaagccgggcacggtggcgcacgcctgtagtcccagctactccggaggctgagacaggaggattgcttgagtccaggagttctgggctgtagtgcggatcaggtgtccgcactaagttcggcatcaatatggtgacatcccggggacagggcaccaccaggttgcctaaggaggggtgaaccggttcaggtcagaaacggagcaggtaaaaattccccgggctgatcagtagtgggatcgcgcctgtgaatagccactgcactccagcctgggcaacacagcgagaacccgtctctttaaaaaaaaaaaagacaataaccacttgtcaacgtttcccagtccaatgcttctcccactcaaagcattgtgaaagctgaacaccaatactaggtcccacgagtcctcctaacactggtgggaactgagaagtctggcaggaactccagtcagatggtcacctctttatggagagccagaggcagccagggagaccagcaaagaaaggaggaagcctagaaacgtgaactacttgctctggacaaggaaaccctgctctatctgtgctctcttacgtctctgcctcctcgaccttgcactagagaagccccactatgaggagaccgagagctgccctcctctgaccgcgcatccttttcaagagagagcagaaagcgttgtccggctttccccattaaacagacggagagatgttctaagctggccaggattctgaacgccctgccaacggtcttttcccagcaggttagcagcgtatctgtcaccgcacctcagcctgtgtgctctgcaaagtcaaggaggggagctaacaacac

SEQ ID NO: 30890 - DNA, 1497 bp, Mus musculus
gcagagatacattagcatctaaggctacctagcaagtcccagagaagccataggaggcagtcagttgattaggagtcattgtgattgattgatgcagctttgagaagagtagaaccaggtaggaaagcactgggccaggggtgtgaggaagtccttgaatgaactagatggatatcagttatcttaatgataactaattttgtttttttaggaattgaacaatgtttgtgaacctgttgtaactcaacccaaaccaaaaatcgagtcacctaaactggagagaactccaaatggcccaaatattgacaagaaagaagatttagaaggcaaaaataatcttggtgctgaagctccgcatcagaatggtgaatgccaccctaatgagaagggctctgtcaacatggacctggactaggctctgtgctggctccctcccccacttcatgagatgtgtttgccatagtatgtgatcctgtataacagactgagtctatttatattttcttttttttaagactgtctagaaattttgtgtattatgaggggaaaaaaggaaaagcttgaatctgtgtagtctctgaccctaagtgagaatgactttggtgtcagggtcctgtggagttgtgccccacactgagctctgtacagtattgctgctcatacactgaggaggtggggtcgtcttctgaggatatgaactacactgcttggtcacacgctgggatcagaatcttaagcagttattcttgccaagggttttgttttgttttgcattttgctcttcatttccgcatgtgtgtggctgtggttgtttataaatgagactaagtctgatttgcataagggctttcaaaaattaagtctgtccagtagagtgattttgctttcattattaccaagtcaagagtacaacagagctagtgaaccgtagcagcatgcgaagcagggctgtgaactatcaccacacagtgcattgtcccgtggaggtgtgacacgggagacacacgtgtggatcatgtgatcattgtgaacacctcgtgagctttaaaataaagtccaccctgtggtgtcatttctaagctgttggctttgtctccgatcggcattgggaaaaggagtccatcgtagagaatagtgcctgctctccacattgacaaacctgagcacaaagtcccaccctggaaaagccctgctgggacctatcgccatcctggtccttgtcctctggtgactggctttttgggtgggtctgctagtgttctagactatagtgccctacagccaaaaaccagaagttaacctgtaagtgttgtccagtattacaaattgagagctttggtgaattctgttctgaagtcaatttaaaatatttgtgtcatcttgagttcttttgttgtccttcaaggttttgccacatagttctttggtctcaggtggtgtggctccctagggcagggcatcatggtggttgtgagcaagtggtggggaactttcttc

SEQ ID NO: 30891 - DNA, 1201 bp, Mus musculus
gtgcttcatggtggatttggtccaattcagtcattcatacgttcactcacaaactcttcatttagctcttatatcagaatggcaaacgtgccttcaagggtctaactccagtttaccttttcttgttctctgtcatcttgcctgcaggtaattacctatctaaaagataaatctgtttcttttatttcctaatgattcattgggcaatcttaggatacgcattctttagataaagtccaaactcaacaagaagtagaagaaagagcaaatctgtctactgaccccggccttgcccgtccccagccccttccttgcctttcctcctccttgtctttccaggctttgtcagtttcagacgtcagccctctgagcttgctttagcagggttaggcatacacactgccctccctcatcagtacctgtgtgagcagctgtgcctcccttctgagccctctgctgggtgggcccagtctttggactgctcgtctcatagcatttatcttgccatattgtaatggtctcttttactcgtcagtctcccactagctggtgattcacgggttgtacgggtcttgttgactgttggataccagttatctgtcacaatgactggcacatagcatgcctgcaccggatatgtagctcactcagactgtaaccctcctgccatccttcttctgccccaccgacatccagaaggctgcttctgttgatgtctctcctcatctctctctctctctctctctccacaaacacacacacagagagagagagagacagacagacacagacagacagacagacagggcagacagggacagagacagagacacacacagagagacagaaagagagaggccttttgcccactcttctgttttttggtctttttttttttttttatggctagaaggtccaagtccacacatccatctttcataaccacctagaatcttcctctgataccttttcacctccttttcgccagtcccctcctttaccagagctcctgcccttacacgcctcctcccccttatgtgagccccttcccttacgccattcccttcctttatgccagtctccttcttggctgcaatactgttaacttagtgtctgtgtgtaaactcttagcaaacagactatacttaaagagagatttgtgtatgtccttaaacaggttctatatcacatgtccttcagt

SEQ ID NO: 30892 - DNA, 1160 bp, Mus musculus
gattctcccccatagctgcttctcagagcacaagagcgccagctcttcagtggtacccactggcattccgctgatttcacttctgtttgtacctagttcttcatcgccagacctaagctccagcagtaaactgacagcgagcaggaaaagcaccggacagctgaacgtcaatcccgggactcctggcagcggcggaggcggcggcggcagcggcaacaccacgactgcagagcgaagccggcaccagagaagcttctctgtgcccaagaagttcggtgtcgttgaccgatcctcagacccgcctcggagcgccaccctggacagaattcaagcttgtacccaacaaggcctttcctcaaaaaccagaagcaattcctccctgaaggagagcctcacggacccgtcccacgtaagccaccccaccaacctgctggccaccattttctgggtcacggtggccctgatggagtctgattttgagtttgaatacctgatggccttacggctcttgaaccgactgctggcacatatgccgctggagaaagctgagaaccgagaaaagctggagaaactccaggcgcagctcaagtgggcggacttcccagggctacagcagctgctcctgaagggattcacctctctcaccaccacagacctgaccctgcagcttttcagcttgctgacatcagtgtccaaagtccccatggtggactcgtcccaagctattggtaaggccagcgccacactgcctgtagacctgttggtggctgcattcagctttagagaaacaagctaataccatatgtctatgtctacagtattaaatactggcaatcgagtaacaggaacagcaattttgtgtgtgtgtgtgtgtgtgtgtgtgtgtgtgtgtgtgtgtgtgtgtgtgtgtgtatgcgtgtgtgctctcgcatgtgtattcatatatgtgtgttcatgatttcgggtcaaactgcaaacattgtcaactgagttccttgctcttgtaaatttctttcctaattcccaaatcttgtttttctcttcccttctctgtcctcttgaaaagattgcattggctttttattgttctgaattaagcaaaatcaacacaccagctttttaataccatggcaagtgactaagaatgcatttcactaatt

SEQ ID NO: 30893 - DNA, 1171 bp, Mus musculus
tccagaggcatgttggaagactgaacttccaagtgatcaaccagagtacctagcagaggagatcggcaaacagcaaactgcccaggctgctgcttagctgctcttagtggcttatggtcagatgagagagcaaagggatcgtttgaagacaaaacttactaaaagaaaatggagcggcataggcagaggaggagccaccgggatcgaaagaggaaagactttccagaagaagcccaggccaaggagattaaagctgataaacagagattgcctgtgttgaatgctggcactgagaaggatttctcgagggaatcccaggaaagatctgaaaagctgcctggggactccagtttgcaggcaaagacatccttgagttcagccatggttccggaggctccggatgcagcctttccaagcagcatggctttgcagtgtcacagctgtgcctgggcttgtgaaggcactgagaacaaaagtacagagtcccggctttcaccgcgactgaagaggacacccagtgagtccaggaagaagactgccttccggttggagtatctgtggaacgggtctgagatgatgatgtcgagcccaagaagaagagcgcagacggagaagactgaagtgggggaagcgtccagcaaagccccacaggagagaaggtagctttgagggctggggttgttgttggctccattggcttggctctgcttcccccttgagttcattaacaattagaccatcccttcacctgtccaaccctgtatcttagaagagtgtaacttgtttccataacccagggtcaccgctagaagagattgttgacaactatctcaggtgagccttgtgaacctaggctgggataagttaagactttgggattattcaatgagatttttgtttgtgagaaggatacgagtttaggagccagtaagaactgggagttggatgctgggatttgttccctgaactcgatgcaggcattttttccccctctaaatctgcactaatggcagtaagtctctggtgtctagaaaaggacctttgggaaatgatttattaagatcttagactagagacctaatgacagaatcccagtagtattgctagagggagggagaagagactctggacacagtaatgtaagtcttcccaacaaggtgatgcactgccc

SEQ ID NO: 30894 - DNA, 1131 bp, Mus musculus
actctgtagatcagactggcctcgaactcacagagatccgcctgcttctgcctcccaagtgctgggagcgccaccaccgcccagctttcttcttgtacttcttattttaaacactataacttgggaaaagcactgagtggatgcaattaatcgtactctaacttgtcctatcactctgttttcttatgcataggtataccagattcttctgacaaaaaacgctgtttaccgaatgatcctgaagagccatccttgaccaactcttttgggactgctaccagtaaagaaattagttatattcatgcattgatatctcaggatcttaatgacaaagaagcaatagtcattgaagaaaaaccacagccatatacagcccgagaagctgactttctgttatgcttgccagaaagaacatgtgaaaatgaccaaaaaagtccaaaagtttccaatggaaaagaaaaagtcttagtttcagcatgtcttccttcagcagtgcaactcagcagcattagctttgaatcacaggaaaaccctcttggtgaccacaacggaacaagtactcttaaattaactcccagctcaaagctacctctgtcaaaggcagacatggtttctagagagaaaatgtgtaaaatgccagagaaactgcaatgtgagagttgtaaagttaatattgaactaagtaaaaacatcttggaggtaaatgaaatatgtatcttaagtgaaaattctaaaactcctgggcttctgccacctggtgaaaatataatagaagtggcctcttcaatgaagtcacagttcaatcaaaatgcaaaaatagtcatacagaaggaccaaaaaggctcaccttttatttcagaagtagcagtcaatatgaactctgaagaacttttcccagacagtgggaataattttgcttttcaagtaactaataaatgcaataagcctgatttaggaagttcagtggaactccaggaagaagacctcagccacacacaagggcctagtctcaagaactctcccatggcagtagatgaagatgtagatgatgcgcatgcagcccaagtgttgattacaaaggactcagattcattagctgtggtccatgattatacagagaagagcagaaat

SEQ ID NO: 30895 - DNA, 1470 bp, Mus musculus
ttaacatgtttggaaattatgaaagctgaggaaacatgtatgaaatcttcagataaaaaacaattaccttcagataagatggaacaaaatataaaagagtttaatatatcctttcagactgcaagtgggaaaaataccagagtctccaaagagtcattaaataaaagtgtgaatatttttaatcgggaaacagatgaattgactgtcatttcagattctttgaattctaaaattctccatggcataaataaggacaaaatgcatacttcatgtcacaagaaagcaatcagtattaaaaaggtatttgaagaccatttcccaattgtaactgtcagtcaattaccagctcagcagcatcctgaatatgaaatagaaagtaccaaagaacctactctgttgagttttcatacagctagtgggaaaaaagtcaaaattatgcaggaatctttggacaaagtgaaaaacctttttgatgagacacaatatgttaggaaaactgccagttttagtcaaggatcaaaacccctgaaggacagtaaaaaagaacttacattagcatatgagaaaattgaagtaactgcctcaaaatgtgaagaaatgcagaactttgtctctaaggagactgaaatgctacctcagcaaaattatcatatgtataggcaaactgaaaatctcaaaacatcaaatggtacctcttccaaagtacaagaaaacatagaaaataatgtagaaaagaatcctagaatttgctgtatttgtcagtcctcttacccagtcactgaagattctgctttggcatattatacggaggacagtaggaaaacttgtgtcagagagtcttctctatccaaaggcagaaaatggcttagagaacagggtgataagcttggaacaagaaatactatcaaaattgagtgtgtaaaggaacacacagaagattttgcaggaaatgcctcatatgaacatagtttggtcattatcagaactgaaattgatacaaatcatgtctctgaaaaccaagtgtcaaccctccttagtgaccctaatgtgtgtcatagctatctatcccagtctagtttttgtcattgtgatgacatgcataatgattcaggatatttcttaaaaaataaaattgattctgacgttccgccagacatgaagaatgctgaaggcaataccatttcccccagagtatctgctacaaaagaaagaaatctacacccacaaactataaatgaatattgtgttcagaaactggagactaatacttcaccacatgcaaataaagatgtagccattgacccatctctgctggattcaaggaattgtaaggtaggctcactcgtgtttattacagctcattcacaagaaactgaaagaacaaaagagatagtcacagataactgttataaaatagttgagcaaaacagacagagtaaaccagacacttgccagacaagctgtcataaa

SEQ ID NO: 30896 - DNA, 1386 bp, Mus musculus
acctgtcgaaaaagaagagccttggatttcctaagtcggctgcccttaccgtccccggtcagtcccatctgtacctttgtctctccagctgcacagaaggcttttcagccgccacggagctgtggcacgaaatacgcaacacctattaaaaaagaacccagttccccgcggaggagaacgccatttcagaagaccagtggcgtttctctgccggactgtgattcagtagctgatgaagaacttgccttgctcagcacccaggcccttacgcctgactccgtgggaggaaatgaacaagcgtttcccggtgattccacaaggaacccccagccagcacagaggccagaccagcaagtagggcccaggtccaggaaggagtctctcagggactgtagaggcgacagcagtgagaaattagctgttgagtcttagcctcccggtttgtaagatgtgtacagttccaggctactcataggtgttcgtgtgagaaggcgggagtagctgcactctactgaagcgtgtgtttactgctcagatgctctacctggtctgtgttggtgtaactaaagctggttgtcatcgactgatttaaaaagctttaggagtagactggatcactacaactatcattttatatacaaaataaacatagctttgcttttagtttagattactggctaagtatggttactttatatagtctggttcctgtttttgaagttttttctttttttacctaggaagtcctatgaaatagtgttctttcctgcatgattggttctgctagagctccatcctgtcagggtaaacagacacaaccgtgatgtttacctctgtgtagccttgtcactcctttccactgtcccagtgtaatctctcaagttattctagctagaaatccagtcaggcataatgacacacacctgtcatcccagcatgtaggagatagagaggggagtttgggccacccttcattacacagaaggttctaggcggtgggttacaaagtccttccctgaccacagccccatcggcaggtggatgctctcactgaacttcagctgtaaagtgctctgctctgctcttagtgatttaaactttgttcactaagtaatttggttttcatgtcctaatcattgtactagagacccaacctagagcagagtaaataaatcttacataacaggaattatgctatttacaaaatttaactttttttgttttttgagacagggtttctttgtgtagccctggctgtgctggaacttgttggagaccaggctggcctcgaactcagagatccacctgcctctgcctcccaagtgctgggatcaaaggcatgagccacttccacccagctgatatttaaccttttttcttgtgaat

SEQ ID NO: 30897 - DNA, 1236 bp, Mus musculus
gggggcaagacttgatcttgtgagacattaaggttgctttctaaaataatgcttacctgtctttattctaagttactctgaagccagaagcttcaggcctctgaatgaattaacacctgttgattaacagtgacggtgggttgttaagtaaaggattaattgctagggcatttttctctctgcccagaaaccttgcctcttgcttgccaggcaggagagaggtttagagaaataaacttgtcttgaaccagaagacagggtacagaaggaaaattttttacacaagcaaatgtgcataaacacatatacattcatatacacattcatgcatacacactcatatataccttcctacactcttgtggggcacagctacttatctcatatttacatacacacacacacacacacacacacacacacgcatgcatgcatgcaaatggagcaaaagcacagtgcacaaagaactcagtcatctggatgaaaaacactctttcaacctttattgcatagagaaaaaaaaagcttctacccttttattgctaagtgaattaaacccaaatctgtaagaaaaaaaagctttttcctctttatttagtaagaataagcttaccttgctgttaagagaactgttccatcctgtgctctctctgcattcttcttttgtctgactctgcattctgtgtactcctctcctactcctagttctgctctcctgcttcctaatgccattctttctagggttttgttgtacctattttaggagaatagatcacattgtatcttatctcaaagctcaccacaaatttaaacataaattcaaatcataaattgaatcagagtttacaacagagatgtttacaagtgttttcattaagtctagttatttatatatttattttctgtcactagctccataaattcattgaaagttaaaaactacaattctcatatttaagttaacaatgaggttttgtatgataaacccaatcaatattttatcttctgtccttgaacctacaatacaacattcctttcatgacctttggttaattcttttcacagctctaaagaatgtattcaaagttataagtgcctgctttctgtctcagaagcaattaactcatggtaccagaagacgagcagagatttttggttttggtttttctaccaaagagctctagttgcagccctaattataaagtgcttaatagttactagtataattttaagaat

SEQ ID NO: 30898 - DNA, 1728 bp, Mus musculus
taaactactttatttttcaatacagttgaactgcttttttaatagatcatactttaaatttttataaaaccgagcatttttgattcattaccctaaatatacagaaataccagctttttgtagcatactttatagttgattcctttaatttggcatatcaggaaattatgtttcagctaattcataatgtgacaaaattagctctaagccataattagcattttaacttagttcacacagaatttcccagcaagtgttagacagtaggtatacaactcacctcatggatcatttatttacatatgatgtccatcaccgttgtgatgaatttattgggaccaacacagaaaagcatatgaagactctttccttttcagggggagcacatgaggggaggctctctattctctaggttcctgtaatccactgacaacatatatcatttttagaccatcccctactcctttctgattggatttgtagaagggcaacagagacaaggcaagtctgtatttttaaaaacctggtaggcagttctgataatggttcagttttttgttgttaaatttgatgtaatataattctgatacaaaagtattttggacagttacttagtgctggcaaagaacatctgtcctgtgaaatgttgtctcctggctctggtttttactgtgaagccagctctgtctttactgagtagcttccttccttagattctattctttcacttagaatttaaaaattagctctactttttcattttagagccttgtaattcatgtccatcttcaaacagagcttgcctcatctgatcctaaagagtagtactggaaagaaactctaccacctcttactagaatacctttgttacactgtggtatagaaaacctttaatctctggtttattttcttaagaaaaagtctagttaattgcaatgtaattccaacagttaatttatcatgatcctgtgtatgctttgcatattaatattttatgactttgaaactttttcctaaatagcctatcttaagtcatgtaatctctgtgtgttattttgctgagtttcttttcaagtcatgaggctgaaaagtagatacagtattgcaggctaggtctcttccttactctcctgttagtgagactctgactgctatttacctaaatgctttgtgctgttcctctgtgagtagatcccaactcgtgtcatcttatcttgtttagcacatgtgtgtttgtacgtattttatcatcttagctaaacacatagtaaaaatatgctaacatatctgtgtgtcgttgtaggtatgtatgtgtattacattatacatatctctttaacataagattgcttttaatttagatttgtgttttccagtatattatttagatttgcacagtttgaaaatcatgctaaaaatttaagcttgactgttaagatatgctgtgtctttaagaaactttattcagaattgagacatggctcggtggttaagagtaagtgctcttccagagtttgattcccagcacccatatgaggtggcacatgaccccttgtaactccaggtattgtggaatccaatatctctagccttttatgcacctgtacacatagacttgtacttgcacacatgttagaagcttcatttcagagtcatagtgctattaatctagtgtttttggggtttttttgtttgtttgtttttgttttggtatggtctgttttctct

SEQ ID NO: 30899 - DNA, 1133 bp, Mus musculus
ccgaagaaccaattatttcttatgactgggcctgtaatactctaaagtctgaggaggaaaacaaagatctcagtgatgttcttcagtcacattgtggttatcaagagtacttggaggatgaaccagactatccctgtgatgagcagttgatgcctgcattttgtgaaacttcatttccttccttcaggcctgaatggcagtccatgcatccttttgtcataccccatgatcctctttccagttttaattattttaattttcaaagatttggtaccccactacatccatcaccagatgttttccatggtcgagatgactctcagatgcagaatgggtgttacgtagacagttatcaggatggctggagctgcttgacgtttgatcagaacgatgaatatgctaactatgatgtgactagcaataatgttcatccctttagaaatggctgcagtgtacaagatgaaagtgtgaataatggtttctgtgaaatccgagagtgctggcaagatccttccatggacaagcataatgaaacagacaggtttgtgaaccagtggtttcaagaggagaaattaaataaattgcagaaattgcttattcttttgcgaggcctccccggttctggaaaaacaacattgtctcggtaagtaaaagacctgagtgaatacttgattatgaattcattgcttaaaaatacatgagttatcagtcataaatgcttttgtatttctagtaaatcctttatatgctatatttgagagtgacatctgactggaaatactaagatgtacaagaatgggaaagggagaatttgtgtatatttagtttctcttaagggctttacaactaagctacagttaaagcagcaacagaagcaatgctgcttagcctttataacttcaaagaaggtgggctctgcactagaaaatctgggctctggtactttttcactgtatgctgttgagcgtgttttgctgtctttaataggggaataagagatagctattttcttagaatttgaaaaagaaatagataatcaaaggaaagaaatattgagtgtattaagcattatgccatgttcatacctgattgggagaatctatatatgtgtgtgcgtgtgtgtgtgtgtgtgt

SEQ ID NO: 30900 - DNA, 1181 bp, Mus musculus
tcgatgaaacattgtgaattattatgaagaatcatgagaatgtcaagatttatttctaactagatcatctgaaaaaaaaatgttctatatagtcttgctcttgatttctctcagtgctgtttttctgtttcatacaatgaaaaggtcctacatatattttgactcaagtattaatggttaaattgatttttttttccccctcttcttcttaggactgttagtatgcatgcttcatttagatagtagagtgttcagccctaaatggaatgtacctatcatacttctacccataaggcttagggatctttgaggaagggggggggcagaaagatttcaagagtatagtggctattcctggttgtcaacttgactatatctggaatgaactacagtccagaattggaaagctctcacctgtgagctctcacctggaggctgggagatacaagtttctgacttggttgttggcatggagtccttgaggcatagtggctatgaatcccagatgattaagacagggagatctctgagttcaaggtcatttgagacaaaggaagctggagacctacacaaggacattggaagaaggaagattcagtctctcttcttagccggcttgccttgtgggactgagcaactgctagatccttggacttccattcatagctgctgctgaccatttttggggacttggattgcagactgtaaatgatcaacacattccctttctatatagagactgcccataagttctgtgactctaaagaaccctaatacagaagttggtactgggagtgagtggttctagaggagcagaagatgaattttttaagaatctggagttagttaataattcaccagcaccttcaactactgaaacctctttagatactctttctcctgggagtttggagaatattgaatgaagacacgtggttgaaactatatttcaagcttaaagaagctaatgcctttgattatcttgatgaattaggtgtacaaaactttctacaagatggggaaaaaaatcagaaaatgattttgctgacttgtcactcttagtatgaaggatgaaggaaaagaaggggctgtatgataagatcgaatggctccagatgcaagcaaacagtctagaagttgctaagtgtgtccttgaagagagtcttctcttcagcagccat

SEQ ID NO: 30901 - DNA, 1138 bp, Mus musculus
gtcactccaagatgcagtcagccctcttttgatgctttggtttttctggacttaccatgtaacagactatatttctattcatctgtatcatttgaattggggaggatatttaggatgactaaatactacttcttttatctaataaacattgtttgaccatttctatatggtcaatctactatgaaggagatccgaaaggaatgtagttatttttgctgggaagagatcttatgatctaataggcctgatttttctacgaaaagtcactttaccttctttcttttatggatatgtctttcattccatttactcaagagtagcttttaaaatgcaaataatattttgcttttcctaagttgaagtacagggctagggatatgttctgtggtagagccgaggaagctcacagtagtaaactggatatgatccccacctctgcagactaacggacatggctagttatgtaaacatacataatacaaacgccatatttgtgttttccagaacttaaacaagcaagcatatgatttggcaaaggctttgctgaagaggactgctcaagctattgaaccatatattaccaatgtaagtgtcacagttgattttagaaggattaaattgagaatttaaagactgttggaagcaaatcttagcaagtggctcacactgcttaagtttctgttgctgtttatccagtgagagttggatttccattctcctctcctaaagtttcttttgtttaatatttttgagaaggctaactcttgtctgtgcctttatttatttgtttcaggttcctagagacaacagccccctccccccttgactagtaagatagacagtttctaatgttagcaattgagttaaaaggtaattagataaaacgtatggtactttgtaatattcagagacatcgcttacatcttttggagatgaaattgatttgtgcagtaggatggtatgaaccaatattaggacctagaaattaaaggcaggcataaccacagtagcagttttgtggaagtccttatgtattgctatccccaagagagatttctataaataggccttttctgaggaagagggagattggcagtgacatgaacccttttaaatatcaccctacttatgagtgact

SEQ ID NO: 30902 - DNA, 1108 bp, Mus musculus
ttttgtgatagcgaccctccagcccccacctccagttgaagaccatgctgcacatatgctacatataagcagggaggcctaggtccagctcattatgttctattacgatacctctgcttctgctagttgggccacatgaaagcagggtctcctcagccagtgtcttagctttacttcttcagcaaccatattcggggcttctataattatatgatagaaatggtaataatccattatttcccaggaacatcagatgagttgtttattttattcttttataaaaaaaatgatactgactgtactttagctgattgagttagaaacagcttcccttcctgggagtgcaggcttcacttttcagttgcagaggacatttagattgtgagggaaggggtagccccactcctagcctcttcccttcccttgctcttaatttttttgaactattaagcattctatttagtatttgcttttgctctgttgatttgcaaagatctttccaatcttttatttatttatttttgtttttttcgagacaggatttctctgtgtagtcctgactgtcctggaactcactctgtagtcctggctggcctcgaactcagaaattctcctgcctctgcctcccaagtgctgggattaaaggtgtgcaccaccaacgaccagcttttccaatcttttaaagcagtatgttaattattaaagtttccattttaatcagaagattttacctttcagagtatcttaaagtgaggtcacatgatcctgaggaagctattagacatgatgttattgtgtctatagtaacagctgctaaaaaggatattcttcttgtcaatgatcacttactcaattttgtgagagagcgaacattggacaaacgggtgagtagtagttgataattcccagagggttttgtctttgtgtgttttattttatttttgagacagagtctctctgtatagctatgccctggatactttggaattctctctgtattctaggctagccctgaactcaaagagataagcctgtctctgcctcatgtgtgctaagattgaagatgtgaactaccatacccagcagaggtttttctcgagacaggaat

SEQ ID NO: 30903 - DNA, 1178 bp, Mus musculus
gttggaagatgatgagaaaatacggaaacagctggaagcccttgttagtcccacatgttcctgcaagcaggctgaaggctgtgtggtaagggaacagcagggagagaccgtgtgtggacacccatgtgtggacatgcatagaactctttcagcacatctacctcattgttatgttatttcaatttacaaaatgttaaataaataacaattcagataaattataatttgtctgcaaaaagagttgccaagaatagtgtatttcctttcaaaatgaaattatcctatgtgaagaattttacacattccatttccattcattttttatagtgttctatttcatagcatgccattcatctgtgctttgtagcgtggtgagtactaactttcccaggtcactttcacactcccccctctcgtctttctttggagtggggtctgtctgcccactctgggcttgagcaaactcctggtggagcctcctctgggactgacgtgatagttccatagccatgcttctgactctgcttctgactctgcttctgactctgcttctgactctgcttctgactctgcttctgactctgcttctgactctgctcctgactctgcttctgactctgcttctgactctgctcctgactctgctcctgactctgcttctgactctgcttctgactctgcttctgactctgctcctgactctgctcctgactctgcttctgactctgctcctgactctgcttctgactctgctcctgactgcttctgactctgctctgcagcactttcataactgagtcttttcacaggctcttgatttctgcagattattatattaattacttgggggtaatggtgcatttttactgcctttaacatgtgtttctcaatcataatcctgtccactgattgttaaaaacaaaacccaagtgaaaacaaacaaaacatagttcgatgtggattatgttattagttacttacttacttcctgaccactttttgccgtaagtttttttttaatcatttatatgtctcttgtgagttgaatgtttaaaatctttgcctatttttatagaataattgttttcatttgcagctagttggtttgtaacatgccatgttaagtggcaattaattttttgtcagctttcatttgtatgtgatgtcctttttttata

SEQ ID NO: 30904 - DNA, 1182 bp, Mus musculus
gaagggacttgagacctctaagactgcaacatccatgggatggggaacagatgcatatctgcttcactcacgcaaaccctattcattccctcccttctgctgatttacacagaatcagagatttaagcttcatgtaggccttgctcataaatggtttatgtttgaacgcagggtctcactgacttctgtcctaaaatgacccagtcctagagtcaagtgttttctctaccacagaaaggaagtagaaagacgatggcactgagagtagtcgttactcacctgtgcacactgcattatatctgtgagtgactctaaacatgaatacagaagggaaataatctgtggcctggaaaaggctgcttatgggcttgtccagatgtagataccatagaggccttaatatctgaagataggaagaagaggaggacagttttaggaaaagaaatacaaagaaattcagaaatgtgtgagaataaagattgttttaaaaatgatggctggtacttaggctaaattcggatgtgttcacattggtcatctgttgacttttctcttcaggtacgacggcgaagctccaaacgagagagacgatgaacacgtcattaacttctattgtgaaagctttggggggaaaaaacattttttgtctaaatatgaggctaaataaagccttggatgcacaaaccagaactgccaaagcgtggacagttggacttcggatgaccatgggtttgtggtcacacgtatcagccatccacacagtgataacactgactccagagtcttgtgaaagtgtcctgtgtgatggctgtgtagacacaaactaaagaagacacatgtaaataatcccactcccccatttctgacttctaaagtgcttgtatagcttttatctgcggctttaaactgacaggacccagctgcttaccggatctgttcatttgaaaagcatttgctagggtggatcttaagcagtacgtagtctgtcagtgtttgtatttgaattctctgcaattttactgtgaaaatttgttttcaacaattggtgtcattttctcaatgtcactgtttgttggagttaaatggtttcttcctgcccctctttgtagctcatctatgtttactccagggcactgttgtcttctgaggtgctaaagcatctgccagcacactagaacatgc

SEQ ID NO: 30905 - DNA, 1277 bp, Mus musculus
gacagctaaggctgggttatgatactttgtattttaaatgtttcattaactcagctctccagacaatgatgtttcgatttcaacagtacagaagcatgtttttaaacttacagcataagtaataaaggatagcattgtatttttgtcatcaactaaacttcattggaaatatttatggaaatatatgtttaaaaccattttataaaacaaaaaaaatattatggaggatttttatttgcatgatcatagttcaccagatttcattgcacattaatgctgtgcatcagttcattacagacatggtcactgtagattttgtttgtgtccaatgccaatgagcctgtaattttacaacccgcctgttcacttttgggaggattataatgtaaaatttccatttttgtgtagagaaataggtgcaataatgatcaaagtttttatgtcctgagtctccatcttgggggcttattattatgtttaaacttaacacttcctgtactaacacttggagagccacatactttaaaataaagctaagtatgtatacgacattaattgctacagttgttagcatactgcagtggtcgtactcattttgagaacgtgtactgtctgacattaaggacctgtaacaagctcattgtaacaagccgactgtggaaggaatctggtgactcccaggtgagccttgcttgctgcagtaccccactaagctctttcagtgatctccattctatgtgtaaattagaaatgtgctgtaaaacttgttctagacattaaagtttaaatgactttctacatcttcttacagcttgcaagtttgacttttaaaggttccttttgcctactgaaagaatattggggatttaatgatttgtttaacttaggcataaccttctaccacatagtattatgttatcaatgaacagttggttctagatgtccagttttcagacacagttttggattttctgtgaacttaaataaatatagatgctcatgtaattatatttttatgtgactcaatatatatttgctagagaaagtcatgttttgtgatttttaattttagagtcattgtttcccagtgacatttttctaaacttcatgtttaaacttttcatgcaaaatcttgccttgagaaaatttactaacaactactcaagttaaagaattacataactgaaaaaaaaaactgaatgtaagatttgaaactccggactagcagatatgttgctaaggaagttgtatttgctcagtaaacactatgaacccac

SEQ ID NO: 30906 - DNA, 1179 bp, Mus musculus
aggatatattaaccctcctgccctgtgtcataatttagttagaagggatcttgatcatttggatcttccacaaaatatcacattggtgcactatattgatgacattatgctgattggaccaagtgagcaggaagtagcaaccactttggactcattggtaacacatatgcgtatcagaggatgggaaataaatccaaccaaaattcaaggaccatctacctcagtgaaattcttaggagtccagtggtgtggggcatgcagagatattccttctaaggtgaaagataagttattgcacctggcccctcctacaaccaagaaagaagcacaacgtttagtgggtctatttggattctggagacaacacatccctcacttgggtgtgttacttaggcctatttaccaagtgactcggaaagctgctagctttgtgtgaggcctggaacaggagaaggcccttcaacaggtccaggctgctgtgcaggctgctctaccacttggaccatatgacccagcagacccaatggtacttgaggtgtctggctgatagagatgctgtttggagcctctggcaggcccctataggtgaatcacagaaaagacctttgggattttggagcaaagctctaccatcatctgcagacaactattctccctttgaaaaacagctcttggcctgctattgggccttagtggaaactgaacgtttgacaataggacaccaagttactatgcgacctgaactacccatcatgagctgggtactatcagaccctgcaattcataaagtgggacgcgcacagcagcagtctattatcaaatggaagtggtatatacgtgatcgggccagagcaggtcctgaaggcacaagcaagttacatgaagaagttgctcaaatgcctatggtttctactcctgttacaatgccatctgctgccaagcatgcgcctatagcctcatggggtgttccctatgatcgactgacggaagaggagaagactagagcctggtttactgatggctctgcacgttatgcaggcaccacccagaagtggacagctgcagcattacaacccctttctgggacaaccctgaaagacacaggtgaagggaaatcttcacagtgggcagaacttcgggcagtacacatggtattacagtttgtttgcaagaagaaat

SEQ ID NO: 30907 - DNA, 1195 bp, Mus musculus
cctatcagtcattgaagggcagctgcagagagagccaaaggccagcctttaataggtgccaagtgatagtgatgtgtttagtggtgaatacaaatatagaccgtgttctctttgtcttctactcttaacagatgagcattaggaattcaagcttcgtgaagtcttctgaagtatttagtatcttctacctcaagctgatttacttagttgtagggggaatgggaacgtagaggaagtagataatgtgacagtccctggtcccttttcatcttaatagctgtcaataaaatgtactggtttcacacaatagacagctttccaactcacagtagatagtggaaggttgtatgcagcaaaaccttgtggttttacttcctgctcctagttgatgcagacagattgcacactgcagcaccttacgtgtcctgtaggaggcagcacagagcaggactgtgaaaggcttccacgttgatgcaaacagtagtgagaaattgcctcacggtgcttctctgttaatttttcttacagatttgcagtgtactatccactgtctgcaggaaggaaggtctggctctcccttcgacattggcccgtaggctggccgagaagtcatgccgaaacctcaggaaagccttacttatgtgtgaggcctgcagagtgcagcagtgagtggggctatggcagcaggtagcactctgggacatgagactttgttgttcacttattttctttgtgtttcatagatacccttttacggaagaccaagaaatcccagagacagactgggaggtgtatctgagggagaccgcaaatgctattgtcagtcagcagacgccacagaggtaacagtgtgcagggggcagagataccatgacatttacaagtacaagtcagtcttgagcctcatttgaaaggaaaaaaaaaatcatttaatgtctgaaatatagcgggctaagttgttactttatagtttatgcttttccttagtctgttaacgtgtataattgaacttttatttataaaataaattttgaactctttctgttttttttttttccccagaatgttagatagcttagttttagtgcatagcatgaactgcctagtgtgctcaggctgagagaataattgtaattgttataattgccttgaaattgatgcagaacgtacttagaaagatgctgaccttcagctg

SEQ ID NO: 30908 - DNA, 1178 bp, Mus musculus
gagggctttgttgaaaattcaatatttattcattcttaatacaaacaaaaatattattctgtgcatgtagaaaatcattatttaaagatgaaatcgttgaaatagaaacccaataaggagtgcatttaagatggaaaagcttaattggggtatgtattttcaaagtcagtttttggttaagaattactttgtcttggttgcaaaaggattgttatattatttttttaaataattgtatatattcagcttatataactttgtaatctagcagatattttaggaaatagttaagaaatattataaaataaggcctcttgaaatttatgcttattttgtttcttctgaaatactagatatgggtttcaaggtaaatacattgctcataatgctaattttttatacaaaacttaattataatggctaattgtaattatacttggtttctactagtccagtaaaatggtaaatagttattagttataaatggagggaaggtagttaatattttttttatatttctttgaaaaaaagtttcctcatcagctcttctgttgattgtataggaacagttggatgtagctctttccaaaatctgcaagaattttgacattaaccattataccaaggttcagcaagcttaccggcttcttggaaaaacacaggttagttctaagcagatgtcgctcataaacctttatggttgggtctcattattaccaatatatccttacaaaatttcactaacaaaagtgcattgtaatgctgaatgaataatgctaacatcttaacggtctcagagtgttaaataatgtaacagaaacatcctaaaactttgttttaaaatatgtttgccagttctggtattttcactactttatgtagaattaagaaaagtatattttacttaagaggctgaggcaggaagattgcaaggccaagaccatagcaaaaacctgatttcaaacaaataatcaaacaagtatgcgagcaagacaaccacaaaggaaggaatgaaaagtacaagctaattaaaattcaatgggagattgcatatagtattttgtaccttaagttttggtcctgtgaggtggatcttaataaggggttttgtttgtttctagataggctagcctgacttcctcaaataatatataaactatttcttttttttttctttt

SEQ ID NO: 30909 - DNA, 1206 bp, Mus musculus
tgcattgtactgttgagactactaaagtgtgtctgccctccctggtacccaactgaaaggacttttgctttacactctggtcgtggtgtaaaatcgccaccaaagtttatcttgcagaaatcagagaatctagaaacaattaccatttcctaaatactcagcaagtttcagggctgctgctcctgctctcctgctctcatgcgctgctcctcctcctcctcctcctcctcctcctcctcctcctcctcctcctcctctttctctgctgtgcacactccagtgcacactccagtgaagtttgcttgtcaggccgaaaggcctggaagcactcacgaggcaaagagtttcactgaaactcacctcctggaactttggcattctcataatccgtatattcattccctaaccccacgttagtctggtgtatggatccacgtgctctcttttagtattatcttattataagtgccttttaagactgaattctgacatagctaagcctttgtcagtgttccaatgtcccagaaaattcttgaagccgacaaactggaattcagtaggaattcagtaagaaagttgcctattcatcattacaaaggacggagccggagtagctctgggctggtctgcagagtctttactggagacagcagccagcctcaccaaaacaaaggaatacacaattggcctagctaataggtgggcttaccttgaaagagctagggaatcccactgagacagaaatcttcagtacaggttacattgcatattagaagtaagttggtgaattcttctgacaaatggagattctccacagatacgtaagttacactcatacaagaaattatcagggcccaggaaatagggggttgtggtattgcagtattcatgagaatatctgctagagcagaacccctggtggtgggcttaacaatagactagctttacacctggctcccttcttagtggcagcagcctggtccctgccttcttttgatgtttacattccttttgaaatgtgtcactgtaacttggatgtatctcgcctggtttcttgttattcttctgtttaaaaagtttggtgcttgacttgacaaattacattcagattctacaaaatctcctgtgtgcatctgtctgtcatttccgctgactccttgcccaactgcaactagagacctgttccacgcagacaaagggacccag

SEQ ID NO: 30910 - DNA, 1448 bp, Mus musculus
agtggacaaaaccttgtttgatagcacacaaattattcaactttattgttaatggcttttcattcatatgactggaataagaaaaaactaaatcatttgtgctttccaattatgctaaagaatggaaagaaatggttattggataatgaaagggccacgagagaactgctttattttgcatggagcaatcaggctaatttccaagctaatagatacttgaattgattaaatgtacagattatctttacaaatacatactaataacaatatgtaaattatttgagtgtgcatgtttagaatgttagaatttatttcattttccttattttctcataggattcacaatttgattctacaactggatttctaggtaaaaccatgggaagactgaagattttgtccagagggagccaaacaaaattgctatgctatatgatgctgttttcattgtttgtcttttttgtcatttattggattattaaactgaggtgatggaagttagtgtgggctttgaatttgttgcatttaatgtcttggggttcctctttgatagtcagcattgcaacattcctaatggtcttctccattgaagttagtggagttttcctctttcagaaatcatactatagcatataatgctttgaatactgttctttagtgactcattgtaactcccagtctcagggatattgagttagcctgaagtcagcgtggctgtacctatctatgtttttccagggtttcccagacagagtaaatatgactaccataccttgctgttccataagtgtaactttctaaagcaagtgggagagcagacgaataccagagaagctgggtcagcctttgggggaggttgcatgatgggagagagctcgctttcctttgtttgatgtcatccttgtgatggcatgctcctttgctgggtaccatgtagggccatttttttccccctgcagttttcttaatacatttgtcacatgaattctttgtacaaggacttccttcagtaaaactattgacatatttctactggtgcctaatccacatctgtatcaacatagctattgtttatattaatgataaattctgctgacttattttataatagtttctaatttctagctgtttaggtgggccatttgatcattatttgtgtcagaataatgtgaagtgaagtgattgctaagctctgaccagaaaaaagtgtccaagaaaattaatttcctttgttttactatatgctcaaaataagtactgaaaatatttaggctctgaacccagaggtcagaggattgttatttaactccattttatttgcttaaagaaatcaaaacacaaggtagatttaagtaataaagataaaagtactaaaatattgtaaaacattctgtattgctcttactttagaaatttgcctatttccaggcttaaaaaatacactttta

SEQ ID NO: 30911 - DNA, 1175 bp, Mus musculus
cgacactcaacatcatcgtcagcacgttcatcttcgtttgtgtggcacatgagatttctcagatcaccactgacctcgcgcaggtcgttattcctaaagataacccgtctctcttccgaaggctggcatgtacgattgcattctttggtggagtcctcatcttatcctccattcaagataaatcaagactgtaggctcctacaatcctaacaacaaactcttcgggcttactttgcatctgcctagacgagaaaatcatctgtttgaagatattaatgactgtgtaaatataaacatttggcaacaggacagttttgtgacgtctgttgaacttgcgcgattgtatatatcagccctgtgtatatccaatgtgaaatgcacacagtgaaccaggatgcatcgtataagagtgcatgtggaaaacccttttctaccagatctgtgtctctatttataggtgattatagttagcatatgaaggcagggaatggtggactttccagtaaacctatgtaagtacgttaattaggttagtgacaccactgtgtgtcttgatatcctctgactgtgtggtaatcattgcgtcggcatctgtgcgcccagaccctcctacttcacagacaacttagtaccgaagtgacttgcggtgttcttccctgtcacgtgtgccgtgctgtggaatgagagactgttatgtctttaacccgtgcacattcacgtccactgtgtttcctgatgtgattttttccctagctgtagtttgcgggtatgtaagcctaaatctttggacactttgcccttcacagagttgttctaaagctcggtgacaaggttttgttattgtgtatgttgttgttgcttatttttaaaaaggccaaattttccttccaatccaaacagtctatttctttttcctaaactataccagaatttaaaaagaaaagaaaacaaaacaaaacaacaacaaaaccaaaaaccctaccccatggatccattagtgtttgctggtcgctaattaagtagagtgtattatttccaatgtttggaaggttctttataaacacttggtattgcttattatgccctcattttttaaaaaaaaaatatttatcgatctgaacctgtgcagcataatgaagttccaaatctttgattgaaatgtgtgaccgtagtag

SEQ ID NO: 30912 - DNA, 3520 bp, Mus musculus
ctgcgtagaacctgtcatgtcctttgtagtctctgccctcaacttgatcctgtgcagcttctcaatctatgactgtgtggtactggaccttcagaggcgcacagagctcaagtcagttttcgtcttgactgccactttataagttgacaggcctgggttttacttgttaaaacctctcaccatctcaatcacaggctgccaagtgtctttacaaagaagctgatacaaacacaggccatgctgatttcttacagagggagagaagaggaagagaagaagaaagaggaggaagaggacatgacttgcccatatgctgggcaccttataaaggaagccagacttttcggtgcagtatggaaaggcttccgtgattctcttgctgcaccccacgaaacttcaccaccttcaaactccattttcacggttccgttaattttcaaggagcagcaactcgactggttctctgctacatgaaacacctcagcttgaaaaggaagtgctctctcagactgacttgtgagtgtgccttcacattctggtgcaaatcatgtgtacccaagaactctgacatagcatcttaccatcatcatgccaggaattggtttccttaaagtgtgacacttggcaaccagaagcgtctggtggcttcaggtgtgttagggttttgtagaaagttgtaaccacctctcagtcatgcaagagggtacatcaaaaagacttctaaatttggtacccagactttgacaagagcctgtgagttagttcattgtaaccaacttgtcaggaacttcagcaagaattttcatgaatgttgttaattggctggagaaataccagcaaagttttgcaatcatccacccatttgtctgccattgtgcatctggacatccatcaaccgcccactcagtggcatctaccatgaagatgtttagagacgggaaatgattttgcacccagatccacactcctctcatgtcagatatttggaattagagcaccgggaatcgtcttgaagatatgaacttctaagaatggagtctcttgctactaccttgaaacatttgtttatcctctctttctgtttgattctactactaccattaaccctgctgcaggatttgtcaccattctgcctgactgctgagactccattttgctgctatgcaaggagatgaaagaggcaggcctaaaggagcagtaggacataacatggtttttatttctatctgtcatgatcttaatggtgaagtttcctttttcgtcagcatttatctctttgttatcctgacatgttttaattagtttagtgggttttttttttctattggtggtggtgttcttttgttgttgttttttgtggtcgtcattttgattttggatcacttcgtgttttacagtaattacttttaaatggtgcatttgcttctgattttttttttttatgaagcatcacatcagtttacctcatatctcaattccatccttcatgcattttttttttaactcatttgatcttcaagctgcagagggcctagcaatgggtcatcacctgcagccctggcatgtacacacggacatttgccaccactgaaagcaaacagttggagaagttggccacctgagtcaaggaggtggtgctggtgtgagttcacagctcacaggggacggtgaacgttgacattgactttggcagtgtgtactatgctctactcctatatatactctatagatgttaggcattaaggataagtgatcttaaatttactgaaattttgttaagttgattagatttacattaattgtttatattgtgttttttcttttattttagcacttccaacaaaaatgcctttattcatttattaggaagaaattggagtggcgaacacaaactagcaaaattaattaattggctgtgggcccaaatttgaattccttattaattcaaagtgaaggaagtgtgagagtttctattgctggtcatgaagttcaccacgaagagtcagtttagtttgtaccgagaggcatttagctgagagtgatttgagttgggcatctctatgatgcagtccagacttgtgtttaagtttacaggtacctcttggactcctgaattgatctcgatgtcacacatcatcgacatcccgcatcccacacagttccaagattggcgacagagagcatcctgttggagagacctgaccagtcacgaaggaccgcctgcagactcttctgcaggaccatgctacatattcagctggagagggaacacgcatctgatgggaatggattgtttttgcttgtttcagaattttgctgttgagatgttgttaaactttgcattgtttttcttttttctttttttttccctatagtcaattaagaataaggggtagataatcataagtattttgggctgggagggattgttaagtaatcttaggtgggtgggtaatttaggaaattaagttaggataagataggataagataagataagctaggataagttagataaattaggataagttagataagttaggataaattccataagataggataagttccataagataggataagttagttcacataggataagcataggataagttagatcacataggataagttagatcacataggataagttagatcaaatacctcaacaagtggacgagtgtacttattggtcccttacccctaccaactttacctttaaggccgagctcagagggaactacagggaaatcagtgttaggagtgaattggacatggatgacattctagtgaaggttaggacgattagagtaatctaatacaggctctgggaattaactcaagggattttaggaatgccagatgacagtcatcatttgataaaactgttgctggaataaagtttagaatgttgaatggtaaatgttaatggaaattgtacgaaaatgaataaaagctctttccatacccctccccctccctaccccactctttctttcctccccccctccataacctaccccttctcccaaacacacccctccatttcctaactcaccacgtctccccttccactccctaacccaccccttcttccctccctccctccagaacccgcccccatcttccccctccctaacacaccccttcttcctttccccctccaaccccacccttcaaactatattactgtattctctttattatatttctttgtattaataaaactgtattgatgttacaataaaaattcaataaataaagacttagtggttaaggcaaattgtgtcctgatcatttcagcgcccgctggcatcaagaatggagggaggagaggtgggatgggtgtggagtgacaaggggtgggagctaggaagataaggggttggcgaggggctaaatggaaaagaagatggtggggaagggtgggtatgggaacacgtttggcctgggggtggtgtataaacaacacatcagtcacacagtacatcatcaatgataatacccaggatacccca

SEQ ID NO: 30913 - DNA, 1160 bp, Mus musculus
ttagtcctgagaggatctgaaactgaggctgcctcagaaagctgtaaaggtatctagaacctgcaggaaggtgccacaactttgttaacttaaatgtgtgaatatatttgtattcttacaatgaaaatttaattaaagactgtaattgaagtcaggcagtgggtgtaggaacagcagagattagagggcagcccgggctagggaggcactgtctcaagaaaaccaaacaaatcaaaccgaaccaaagcactttcctccaaaggctccattgagctttcttttgttttcagcactcagagaggagcttcactttgggttctgtctttgccttcactcccttctatcgatcttggaagtgtttggtttcactctagagcttttgggtaattttgtaaacattagttgttgggcgcctcattctgcagtcaaacttttgctgagtatgagtgtgtttatctaggaaataatcacatattctctcaagtcttctctctgcctacagttttcccctcctccttcctttcttgagacgtatctcaagtatccaaggttggccttgaactctcttgagcctcctgcttgcacttcctgaactgggatcacaggcacgtacctctgtgcccagattttcttggttatctgcaagcagttagtaagaagctatgtgagaaaaacaggccaagatctggacatccttccttccttccttcctccctccctccctccctccctccctccctccctccctccctcccttccttccttcctttcttgtttgcttctgtgtgcgtgagtgtgtatgtttctataaattacattatctggaggatacctgacagttgtttttaagatgaaatatgaaatggctttgcttatttatgcaaatttgtttataagcaaattttctccaggcagaactaggttttaatagcaccctgtggggttctgtatatgtgcttttgaatatatagtaaatttataggggtttgcatacactttgggaggtttatcttttgagattggtatgttggtgggtgctttcgatcctgatgcttgagtgatggaatctggcagattaagagtttgaggtcatacacgctatgtggcctgggttacttgaatatatgataataaaaatttaaaaactatttttctatgtt

SEQ ID NO: 30914 - DNA, 1150 bp, Mus musculus
ccttgtgcatccctctacaatggatggatccaatatggagggacgcagccactgttgctgtatcccagaactaagtacgtgataggcaaaaaaatataagttgtctcagcttgcaactgaacatcaatatcccatcctcctttcagagtcttagtcctttccctttttgtctcccctcccctccccttcctcctttctcctgtattctcttttgttaaagatagagtctcctatagcccagggtaacttcaggcctcctatgcaactgagggtgaccttgaactttgaacccttgctctcccacacagtattgagattgaagatgtaccacagtgtctgattgatcgtctatagacttccttaacatcgcagtaatagacttttctggttcacgtggattgccacacagctctgctgatagctactgacatcagcatggagggtaattcctcttgtctgtgcagcttcagtgccagaagctcctgtgacccatttgtacaggtgtagtttcctacagaaagagtgttttgtaagtctcttgaggtagctctcctaattagaaatcagagatgagaacttttatataatctcgttgtgatcaagtgaaaaaaaaagaggcagacttgagagacagctgtctgaaagcatcttttctcagatacgatgcagcttttcacccatggggaatgtgctgacttctgagggaccagccttcacctataagataaacatggtaggatgtgctatggtagtgtcttgtttgggtaagggagtcctgagtgtaaagtgtctaaagtagagcgtggtgcatggtctgtactcagggaaagatgctagcacgcttccccagatacattcagagtcttctggacttggtccttaagaggatccatggctgccatagttcatattccctctccccctgtactgagaattataccaggctgttaacatcttctaacattgaactgaatttcttgtacccactgtcatttttctatgccattaagacaatttcgtagagtgggagatcatagtaattggcatgtattttagagagtacgtctatgtgttctctatctgttgggcattcacatatatttggtgttctcttagcctctgttaggagaatcgggctagctgtggcagt

SEQ ID NO: 30915 - DNA, 1162 bp, Mus musculus
tccttccttccttccttccttccttccttccttccttttcctcctcctacttttttgtgtgtgtgtgacatgttcatcccttgtcagttagactgtggggaaagaaaaaaaaatactgaataccagagtaggaattgcatccaacacttaatgaaatccactgcttatgttattttgattggtgttgtttgctaaggtgtatctgccagaccttgtaagaccctcgttttgaagatggaatgctagtttcatccaggcattctggttatctgactgtgaaaaaaaaaaaaaaaaaaaaaaaaaaaagaaaagaaaagaaaaaggatttggatgggaagaaaggttacagatgtaaagagcatcttgtgtaaaatcaaacatcaggatagcatggggaggtctggtcacctggatttggttgtttttaatgtgcctaatgggactttggggttattggattctttttcacaataatcaactagtcttgactgttgttacacagagattttttttgtaaagtatgctagttatatggtcaggaggtgtcgaataatacaataaattaaaaaaaaatagatgcactgagagctaaggaagtttgagaccagctttctctagaggtatggttacataaggccaacgtggacaatgtagacatggagaacttaagtcgatagtggtaaagggtaatcagattgatgtgagttcaaatcattactcaagaattagcatgatcctttgtaccctactatagaagatggagggtggggtgtggaagagagagagtgggagggagggagggagggagggagggagggagggagggagccagggagcatgagtttataaatcacataaagattcagacagagaatctcatcttattaggaagatgagagttttttcttcttctatagtattcctccctgaataatgagtcctgggttgtagaagaggattggtttgcacttaaacccttgttcacacatataacagaaacatatactatgctataagaatcatccatatgggtttaattaggccgtgtaagtctatacgtgttttggaacagagaagacaaaaacgctgttttataaatatcaatttgagcaatctagggaggtggctcagcagttaagaatagtcactgctcttgtaaagg

SEQ ID NO: 30916 - DNA, 1200 bp, Mus musculus
gtgcttggcccacagacaaggcctcctgagtgctaggccggtgttctatcgagctatcggctcagaccccagaatttccactcatgtgcacgtacaacagtgattggcattgctctcagctctctacagttgccttccagctgtggagtggagtgggacaatagcaggcctgatttaggtgacaaggaaacttgatatgtatcctctcttcctcctgtagctcaatgtgtggaggtttctgagagctcatagtatagccttctctttctacatagactttcctccagaactaccagtatcagttatcattgaccaaaccttttaggagattctgatatactctgaagagccagtgtttcaatgcagtggtggaaagattgaaaatatctgtgacactaaaagtttgtgttctcttttgactacacagtatttttttttttttttgtatagcttaatcattatttgaaaaccttaggtgagattaatcttattgcctgtaattaagacaattttattaattagcatataaaataatggtccccattctgacatgttcatatataattgttgttgtctgtagtcataattttaaacttttatggactagaaaaggaattttacatatatttagacaataaaatagttgtgaagtttttgagtgtaattagaaaaaatgtgcttcataaaacttttgattgattcaatactgtttctagtttatctgttagtgggattatcttaagccaggcttcacacagaagagggcctaggtattgagtctatgtggcacaaagagtgctggatttaggagcacagtctcagttaattgtccctttgaatcccatccattaccgtgacagtgaagtgaccagggctcctgggatgccgagagagcctggcttctggagcccagctttttgattttaaatgtacagtcaggatgataggcgcaagtagggtactttggctacacacagtggaaaacattgctatctgttcacttcttccgagctgtttcttatttctcttcctcatgtttccctttgcttttcaaggcctgattggcaacagcttctccttttaaaatcgctctattgcagtagagttgatcacttacatactgcacatgcttaatgcttgctaattacaagtgtgtgcagaatttgtgcccccgtgggattgttatagcaatgaagctag

SEQ ID NO: 30917 - DNA, 1149 bp, Mus musculus
agaaaaaccagctgtttctacctggggctgattgaatggcagcagtgagagtctggctcaggactgtgtgatgtactccatagggccagcgttgcccctagaggacatcctcataggcctttactctgtagtgcctgtgactgtttaaagagctccttggtggccacgctgctgtaagactgctcagtgggtgtgagtgcagctttcttgttggacggttgccagtggcatcatggccaataaaaacgggttgtcaggtacttgtgaaaggacgtctttaaaaagggtaagtgtaaatgagcaaaaatcacctgtcacacgtgactgggttttctcctcaggattctgaggcaggttcttttagtaagatgttatcagtgatgaaaaaaattaccttttgttttcagtagttagatttaagtcacttatgaaaatcttcaaaggagtgttaatgcatcttgtttaatacaaaggctcatgtagaaaatacaacctacgaacctcaccaaaatgaaaatctaggtcagctatccctcagtttttcaattgtgtggtgttggttccctacgtgtctcctccttcagactgtacgaagtcttcaaatcacctctatagtctcacccggaggtcacagttacaggaagtacctggtgtggcgtgcttgggtaatcccttgcgcaattagagttgaaaccactgctgtagaaacaggaggttggaaccttgttggagtcctgtgcagtgggagggttgagaagaaagcgcgagcaagtcacacgtatgccttcagaaggataggaacgagggaagaccttccttgtgttctgcacactgtgacctctgtcagtcctggaaatagtccctgagaaatgatggggttgcagttcttgttagcagagaaggaaacaaatggattacttttagtcttcttgttctacttgactttaggtataaagttcactgtcaggtacatttctagcattttagatgagattagacatgtttctggtggtgtggccataaactcctaccattttaggaaaaaagaattctacgcctgaaatatcagaaaaatatatgaatggaatagatcaagccaaagaacttcaacaaacattcctctttgtttcctgtctgaactgatagttt

SEQ ID NO: 30918 - DNA, 1152 bp, Mus musculus
gtgccttgtctgaggtcttgctctatagacagagttctcctctattttctctcagaattaagtctgagaatatatgtaactggattcaaatccagtaaacaaattcccacaaactgcataattaaggctatttttatgattagcaccacttagtgtcccaggattcaccagagtaaacattgctatagcaaaaatgactgcaaatggttgagcctagcaagagaaaatccccagtagggccatttcggcctcagctgcagctgtgcttaacggcatttcatactggaaagctgagattaacaggaaaatcaggctctgccatagtgtgcagatgtggctgcaactgtcttaatttattcagcaaacatttgttcagggcctcctgcgtgccaaactggccactgggattccagggataaattgtacctggcacagttaaggagcttccatttgatgggaaaaggcagatgtgactgagagttggaggtgtgcacggggccaaaggacagggagcctcacttcacagggtgtgcgtggataggcatcgtggaccatgccgacagacgtgtggagaggctgtgagacactgaggcacaggactttgcttgagtttgatataacttgctccacacttgtaacacaagaaaaggagtcagtttaggaaaggaatgtcttatgtcaaaatactgataaaggatgtatgcgtggagtcctgaggaatctcaggtacaaggcaacagctgggtgaacgtgtgcttaccagatagaggctttcggaggcttcaggctctggcaccaccgcaatgttggcaccaacaacaccaatcacaaacatcagctcttttgactatctgtcatttgtcattctgttaaatgctttccgggcaccatgtcatttaacagtgacatcttgtcttggtaaggaactattttttgtttgttttcttttgcttttcacttgacaggtgaaaagatcaaaattttgatctagaacgttccttcaaatctcagaggcagcatttgaactcagatcattggtccccacattgccaatgtcctgtaattgaaagcttatgtttcttcagtaaaacataggctactgcatacaggtcctgtgtgtgctacaggctttaatatgtctgcatgcctgct

SEQ ID NO: 30919 - DNA, 1166 bp, Mus musculus
tcctcgtattttaggccattggggtgactcagaaggtaaaggtgtctgatgccgggcctgatgatctgagttcagtccctggaccccacatggtagaaggagagaacagactctcacagattgcttcctgacctctgcatatgtgctatggcatgtgtacacctacacacgtgtacccacacataaataaatgtaacaaagaaggcgttcattccctttagcaacgtggtcttacttagtgaagctgtcaaatactcagcgtgagaaacagctctttctgctgcttccgctcacttttaaagtgcacttgtctgtatggtctgcactgggtaatttggatcttcgcactaacatctgtttataacatcgggtgcatgaggcatgctggatttaaaccttaacactctgaccatttggtgaaatgcttttctcttataaaaaaattggtttactaacatctctgtgtaggataaggacggttgtatctttgcgctccccttcttttcagactggagagtatgccactgatgaagaagaggatgagggcgggcctattcttcctagtggtgacgtggccattgaggtctttgagctgcctgagaacgaggacatgttttccccatctgacctggacacaagcaagctcagccacaagttcaaagaggtgagcactggcccgcacgacctttgcctggacctgctcctttggtcgttcgtttcgtatgcttttgtttgtagattgaatgaagaatcctctcttttctgaataagagtctgaatcttaaatttgaggaaacaagttttagcagattgcattctactataaccaacttcagtgtttgtcacctgtcacggtggtagtttgtgatttcaggcatcatttcaagatagttcaagttacgtatattatttgttacttttacggatgctctagttcctggtcacagcctcgttcctctagggcagtcatttttctaaaaagttctttttctttcttttcttgaagtaggcagatatctagtaagaatgaagtgcctaaagagctccaaagaacagttcagtgagcagacattgaactgttcatagagccgccacagagtggtcacctgtccgaggaatggtgatagctggtagccatcctcctcctctggcctaaagaagccgtt

SEQ ID NO: 30920 - DNA, 1148 bp, Mus musculus
gctgcccacgagacgaggcagacactgtgcttagcacagaacacgagtggagaccaaaaaaaaaaaattctgttaggcccacaaaacaatcggacataattgtcagtttgatgaacagcgtcactgtgatgttggttacttccaaagtgattaaaggttttcaaaacctttgattaatcaaagcatggttgtgatagcaccttcccagagctagacctccagtaggttcccctccatcccctgagcgtgcacaggtagatattgggagaaggccaaaacagaggctcattctttggagctgctgatgcttggagtcccatcgtgcgaggctatgggacagagcatctgacctataaggcagggttgtttcttgcattgctttgtttggctattttcagtgctagagattggagccagagcccctcacatgctggatgaatgttctacctttgaactgtgtcctagccccacaactcactatctaaaggcataacgatcagaaagtgaacccttgcccaagaaaactcatggggtctttcaaaggcagtgcagtcttatctggactccctctgccttttgcttctaattgatggctgctttgaagttggcagcagagtaataagcagatgtgaaccttcctgggcccttagcagacacagcgcaggagaaagcactcatctccacctccatggtgctgtcttgtctgtgtctcctttgaaattaactagaactaaagaagaagacagggcatttcttctccagagagaagaaatcttgggcgttcccttcctcaggtctcctgaactaaccagactgctgggtaactgagcagagcggttcaccgacctttatttagtcctaacttagaagcagacgagcgggaggcctcctgtagcggacgctctggatcatggtttctgcaggcggagtcaatttgatgaccaaaagcagcttggggaggaaaggtttattccgtctcatacttgcagatatcagcgtatggtccagggcggtcggggcaagagatcaggagaagaggagacaggagcagggactcatgctgatgctctggaggatgactgcttactgactcactctcaacattagctcccaaaccctcacaaatcagcccgctgagtgctctcagt

SEQ ID NO: 30921 - DNA, 1646 bp, Mus musculus
aattctaatacttgttattgtacgtatcagccatttttcttttctttgggggaaaaaaagctggactgcactggaagcttctgtgtgttcattttcgagagtgaaaacagaagggtgatgattttaagttgtgtttacactttgatgatagttgaaaatgaatgtatatattggaaatgtctgtaagtctgccctgcctgtaacttatgacctcttatattgcgtttcttaaatacagtgttctcactgtgactttattaacactccatgcttggatcagcgtacatctggcagttacaaatcaaactaatgttccttacatcattagtttatagtttagtcattgtaatctttaagttaaattattgcaatcttaaaccaaaatgagttcttttaacgttgctacttaaaactagtaaaatcgtaaagggctcttgattgcactgttcagcaaaggataagagatggactggttggtccggtgtggaaacaaagtgaaggacctcagatcttgtgagcgttttgacttcttgttagctcctttattggctgtagtgcatgataataattgagtttccaacgtcttgcacaatgctttctttaatgctgtggttttcagggtttatacaacttaaagagaattgttgcttcatggactttaaggatttcggacagtttttaagctatcaacaaatgaacagaaggggttgtctgcatattgtgaactgtactctagtgaagactagtgggtcccaccagaaaccaaaagtgtttggggtacaatatatgttcgggtgtcagggtacatggtgaggccctgccataggtagagagcattgtaggagtagattctgggtcagggttccactaaagaactgtgcactggatgtctgtgattaagatcatctcctttaaggcaacttatccttatgtgatcacgtctttctcctccccagcatcaggagggtactgttagagcagaaaccctgctctatctactttagcactcgatcgaagcctgccattactatcgtgacagcaaagtccctctgaaaccatctgccatccttctgctggggttgggatggacttcctgctccccacctcgtgtagacttttaaaataccgcagtagtttctgatcacactatgaaaggagctaatgccaaactcagtttgcaagaggcacaacatgtgactacctactttatgttcttttatttcaggaaacaaagtagcagaggagagagtactcccactactgctcatgcccaatagtgttcaccctgagatcttaaataccttaggcctaagcttcaagaatgtccacaggtcagatttagcatctgggcctctatggcttgtgctgatgatgaagaattctcttttgggatctttgcttgataggattaatttgtaccttaaaattatataagaagaaaatggttgcatttatacagctattctaagttgtttataaacgtgagaggttagaaaattttgaggaggaccattaacatttaacaagggtatttaagatgattctggaagatggaggggaaatgattctaaaagaaacttctgtacattggatgcatatcacactgtcatacactgggatcgttaagaattaccaaattctatgtg

SEQ ID NO: 30922 - DNA, 2061 bp, Mus musculus
atattaataccttgaagataacatggaagaagctagagtgagtagttagagggaaaggggaagcctgtacagtaaactgccctctggagatagtgcgagctcctcacacaaacacacccacttgcacttgcgcgcgcgcgcgcgcacgcgcgcacacacacacacacacacacacacacacacacacacacacacacacgcacactgcctcctggaaggttggctccctacgactctggtctgtaagcacctgggtctggatcctccgagtagggggcagaagaaggtccatgcttccctgccgctgcccaaccccaccccaccccaccccccgaccgttagggatccagcgatgtgcaagacagtgtacaagcagtaagagaagaagccacaaattctcagttctgtgcatgccacttgtgtaggtgtcagagctgtgtgtgtgaatatatccccacctgacacacacacatatataccttaagcacgtggcacaaaaatatactcaccgtggactgcagtgatgtcagttaggaccctgggctgtaatagtggcaacaccgccactttttatgttgtgtatacattgaatggctcatagatttttaagagatttttttttttttaatgtaagtatcctactaaatgcacttatgcttctaaatgtttatatattttggtaaaattgatttactagatctttagtattgtattttagtaaggtaaattttcctcagatatttgattaatgctttgatgtcaagattgcacattttttagttagaactcagaagctattatgcagcttggggcattttcaactgcaggatgcccgcagttttcttgactaaattgcactgtgtgttctcgtgtatcagctcccacctcagtagccatgatgcttctgtcactaactgctggctctctggtggcagtattctgtcgtgtgaccactatgtacttcctaagccatccgcttgtaatggcattttggttgccaccaaaaataacacaaaggggcctgagtatacgctgttgcaagctgtatacttcatttccttcggctggtttatgcacgcacacaagtttcttgttaaagattgaagcactcagccatgaaataacaattggccagaaataccctaaattgcctttaccaaaagaaaaaaaaaaaaaaaaaaaaaagcaggaagcgatgcccaggccagatagctctttccagcagcatcaggttcaatcggtgaataacaagcagcgctcagcgtacatacgtgggctctcctcaggattatttaatgtcataactactgcttttgtattttttaatgatgttttgatgaaaccacttctaagtctgctatagattactgacaaggccagacagctgaaaacgacaggggaaggaagttccgttctactgtaagacttgacttatgttcgcccttccttatatactgctagaaaggaaagtgctttgtaaagcattaaagtctggaaagtatgcacagcacaggacctgaactttttaatttgtacgttttgctgtctggtcatttgcatgggagaaacagcagtgccacacctaatttgttctctggcgcttcgttagtgtgtgctgtttccaatggcattctttacttttcagttttcagaggcattcaaagcaaactctgctgtcagtggaccattgttttccgaccatctaaaaaatacctgtgattaaacttaacttgttagtgtaaataaatctcttgccaatgagtattattgttgttagataatgaatgcaataaaggaaatacagaggtctctcggagtccatgtttcttttctctctctttctttttttttctcttccatttctaccttcaactaaaacaagccctgactgggtaaacctgcactgactgtcaaaacatctctctccatcaagagcaaagtgcacatttttcatggaaatgaaactaaaaataagttctaactctggcaaagtgtaaattggcagctagaattacacttgaaagcacaattatggaactgggcatgaagctaaagagctga

SEQ ID NO: 30923 - DNA, 2666 bp, Mus musculus
ttggggttttgttgtgcagggtagctggatgtgtgagggaaagcagcgtcctgtggctgccagcagccaggaaaccatgaagaggaaacacataataagcttcgcctctgaaaaatcagacctaataacttcatgaggttctgatttcaacaggaaagcaaaaaaataaaaataaaataaaaaataaaaaattttttgaaaaccactttctctgtttgttctcaaccacttgaaatagtgttacggataaataattgcttagaaatatttatgtatttaagaatagaaacaacaaatgaaggttcggggcaggggggttggtcgctgcagacagtactgtcacgttgtgctctccagaggacagcaaaataggcattttattgcactggctgcttaactttctttccacggccagcagttcaaagcacagttatttttatatagtgagaatgtgagtggactgacatggtatcgtgtctcggctccaggtatgcctgcggcatctttagtgacccctgctgatgttatcaagactagattacaggtggctgcccgggctggccaaaccacttacaacggtgtgaccgactgcttcagaaagatacttcgagaagagggccccaaagcattgtggaaaggagttgctggtacggaagtaattggttcttaactaatctttggtatcagggaaatttcttaagactctaatggtgtctgttattccccccttggtcgtagctcgtgtcttccgctcctcgccccagtttggtgtcaccttgcttacgtatgaattgctgcagcggtggttctatgtcgattttggaggcgtgtaagtgtcatggcgaattcactgctaaatgtccacagcctctaatactcagttctcattgagaagtgcagggggctgactgcctcctgtgacaacgtccacaaggtcgtttcccagggagcacaccattgactagaattcagtcactgctccatgttgcatggttgtattggtgtctactggtattttttaaagtcacttgacactccctttattctcttcataggaagcccgtgggatctgagccggttcctaaatcccggattactctgcccgctcccaatcctgaccacgtagggggctacaaactggccgttgccacattcgcagggattgagaacaaatttggactttacctacctctctttaagccatcagcatctacctcaaaagtgactgctggggactcctagagtgactgacctggatgtgcctgtaaaatgattggaaccacaataagcctcatctgggtctgaggcctggctccgtcccttccacatctgtcccatttaaattcaggtcaatgcttcctatattaaatgcaatcattcatttttctggatgtttttgtagcaagatcatggggaattattcctaattatcctttggcactttgcccacaacctgtgtttgtatcttttaaatactgggatttggtcaatactaacttgatgtggagtaagtctgaagggaaattaaggaggtctcctacctggatgatggtctcactaatgctactgaaaggcggccatggtttccaaaagacttctgagtatgtttaaagtagtagaaagcaaagtatatatttataaaaatgaaaaacactggaaaggaaaaaaaaacccaaatatctagcctggactcaaattttaaacatgcacaaatttggcctctggattatattatgaaggttttatgtgaaacatgttttttcataatgaaaaccacattcaggatgtttagcaatcatattctcttgctatagcaagtctactagggaaaagtctcgaatgctaaggaagtgctttgggccgttttattatagagacagaagaaacacaattctgctcctgggtgtactgatttgaaataaatatgtatatgatgaacacatgctgattccaattttaacagacactgtaagaataacagacacccctttttgctggtaccaccctcctcgagtccccatggttggcacccttttgccttaaaaatcaactttctcttgaatcatgtcagacagatatgctctaagtttataattgatttggggtgccttgtatcatggtcagaggcttgtgtgtttgtgaagggaaaaataaactatttttaaagctattgattgcttgctcttgtgtgtttccatgataaatgtcaaaaatattgtcattagtggactctgacaactcttcatgccatgtttggggacattgtgttcccattgaagctggctttcggagtaatgcatgggctccttttcctgtctcagaatgagtaggggaacatatatctcatcactctgagtaaagaaagaactactggacagatacactcacccgaaccatcattttgttgttgttttttaagatttatttattttatttatatgagtacactgtatctgtcttcagacacatcagcagagggcatcagatcccattacagatggttgtgatgagaattgaactcaggacctctgaaagaacagttagtgttcttaactgctgagccatctctccagccaccaaaagaaggcatcaaatcacagtacagatggttgtgagccaccatgtagttgctgggaattgaactcaggacttctggaagaacagtc

SEQ ID NO: 30924 - DNA, 1149 bp, Mus musculus
agtatgagtgccttataaatccagcgtttctaaacacagtacatccagggtctcttctctcatgttcatagccacatggttttaaggggtttgtgtgtgtgtgtgtgtgtgtgttactaagaaaagttttttaactagtttcttataatcatcagcaattgtttctttctaatgttatagatgttggaagtaggttataacaaattcaagagattagtgaaaaagaagcagcctttgatacactaatacactgcagaatgggactcagcacagagaatggctaacacatggacttggtattttgaaagtcttccaaacttgagaagaccctgtcctcttctcctacaggctgggactaacgaataatctgggccttgaaactgcccctttttctaatcacaggctcacttgtatagtcttggagtccccagagaagctgatgccagctgccagccaggggagagaggcccggaagctcccacttatctctaactgatggactatgcgcaccatagtggaaacagtctgtagcatattagcccttacagagatgtgagaagtgaggcggtggattcctgcgtgggcttggcacgcctttgggagtgtatgtaaaagacaaattcttagaagtgaaattgtagatcactttgtgtaaacatttcagtattagtggatttaatcaattgcacctatttatcgacacctatgagaataattacccatgtgtctgcttagcttacagaatatctctttttatgtatctctgtcctgcatgaagaaaacagttgtgtaggtattcatttgttttttgagagcacctcagttgagaagggaacacgttgtcactttgcatccaccttagtggccgttcccacgttcccatctctgcttttatcttttaactggacctctgtaggagcctcctgagggctttctgtgactcttggcttttctgaaacccagcgtctgaagtaatgtaaataaaattaatccactctctgagcacacatgtgttattgtttatggaagctttatttataattgcccaaacctagaagcaatgaagatgtcccttggtaaatgagtggatgaacgtactgtgatatattggacaatggaaaaaatgctaaaaacaaaacaaacaaacaa

SEQ ID NO: 30925 - DNA, 1172 bp, Mus musculus
ctggagtcttgtgctttcgaaggccttgtgcacaccacttagagttctctctgatttcagggtgagcggagcccacagcagtctccttcaactcaatgggttcttttgttctccacaaaactagcatctctgtcctgaaagctggaatctaaaagtggattttgattcacataagtctctaactgcattttgattctttttaaaaatttagttacgtgtgtgtgtgtgtgtgtgtgtgtgtgtgtgtgtatgtgtgtgttgagaaagtcacagaataacttgtcgggagttaactctctttccaccacatgagttccaagaattgaactcaggtcctcaggcttggtgacaagtacctttaccgatttagccatcttactgatggaccatctgttttaattggtagatagaactgagttatctgagaccatcaatccatggtgatgaatatcccaaacttggttcaaagaaaattttcttcttgccttgatcccttaacacgtttcagcttttgatgctaagttttcccttttctctttaggctggaggctcccaagtgattttcacaaatcctttagagattgtgaaaatccgcttacaagtggccggagagatcaccactggcccccgagtcagcgccctgtcggtggtacgagacctggggttctttggcatctacaaggtaacttttgttttactgatttgcttaattattgttattttaagaagataagagttaagttctgctagaacccatagggcactatcatgtcaacttggagacccctcctaccatctgccagcaaattgcccttagagacaaaggctcagaaggactgtgatgggagtggcttctgatagagtctgtgagttcgagtctctttagtggcactgacctcagccactggctgcagggtttttattattttgtttgtttgtttgtttttctttgtttgtttttttggacttatattgatataagaacttgattctctttgtgtgtgtgtgtgtgtgtgtgtgtgtgtgtgtgtgtgttacatgggttggtgggtacacacatgtttgaatgtgtgaacacatgctggaatacccaaaggtcaacactgagtgtcttcttctactttctattgttttatgacatgtgttcctcactgcatctggaacccactgac

SEQ ID NO: 30926 - DNA, 1147 bp, Mus musculus
ttctctttacagacataattgttctaattgtaccttttctctcttacccaatctgctaaaaccctaattgttacccttggcttgggccccttttttccaaattagcaccaaacacagccctttgttatctaagcctctttccaagtcttggatgctcccctacagttctgagttatctgtttacatgccctctcttcattcagatttaactgcaccacatccactgtacattccttcttcaggatggtggtcaggggccagtccttctttccagaactttttttcccatgatttggctcagtggtttcattttccgccattctctttcatacccttctgttctatctaaatcggtggttgagactctttggggagttgcataccagatatcctaaatatcaggtacttacagtatgcttcatgacagtagcaaaattaaagtgatgaagtagcaaaggcaagaagatcacttaagattgaagtcagcatagtttataaagcaagttccagaccagccaggacttcatagcaagacctaatctttctccttctcacttaacaaaaaaacaaacacacaatggtaagactgtttttagaagctccatctccaaatacacgcactcgctgaagcataggtgcttaggtatctcaacttggtcatagacatctgtgacctttgataaactagtttaacttgtataattacctttttgtgcttaccatgatgtaaagatacacagtacatgcaaaacaggatccaagtcacccatattaactggatgtcctttattatttctgctcttattttaagttctccaagaacaggaatgttttcttgcttctgcaaaatctccagggtgaactttgcccttttgggggtgaagcaaggaagtttgctccaaagaaggttgacctcaaattttctatacagcgtaggaattcttcgtcttcttgcctgcctccatctcccacatgctgaggttacagatagtgtgctcccacaccaagctcttaagcacaactttgaacatcagtgtttataaaacatttagagaataattgtgtgaatagatattcaggagcagaaataagtgtatcagttagttttctgttgcagtgataaaacaccatcaccaaatacctcatg

SEQ ID NO: 30927 - DNA, 1170 bp, Mus musculus
gtcctctccttttgccttactgtaggtgcttcctctcttcctgttcctttttcgttctctccttctctcccaccatcgctcttgtcattttcaagagatctttctatttgatgtttgtatttctcataacttctctgtattttgtgtgtctctcctcttgccacataatagacaagccttctactcattaacatattccaatgatctcagataatacatgacaacttgccatcaggtgcttattaaatatttgataaaggaaacagtttttaagtcaaaactgctcttcaaagtgattttcattgccagaccagacgatataggcctgtaattgtagcttcttgcttgaggaaggagaattagttgctgggctaagacttacctggcctacagagtgagttcaagaccaggatgaataacttggtgagactctgtctcaaaattaaaaagtaaaaagaacattgggaaatagcccccgtggtagtgcactcacctgccacactcaggacctaggttcagttctcagtacgagaactgaaagtgatcttgttaaatatgaaaaactccagtgacgttttggtggcatgagtgtcttctcattgctcttggccgtgtgccttcctgtccaccattgttctccattgtccctacaacatgctccccacgttctccaggtcaagatgagcagcaagcacatggttggaccgtccttttacacactgaaagtgttattttcaaaactttgcagaactcatttttaagaattatcataaataataaaaagaatcagaaagccctccttgtctcatgaactcctggtatatgtgacatataccagattttatggcagtaaatgtttcccgtcagccttttggataggactaaatgtaatcatgctctgttcccttgggagatagggaagtgtactggggtctgactgcagcagctcctgaggccctatgccaccttgagagctcttgacattccgaatcctttctgccatactgacgatgggaggttttgtcacagtggcaacatcccacacagatggtttattgttggctcactgtcccacactctcatgggcatcagtccagcatcacttggctcccattttagacctgtgacaaaacagagacttggcagcaaagcttgttcaaaggatgttgg

SEQ ID NO: 30928 - DNA, 1936 bp, Mus musculus
tagctccagaagttttgcactgagtgctgcttttgaaagagccgactccttttttccctgtgcttcactgtcattctccagtaactttaagtaagaatcgcagcatcagagtttaaattcaacttaagtgtatgtcattatagtttcaaaagctcatatttgctttaacagtgagtttgagaacaacattttaataattcttactaatccaagtattaccacttaaaacaaagacaaaaattcaaattaaaaagccagtttgatgaatcaagaatgatgtctccttgataagtttttacactgacatttttatgatcgttctgagaattgaacacttgaaaattggttataatgttatttttcacgtggtgattatatgtctcagtatgatttcagccatgcttagcagcaaacacttttattaataaggaattgatggacttgcaccgagttctcctttttgtatttgctttatatgagactgagagtccagcgagtgatattttaagtgaccgtatgcatttctgttcttttctcggcttgcttgcttcctgcttatggcacgcgtgaagcagaaggcctcgggtgatgctgctcggccctttcttctgcagctcgcagagtcagcctacaggtttggactgggttctattgctggaggtcagtcatggctaagtgtcactgtcactgttccttcggtcttctctctcattctccaccttctgctgaccgtggttgttccccaagtcagttatcaacctgcctgtatctgttaggtgtggacgagagccaagggggcttttcctaaacgtgggcatgctcggcatcttacaagagatcatttttgctcccttctgtgaggttagccattcttgatatgctattaatttaaactctagtgatatcctcttgtcagaggacattagaataaaaattaaaagtctgcaaaggtagtttggtagatctatgcataaaaaaatacttctgccgggcgtggtggcacacacccttaatcccagcactcgggaggcagaggcagaggcaggcggatttcttagttcaaggccagcctggtctacagagtgagttccaggacagccagggctatacagagaaaccctgtctcgaaaaacaaacaaacaaaaaacaaaacaaaaacccttctgttttcagtcttttctttgatttttatccacctatttctttcactcaaattaccttacttctggctgagctactggtatcccttcatttcagctgtcggagccactgccgtgtatcctatcgatcttgtaaagactcgaatgcagaaccagagatcaaccggctcttttgtgggcgagctcatgtataaaaacagctttgactgctttaagaaggtgctccgctacgaaggcttctttggactgtaccgaggttagtgtggcaccgagcggggcagtgcgacgttcgtgcagatggagtgggagccaagggtttgctttcccatctcagagcctgaaatgaattagagagcctgtgttcaaatggaaatccagcggattctcaattattcatgctaatgggtgtaggctgtaggcatctagggcatggctaatcaaaacagcccatagtctgaaagccatttatattgctccgttgtgtttgatttcttaaaataataaattatttttatacactttttttagtgagtttttgaaaggctccttgtttgtgttgttaaagtattccactccccatctaccagggagaggtaccctaggaacaagacacagcttgcttcagagttttgagtctcctggaatgtcctgtgatctccaatcccgtagtgtcactttccatgatgcagttattcatggtcagccatgttctaaaaatacagactagaaaattccagaaaggagcaactcacgaattgtgagtagtgtactagcct

SEQ ID NO: 30929 - DNA, 1209 bp, Mus musculus
tccaccaatgtaaagtctcgggacttaagtgattatttattgctggtttaagtattaagacaacttttgatattaaggatgcgttagctgcttctcagagtatgtctgcaccaacataatgcagttttgcatgcatgaacaagtgggtgctatcatttctatgtttaaggccttaagatttgctcattagatgaaataaaccaacttataaaacatttccaactgaaatttgaactctgtaaatgactactggtcctgttataatcctacacatgtatttatttagttttccagggcttgtataagtcctggtcatgattatctgcagtcacttttaaaattcacttctagctttttttttttttctaaagtgaaagaaaaatattgtgatttttttttgtatattcattcccctttagttccaaaacagtgattaatatatgtacttttgtaacctcttgccctttctatctttttttttttcatctctctcttgttttcaacttggcaaggctgctggaggcactaggtcccatcaagttagcttctcctattttaatggatttaattcgctccttaacaacatggaactcattaggaagatctacagtactctggctggcaacaggaaagacgtggaggtgactaagggtgagtgagcataacaaaatgtttgtttcaagtgtcttagggagcaggggacagggagtgaagaaggcagtctggagtttatagtagaatttgctatcccattcatactggtaaaattggtgatgtgtgtcctccagaccttgatcagacaaactaaagcaaacaaagcaatgtacactcagtttttgaaaaacagaaaacagcctttgaatgaagtgaagatataggatttgttgaatctttttgttttttacaagaacttaagctaaacggtcagtggacctcaaaaacacatgtgggtcccacaaacctgtattgatgatagcataatatgatccatgaacttgaagaagaaattatcagcatttcaataggattcacaaaaaaaaaaaaaaaaacctagaaaaataacttgggtatctgaaatgtcagtgtagtttgaatcccgtccggtgtcatttgttagagcattcacatggctttactcccagtggtggttggaatggagttctgcatcctttgaacaagtgggagaaagagctgggatgacttcatgat

SEQ ID NO: 30930 - DNA, 1193 bp, Mus musculus
catccctggctccgtgcctctctcggcctgcaggtatgaatgtaaagtctctcagctactgccctgctgccatgactgtctggactgtctgttttagattaaccctctaaagctggaaacaagcctctaattaaatgctttttttttttttttaaataagagttgccttggtgcctcttcatagcattagaacagtaacttagacacagagctttctcatatagcccaggttgacatcagagtcacaatgtgtctgtgacaatctctcaacttgatctccccacccctcctcccaagggctgagatcacagacctgtgccaccatgcctggctctgttcctgctgagtgtaagctttaaaatgcagggtactttattaactttatattcactgctctgaaaaatgttcttttctttcaaaggaaaatgtagtttagggggacgcatttaaacaggcaggtggggcctgtgaaatcacgatgtaggcctatttcttttgtttgatttaaaaatgagcagtcatttgcagtaagaaagagacataaattaactgtcttaccttttctaaccgtaggaaatacagttggagcacgcgaagcaagcctttgtgcaacgagacaatgccaagacaggcaaagtctcagccattgacttccgggacatcatggtcaccatccgtccccatgtcctgacgccttttgttgaggaatgtctagtagctgtaagttgtgcattgtcctaatgaagtagtttattctccctaatttgtgccaagttaacgggaataataaagagcagtccttgtttaacaccctaacgtgatcatgtatattatcacccttgcaaaccaaaatatatcttggttcattttagtgggtaggttcattgattgtctgcattgtgtgtttcagggatgtgttcagtggtttcttactgtccctggaggcttgtaccggggtcctatcaaatgctaaagtctgcaggccctcagatcatttcttcacagtgacatctctttggatataatgtgcatgaattttctcttactttaaatcatggctagattattcgtaatatctagtgcagtatttttaagtctttgttttgctgtgctggtcagggaataatgccaacagaagacatctgtgcatattcagtgcagatgtaatccccgcccaaaatctttgcaaaatt

SEQ ID NO: 30931 - DNA, 1219 bp, Mus musculus
gagtctgttctcactgaatcggtatcgtactgcattgtattggtccctgcatttggatttgtctttcctgtgtactggtacagaagttccgagagtcccgtgacctgcctgatccagctgcagctccctgtgtagcatccctacctcatgtgtgctcaggagctgctacaatgaatggggacttatgaggtccttgtgtgtggtgtataaggctgtttataaggaacgggactgctcctgggttttgccattgctttataaagtatctaagctccagtcacagaacccaacaatgtaccgagggaaaactgaggcctgaggcttggaggatagttaggttagaactcccaggcccgtcagggtttacccttgggctcccagctccccttcattgatttcctcacagtggatgcccaagcaagcactgcgtgctgctgctagctgtgtgaagtgggaatccacggttctaccagggcatctgattttgtgactttagtgtatgattgtacagttttattttctataggggactaactttgtatatttgcttattttctgttgcaggttaatatccttccaagagtttgtagcctttgagtctgtcctgtgtgctccggatgccttgtttatggtggcgttccagctgtttgacaaagctggcaaaggagaggttacttttggtaaggaaggtggttggggagcattgctttgttttaggaatgaaaaacacccacattctcattctctccctctccctctccctctccctccctccctccctcccccactctctaatagactttcccccttcacataatatatcctgattatggtttcccctttacccatccagtttcccccacctcccttcacatccagacctactccctttttctgtctcaatagagaacaaacaggcttctaagggacaaaaataaacgataatataaaaataacacctcatatagaagacctcaagggaagactcaagagagaaaaagccactcaatcatgcccctgatatatactaaacttgatatcacactacactagccctgattatctatatctatatctatatctatatctatatctatatctatatctatatctatatctatatctatatctatatctatacacacacacatatatatacatacattcacacacatatatgtacacacacacatacacacacacacacacacacacacac

SEQ ID NO: 30932 - DNA, 1216 bp, Mus musculus
tctacagcgtgagttacaggacagccacggctacagagagaaaccctgtctcaaagaccaaaaaaaaaaaaaaaaaaaaaaaaaaggaaagctcatagttgtaaggaattttttagagtcagtgaccagtttatgaaaaacatctgtttcttcttccagtggtacctttggtctgatccagagatctactaggctgtgacactactgcctgtgtcctacttggacatggtgttgttttatagctgaggctgccctcacactcagcaatcctcttgcctcagcctcatgctgggattacaggagtgtgccatcatatccagtgagctgtatttaccatttttcctttataaagtgtgactttttttgtttacattggtgatagctgtccatgtgtgagccaaatgttttcagggtttggtttctctccctccctccctccctccctccctccctccctccctccctccctccctccctccctcccctttctcccttcttttctttgctttcgtttgattgtggtttgttttgttttggttttctttgtttttgtttgtctgcttctccatacagggctgctctggcactctctctgtagaccaggctggcattgaactcaggtatcttcctgcctctgctgaacttaaaggtgtgccccacctctccctaccacgcccctaaccatccacccttggcattgtttggttccttatttaaggaatttaaataaaagcccacagagattgcaaagtagtaaagaaactgtatttaaagcaaagcagtagaaatgatcagaatatacttcaagagagaatacatacacttcaaagagtcaagaatgaaggtactcaaggtccttggctactgaaacttttttgtggggtttgatagaagaaggagttgcgttattaaggggctgtagtgggtgtgcctctctgtttcttttgatggattaactcatgtaattctgctgcacatatcttcttctcacaatgcatctgattttaatcacatgcatgcccagtcatgcataggcataagatggtaaacaggggattctaaaagttcacttgaggacagagcattaccttactgcttatgcttcccaaactagtctaggctaggtcagactttccattctattatgtggatacattagggatatatctgaatagaaactatgtaagtttctattgttgattgtttataggggagg

SEQ ID NO: 30933 - DNA, 1439 bp, Mus musculus
caattttggtcgaggagggaacttcagtggtcgtggtggctttggtggcagccatggtggtggtggatatggtggcagtggggatggctataatggatttggcgatgacagaagcaattttggaggtggtggaagctacagtgattttggcaattacaacaatcaatcttccaaatttgggccgatgaggggaggaaactttggaggcaggagctctgacccttatggtggtggaggccagtactttgctaaaccacggaaccaaggtggctatggcggttccagcagcagcagtagctatggcagtggcaggaggttctaattacgtacatccaggaaacaaagcttagcaggagaggagagccagagaagtgacagggaagctacaggttacaacagatttgtgaactcagccaagcacagtggtggcagggcctagctgctacaaagaagacatgttttagacaatactcatgtgtgtgggcaaaaactccaggactgtatttgtgactaattgtataacaggttattttagtttctgttctgtggaaagtgtaaagcattccaacaaaaggttttactgtagacctttttaacccatgctgctgactgctaaatgtaatagtctgatcataacgctgaataaatgtgtcttttttttttttaaatgtgctgtgtaaagttagtctattctgaagccatcttggtaaacttccccaacagtgtgaagttagaattccttcagggtggtgccaagttccatttggaatttatttatggttgcttcggtggagaagccattgtcttcaaaaaccttgatgttgttaaactgccagttactgttgtaacttttaatgagtttcaccattgaaaggtcacaatttggttataaaatggttgttggcacaccctatgcaatatcaaaattgaataacggtatcagataaaataacagatgggaatgaagcttgtgtatccattatcatgtatactcaataaacgatttaattctcttgaaaaaaattcagatgacagcagatgctggcaaggatgtggagaaagaggaatactcctccattgctggtgggattgcaagcttgtacaacaactctggaagtcagtctggtggttcctcagaaaattggacatagtgctactggaagatatagcaataatacctctctgggcatatacccagaagatgttccaactggtaataaggacacatgctccattatgttcatagcagccttatttataatagccagaagctagaaagaacccagatgtccctcagcagaaaaatggatacagaaaatgtggtatatttacacaatggagtactactcagctattaaaaacaatgggatttatgaaattcttggacaaatggatgtatctggaggatatcatcctgagtgaggttacccaatcacaaa

SEQ ID NO: 30934 - DNA, 1143 bp, Mus musculus
gaagatttcgtgcagtgtattttgatcacattcatcctttccaccaggttcttcccagatttacttcttccagaccctacccagctctgtgtcttccccacacccatcaagtccactgtgtgcttcctatatattctgactgtttggccttcccctggagcatggtcagcttactctaggctcttaagaaaactgacacttactctcaaagcagcaatcagttgcagtagctcctcagctaggcctagggacccatatccacatcccgtctggatgttggattggacgaggtgagtttccttgaggctggtgtgtactgacaggatcacttgaattcattgtgcgcagctgccctgttatgtatggaggggatgagaacaagagaacaaatgttgcagatttgcaggggagattacaactttcttagataaattgtttgtggttttgttttatttttgacttggggggtacataatggcaagcttatgtttgtggaaataacctacgagaaatacttagacatctctttccatcttcagactgggctggcttagatgaagatgaagatgcacatgtctgggaggataattgggatgatgacaatgtagaagatgacttctctaaccagttacggtaggttctcagccacatttttattgtagttcagtattaattttaaacatggaatatccagcttccatagatagttgttttcttaaaacttttggggtaattctttcattatgtcagacatactacctttggattttcaaacaggaatatttcaggaaattgcatgcaacttctattccttttaaaaaggtagttaaatagaagcatatttactatttttcatgaactacatcttgtcaacatgtattttcaaccagtgttgaataactgagcaaatattagaatcatagaactaattcaggaattccataagtgattgtcgtttttggagattggagttacagtagtctactttattgtatgaaacacaagttcacctgctttgcctgttctggacatctcatataaatgctattataaaagatatgtccttgtgtgtctagcttcttctacttagcataatctttcccaaattcagaaacactgtagtatatagcagtactttattct

SEQ ID NO: 30935 - DNA, 1177 bp, Mus musculus
gccatataccttttaaaaagttcttttaaatttcatagatagaaatagagagacagacagacagacagatgtgtgtgtatacatacatatatatcacatatatacacatatgtatatacatatatcatatatacatatacatatatatacatatctatatacatatatacacatgtgtatacgagagtgtttgtgagtgtgtatgtgaatgtatatatgtgtgaaagagtgtgtaatattgtgtgaatgtgtgtgtgtgttcatgtacacacatgtgcaagtgtgcactcatgccaccatgggcctgtggaaatcaaagaatcactgggggtggggggttggttctttcctttcaccatgtgggtcatggggattggactcaggtcgtcaagcttgtcaacaagtgcctttactagttgagtcatctgaactttgtttttgaatacacagtctcacacttacctggcaggagagataccatgatcacaaaggtggttttcccagtacaaggcttatccattgcactctggatgtgctgacccctgtgatttccccaaattcgggaaacttgactgcataatttgtggtagtgggggactgcgttcgcattctcccctaaaaactaaagaagaagaggaggaggaggaggaagaggaagaggagaagaagaaagagaaggagaagaggaggaggaggaaaaagggaagaggaagaggaagaggaagaggaagaggaagagaaaaaagaaggctgcagtttctaatgtgcctggaacttactgagtgtactaaactggcaggtgcacagccctagagatcagcctctatctgttttcccctgtggtgggattataagcaaattccaccacactcagctttccataatcttgagctctaaggaggaaattcaggtcctttactatggcttctcttctgcccaagacataggacatttgaattttataaacactcagagagaaataagtgaccaagagtagaatacatattccgagagagaacagcaagtcaagctaagccagttgccaccgcacccctccagacattaaaaccagtacagttcacagaaaccccatatttggagttcaatgctttggggtttctctcttgaaattcttacaatatcatcttaatttggggtgtcatgagtgaggttgagt

SEQ ID NO: 30936 - DNA, 1356 bp, Mus musculus
cacctcagtcaagaactcctggttcaagattttgcaggactatgttgaacatcaggtctgtctttaaagatatatattctggaacaataatagtttaatagagagctgggatctctgtttgcctttcgtttgaatagttgtatctaaaggagagtcagagttcctgcaaggaatatgtcttttataagctttatgtaataattaaggaaaatgaaggactataaagtagtattgatgatcaaaagaaaagggatagagggaagacttccaattcattgctgatcattttgcacgtctgggtacctgatgagtacaaatgagtcaaacactgagcctctaagtattaatatgcatgagagcttttaaaaagtcactgtctgtttattatggcttgctttggcactttctaaataatgagtgacgtaaagggtcttgttgcttcatagcatgccttaacttttttttggtcaccatcagagcaaatacacatcgaaatgttttatgttcctactttatcttataggttgatgatgagatgatgtctgcagcctcccagaagtttcccttcaatactcccaaaactaaggaaggctacttctaccgtcagatctttgaacgccattacccaggccgggctgattggctgactcattattggatgcctaagtggatcaatgctactgacccttctgcccgcactctgacccattataagtcagctgccaaagcttaggcactctctacactcttgtgtaaaagtaaatgtttcttccggctctgaaggtcgagacagcgacacaatcagaaagaatgagactcagccatcagtcacccaggcttacttaggcatgaaaagaaataaaagtttcacatctgaaatgcctcctggttgtgggtaccagtgcagcctctttcaaggtagccagagaccgagtggctcttgctgtattgccactgtctggatgacaaagctaaaggggagagcatgtggtcgttgcatcttagttctgcctacattcctaacagctggctaggctgactgggatgtgagtcctttgtgggattggtgacagttctgtttataggacagacattcaggtttcgtttttttgttttgttttgtttttgtttgtttgtttgtttgtttgtttgtttttgttttttatattatactaatgttcccttgaagtcttgtggagctgggggtaaacttctcaaatacagggtcagttgctaatgtttggtttttgtaggtctgtatggaattgttaacactgatacaaaactgaaccttatgaaacctagctcacacagcctttttccataaaacttcatttcgaagagcaggtggtgggg

SEQ ID NO: 30937 - DNA, 1377 bp, Mus musculus
gcatcaggagtggcacatgagaaaggcatctcatagtgatcccaggcattggagacaagagatgggctctgtcctaaataattgaatcaggagaaatcatttgatgcttgaggagcaaggaaccccaaccacaccttatcttccacttctccaccatggatcacaccaccacatggagaccaaactgcatccaaagcattgcaaggccacgccttactctactgtgttagtacacatgccgtggtattcaggcatttgagtggttcaatccagcaaacatttaacatagaaagtcttgttctaagaacatagctttgcaacctgtttgtaaaacatgacagtggattgcaggctattttattgtttaggttggattgacagcttgtagatgacttacaaatttccgatccttttggaagctgctttaatacttatactaactcagtccaacaagacactccagcctactgttgcttctgaagacaacaatgacatcgccattgatttctctttcatttaaggcatgtatttaatttccaagtatattcggaagaacacagacagcgtggtgatcttctccggagaggggtcagatgaacttacacagggctatatatatttccacaaggtaagcgctctgaactgaaacgatggccaggctaagttaggaagtcagaatcacttgaccctttctattctgtccttatgatttgttgtagttttagagtgtatttgtgtttgtgtttaagaattgatgctatctatctgtctgtctgtccgtccgtccgtctgtctatctatatatttataggagaaagaagacttaatagtatcagatactttttattcttaaacacgagaattgcttttgtattttatctgtctgactgtctgtctattgatttttttttttcaagacagggtctcattaagtagctctggttgttgagaaactcactttatagaccagactggcctctgcttcccaagtgctgggatgcaaggcactgtgtctgttgcccagggcactcatttaatttgttttcacactaagcacttcggaggatggatgggtcggtcttgtaaaacattgctggcctctgaagtcatttactcacatcctataccctcctcttaagctttctgccttactcattctttatttcatatgtaagaggggaaaatgaaggctgcctgtgtgccaaaggaaggcactcaccttcgtttgttaaataggctccttcccctgagaaggccgaggaggagagtgagagactgctgaaggaactctacctgtttgatgttctccgggccgaccgcactactgctgcacacgggtaactttaaaatcagttgtaaaaccaacaagggagaagg

SEQ ID NO: 30938 - DNA, 1131 bp, Mus musculus
ctttaaaaagcttttttctttgaaaactttataaatgtctaaaagacaggtttcagaaaattcagctaggtaaaggaatgggatgatgaagactttcattttaataaaggtatcagggcctttcaggtgggagagaggattgtctcagaggatgttattgtaacgacgagacatacactagttaaaaggtgatgtttggaatttttatcttgctatgttaggaaattatctcgtaaggaatcatcttcctattgcatcaaatgactgcaaatccatgctgttttgtgttctgtctccatgtcattcttgcttcttcaggagagatgctagggtatggggtaattatttcccctcccaccttttttgtataatggatatgcgtttgtacttaagggggaaagtatgggttagagtgtactagctcactgcacaggctgcagagaagcacctaattgcatacgttgctgttttccatttataggccttgtttccttaaaacactccaccactcccttcttaaaagtggagcccttccttcctggacactatgaagttttggatttaaaaccaaatggcaaagttgcgtctgtggaaatggtcaaataccatcactgtacggatgaaccattgcatgccatctatgacagcgtggagaaactcttcccaggtgactagtgcccatgaccaaaccccagaactctagctcacccctgacaactcagggccatttgcgccgttttcaatgatgttggttttaagatgttcctctttgatttggaggtggagcgatctccgtgagtgagggagagccatcacaatgatgtagtagactgcttgcctcatctcagtcagcttagcctcagcttgtttgtggcggttccatttactttctgtgttgttaggctttgacctagagaccgtgaagaacaatctgcgtatcctttttgacaacgctatcaagaaacgcttgatgacagaccggaggattggctgccttttatcaggtgaagtcactttaaaaaataaaaacatcttactggtgtttaaatgaaatgatttgtagctggcactgagctttgaatgttaaaggcctactatatagtttcatgtttcattttctatagacgtgtt

SEQ ID NO: 30939 - DNA, 1145 bp, Mus musculus
tattatatgtagataatattctatttcacaaaaagcactaggtcacctgcaggtttttgtcttggggctggggtcctaaagaaaggatgacttcccatgtaaatgtgtatgtgtaactacagagtgtagactctgggctgcaatatgtacttgaatttcttcatgtgtcacagctctgatgcctgacccttgtatcctgtttatcagaacacagtctttatcgtcatgggtttagcctttatggtgaaaatttttcagaattgtgagtttagacaaggtagatttgaataatgccatacttttttttttctttctccttcttcttcttttttttaaatcactaatgcacacgagctgatgctagaacacagatactgggtcagcatccataaggatactaactttttgtttgctctgcttccttaagctacagcaacgttttgaatttgaatatcagaccaatgtggatggtgagattatcctccacctctatgacaaaggaggcatcgagaaaaccatctgtatgctggacggggtgtttgcattcatcttactggacactgccaataagaaagtatttctgggcagagacacctatggagtcaggcccttgtttaaagccatgacagaagatgggtttctggctgtgtgttcagaagctaaaggtaataatggagtttaactatttttggtttgtgtttcttcctggatcatagtgagaatcccagagaggtgtcaatcaaaaactttaaaatgatgaaagatgaatactcagtatgaataggatttgaaatcttagtcaatcctttcctctttcatgtgtgcgtgtgtgttgtatacacgtgtgctcatacatacgcacacgtagagaccagagacttaacattagacatggtaattttattttatttaatccgccttcctctgcctcctgagtaccaggattaaagatatgcaccatcgtgccagtctccattttaattcttgacacggtctctttgcacttagaactcactcactcacgttcctgatttagtggctgagctccaggtctccacctgccttcttcgtcctgccccacctatcctagaaataaagatgcaggatgctgctaccaggttctccatggggcctggggattaaat

SEQ ID NO: 30940 - DNA, 1230 bp, Mus musculus
gacatgcctaaggatgtattatactagtgtgtgtgtctctctgtgtatacacatgggttaatattacaaaatggtgcccacgagttgctgtttattccctttgtatttgacctggaaatagagagatggcatttaattatagaggcttaagaagaggctgtacgaacatggagaatctacctttggggtgttttgaggttctcacctggagtagctggggctggtatcccacctagcttggagccagctactcctgctattgctctttggagcatcctgggttgcagctgtgacctggatgttgctgggcgtaacccccaccaaaaatcctaaggtgggagaaatgtgagctttggctgggtgcagggtttatggttggatataaaagtcatttgtatttcttaatatttgtaagcaaatgaaatcactccccttgtgcctacccacctaatgggacattgcagtagataaagctggtttgtgtccaacatttggagagggttgtgtaggtttcaagaatccagagttgcttatactcaatgtgagaccctgtgcttctctctgtagagtgcctgcagtccgcctgtagcatgtgtggcatctgggccctcttcggcagcgatgactgcctttccgtgcagtgtctgagtgcgatgaagatcgcgcacagggggccagatgcatttcgctttgagaatgtcaatggatacaccaactgctgctttggctttcaccgcttggctgtggttgacccgctgtttggaatgcagccgataagagtgaggaaatacccttatttgtggctctgttacaatggtgaaatctacaaccacaaggcggtaagcagagtgaagctggggatggctggctggctataactcaccttcagacctatggttatgatgttcatattttgtgtcacgcttttttactttgtatctttttctatgttctgactcctttgctctggtcttatacagaaaactgacacagaaaggtaaaattagttagattttttttcaagtgattaacatggagatgccaattcaatttttttcctgttatacattttaatattgattagggcagtgttagctgatggagtcctgtcagcgaaaatgtcaggcctgtgctccattgcaggttacgctaacaggagacagacaaaaaaatcactgtaaattgaactttcggaaagcaaatgcagaagtggtgcacataggaaagcgg

SEQ ID NO: 30941 - DNA, 1759 bp, Mus musculus
tatttgaacttaatgttatcaacttgatggagactttgtgaagaagttaaccttggcacaacagtttcttaggacaaacatttctttttattgtacaatgaatttgtaggcactattggttcaagagtgcttttaatctctgcagggagattacctggggttcttcttagctgctcagtagtagtagttatttgtgtgtgtgtgtgtctgtgtgtggtgtccttctaggtattcctatgttacttatgtatccacatctatatatcagacactctgttaggaagtactgaagactacaattaaggagtaggagatctattgctgatgggacactggacctggcggcccgacctctgggcttatcctgcctgcagtgtcacagcaccttaaggaacagaagcagaacacctcctggctctcggccccaggatgcacgtttgccttggcctccgccccgcctggcgtcgctcgtcagcactgcgggccacgcccctgcgcacgggttgggtcccagccacatgatgaaacttcccgcacgcgttacagaagcccggcgactctaaggtgggaagcggcctccaaccggtcttgtcactgcgctgcctctgctccaccttctctggccctggccgctagtgctcaggtaagcgggagccgggtgctcagcgcggagcgctctgctcgcctgggaggccggaggatgtgctgtccgcgcgggcacatgtcccgggagttcggatgcggagcgctcgggtccggcgccagaccgatgctgcggtgcagcgcgaggcagggcggggcgggcgcggggcgattgttgcgcacctaggacggagctgccaggaaagctttcatgtgagcgaagtgcagcgcggaggcagggccgctccagacagaaggcgaaggtggccttcatttagacaccataaatatttttttttactgtatgacgtctagatctgggaaatttcagccatccgaaggttttgcctgggactaggtggacgcttgcacaagaccagctgtaattgggagccccaggctagtgtaggggtctcgctctccagcaggacagaggctctaccaagctctagagcgagtgtctctgggtctgtctggatccggatttctgagcactcactcacctcgctgctcaggcccttcctccactccagttccatactcgcagccacgccgggaaaaatctgtttaaggagacaggcaaccaagtacgggaaaaggcaaaggaattggcgtgcttttttttttttttttttttttttcttaattatggatagctatttcacaggtctagtttcagataagataacttttaaaatacacgggcgagtttgatttttcgttgcctgtggcctacgggttttaacagctaactcttcgttgattgatgtcagtactataatattcatttgaagtaagacttgcacaaggccacgggttgattattgaggtcttaaggtgatccagtggagtttagaactatcagttcagtgtacgaaagcggcgctgtccagcggggagcctgtgctctttcatagactgacccctagaaatgctggctagtctgaactgagatgtggtaagagtgtaatgtgtcgatttcgatgattatgaaaaccgaacgcttgatgttttgatgtttgattgcagcctctaaccactaaagtatccctccagcccggttttaataatttaggaaaagtagtgtaaatataattaattttgattatattgtatt

SEQ ID NO: 30942 - DNA, 1176 bp, Mus musculus
gcccccacccatttttatgaccgtaggggataagaatcgcccggatgtgtctttctctccttcttctagtcttttggctcgattaaaagctctcgaaatagtaagaaaagaggtctggaaacagctaaaagaaacctatgttgctggtgacacacaggtgccgcatcagtttgaagtaggagacgcagtcctggtgaggagacaccgagcgggaaacctagaaccgaggtggaagggaccctacttggtgctactgacaacgcccaccgcggtcaaagtggaaggaatccccacttgggtccacgcatcccacgttaagagagcaccccctggagtcagccatgatgagtggactttggagaagactactaatccttttaagttgcgcctgcttcgtaggagcgatcccaaaagacttcaacccccacagtcctgttcaacaaacgtgggaggtactcaatgaggggggtagggctgtatggacaatcactgaggtacaccctctgtggacttggtggcctgatcttttccctgacatctgtaagttggctataggagcccctcctggatgagacttggaggggtactctgacattcagagggcacctttaacaccccctccgtacgtagaaaaacattcgagagacccatggggtggttgctctaaccaaagggatagaagtatgcttcgaacccatcccttctatgtctgccccgggccccaccgaagtcagtccctcaatccaacgtgtggaggtaaggctgacttcttttgtaagagctggggttgcgagacttcaggtacagcccgctggaagccctcctcgagctgggactatattagagtaacagccaactattccctagcgtcttatgtacctggaggatttgacctagacgagtgtactgactggtgccatccgctccgtgtcaccttcactgaaccagggaagagagctctgggatggacaaaagggtatacctggggtcttaggatttacaaggaaagatatgatgagagattattgttcactatcagattaaaaatagagaccccctacaatcctttaggccccccaaccaagttcacacccctcacccatacaattactcagcctactccagtgattgcggacccccttaatatggccgctatcacccaacctcccactcctc

SEQ ID NO: 30943 - DNA, 1220 bp, Mus musculus
gaaggaatcgccttcaatggagatttcaacagaaccagcagccatacttcctgctcttggggtacaggacaaaaactgaccctgactgaagtatccgcgaggaatccaggtctctgtataggtaccccaccttccactcacaaacacctatgcggacaaattcagtccgtgtccagaacggaagctgattactatcttgtaccttccccggttagatggtgggcttgcaatacaggacttactccctgtgtatcaactaaggtttttaattcatctcatgatttttgtgtcatgatccagctgttaccccatgtatattatcaccctgcatccagtttagaagaaagctatgcaggccggcggtcaaaaagagaaccaattactttaaccctggctgcattcatgggaataggtatggcagtaggagtggggacgggagtgtcagctttgatagaaggaagacagggaattcagtctttgagggatgctgtcaatgaagacctagcggcaatagagaagtccatagacgctttaaaaaaatctttgacctccctgtctgaggtaattttacagaacaggagaggtcttgatttgttattcctaaaggaaggaggactgtgtgctgcccttaaagaagagtgctgcttctatgcagatcatacaggaatagttagagactctatgcagaaactgagagaaagattagagcgaaagaaacgggaacgggatgctcaacgggggtggtttgagtcgtggtttgaatcacgaccatcttggataacttctttaatttccgctgtagccggaccaatccttatgatatgcttagctttagttttcggcccttgtataataaatagaggaatggctttcatccacagtaaaattgatacagtaaaactcatggttcttcaaaggcaatatcaacctatagttcaggtagatgaagagttaagggacaccgacctctaaaattctatgattagaattagtctaaacagaagaagaggggaatgaaaggaaataaaactgtaattcatgtaatgtatgttaaatagcccaaagagttgtttctgagctttgaaacctggggctgagaacatagcagaacagaccaggacatgcccgggcaagcccatcgcctccctagctcccacccctctgacctaagttaaatgttacaggctgctgatgtttaaatggaccaatcatgtgaaacc

SEQ ID NO: 30944 - DNA, 1131 bp, Mus musculus
gtttgatccgcaacaacccccacatacacactgtcccccccaccctcaattactagtttcaataatcagatgaatcttagtgaaagaggcacacactgctggtaacttagataatcacctgtatttaaggaatggtatttaaggaaggtattgacttgctttggggcttgttgagtttgagttgcctgtatttgagtctatgtgactttgaatcttagagagttctgagaaggtccagagaagtgatggggagggatgcatgtttttatttttactctctagataaataattatctttaacttttgtaggaaaagtagaaaccttttttattttacatatacagaaatgtgtgtgcccttcctttgagggtttgttccctttcattctctttgttttgttttcatgctacttctacaaaacaatctattagcaattaaaaatgttagccacaggtgcagatattttcctcgccaacacgtgtagttatggttcttaccagctgcagtgtatagtactctgtgaactaacatctgaacatatggctctcatgaacaacttagaaggcgtcaatgaatttacccatcagttaaatttctgatcatgaaatgattgttcagagtatattcagttaagcttctgagataattgccaaatattctttgaaaagacagtaaaagtatgttgtaaggaagattgtatggtgtcatttaataaatactgcatgttaacaaaccaggaattctgccagtatgccagcttagaaacagactctcttcatttgatttgcctttccttaattgttggtgaaattgaataatagccttgactgcatccagtgtgtgtattcctctgagtcttttgtgtctgcttttgtacgttgttaatcattttgtgtctttatgccatatatgttttaaagcatgttatgaagaaacattgctttgcagctgctgtgcctccgggactcgcccactgaagaaactgtttttcagtaggcccagcttctgagttttaggaagttctcagttcaccataaaaatatgcaaaaagatgttttctcctagcctgtttttaaaatattgaaatcttagaagttgtaattgttaattattagcaaaggacccagctgg

SEQ ID NO: 30945 - DNA, 1107 bp, Mus musculus
agttgacagccaggaatggaacttgtcctggcaaacaagcttggctcatggaggaatcctgatgagaggtaggtcccaggctctgggccaataatagggagtccatcttccatttgcttgtaattgtccacagagggccattagaacaacacaaagagttaaacttacaaatgaggagaagtgactactattagataaattgtcttacagaagggattaacttccacagggaattaaacctcagaatacttcttcgtgataatgtgatcacttagtaattttataaccaggtactaattataaaattatttgttttattattaattattttataattattacaatttttctttttttacagaaatacattcccaggaaatggcctctaaatcttggctgaattttttagtcttcctctgtggatcagcaatagggttttttttatgttctcaactcttgagtattttgttgcgagaagaggctgccattcagcctaacatgcttcacaatgaccctcatgcaaggcattcagatgacaatggacacagtcacctcaaaggacagatgaacttcaatgcagattccagccaacataaaggtaggctctgtgttacagaaggatttacttgtaagaaatgtgtcttgttcatatttcacggccagtacgaggtaactaataagtgaaagtgagagaaaatgagaaaatcgtgttctgggagtggggagaagaaaaaggaaaaagcttagacattagagagtgggatgagtaatttttagcattacccacatcttgtgatccataaaggtaacaaatatctatcaaatatatgtgcatacagtgagaggatcagtcatagcccagctgtggggataaagctgtcttgtctccctccatgtactataccagtttttgctgttggtccagggtgtgatgtgtctgtgtggctaagattgatcccatagttccagaagcagaggctgcttcctccctgactgcagagtgcagctcttctggactcagttcctggtgctccatggcttggaaagtctttcatgcctttccccccttttcttctgttctcttccagtcagttaactacttaactg

SEQ ID NO: 30946 - DNA, 1463 bp, Mus musculus
ttgtacaaattcataacagttggctcatagacttcaaaaataatgaactgacttgagcagcatggttttcttgttgtgttttcccttttattcttctgtcttagaaacatattcacagcagtgagaaattcacagggatactgggaaatactactttctttgtagtcttaagttgcaaggagagacaatgggaggtggtatgtgagtctgaactgctaggcctgaggtggggcctgctatccacctcactgctaacggacttcccagatgctgttgatactctcaatccattcaggtagtaagcacttaggaggagctagtgatgtttcagagatctgtgggtaaaattgacaggaaattagagtgtcaggtcacattagcttgtgcccatttatcaaagtcattaataatgatgggtaaatagagtcttaaattatttatgaaaagttttttttgatgtgatatatttgggttttacatctatgtaaaggtaacttttaaaaatgtttgtttgatagatgagaacatagacgttgctgagaacctctatcagaaagttaaaattctttgttgggttatgacaagtcctcaaaatctagagaaaaaggccaaacatgtcaaagctacgtgggcccagcgttgtaataaagtgttatttatgagttcggaagaaaatcaagacttccctactgtgggattgaaaaccaaagaaggcagagagcaactatattggaaaacaattaaagctttccagtatgtacatgaccattatttagaagatgctgactggtttatgaaagcagatgacgacacatacgtcattgtggacaacctgagatggcttctatcaaagtataaccctgaacaacccatttactttgggcgaagatttaagccctatgtgaagcagggatacatgagcggaggagcgggctatgtcctaagcaaggaagccttgagaagatttgttaatgcatttaaaacagaaaagtgtacacatagttcctccatcgaagacttagctctgggaaggtgcatggaaattataaatgtagaagctggagattccagagataccattgggaaagaaaccttccatccatttgtaccagaacaccacttaatcaaaggttatctaccaaaaacattttggtactggaattacaactattatcctcccatagaggtaagtctagaagttattagtattatataaatacttgggactgacttatgtttacctgaattttcttaaaaggctagttaatatgtacgtttcgttagtaccataacccaagcttttttatgtatgtactgacagtgtaacacagcagatgagaacagaggccccagccagtcattcagtagctagctattgagacctctgtaggccagccattagcatactgtcactggcagataaaagttaatacaggcatcttagttttcttatgctctctata

SEQ ID NO: 30947 - DNA, 3238 bp, Mus musculus
aataaatataaataatttatacttactgtgccaaaaccacaacctttatagatgatatacttgacaggatgtttgtttcattggctagtatggatcactctgtccctgtaatgaaaatacaaagccaaatttacaaatttaatttggtttaggttcttacggtggcgccatctaccaacatcctaggcttcctagtctgtgttgtacacagctctttaccgtggtttggatatgaatttgtctctattccatatgtgcttctcttctctactagcagagtaaatgatttatcctagtcatccaaaacccttaacatttactcataggaaatgagcgctgcagtgaagccgggcgctaaagccaagcagcctggcttttaagttcctcctccattactgttcatgtaaccttgaacttaatttctctgtgcctccatttcctcaactataaattaggaataatgatactacctacctcacaagattttaatgaggattatagaaatgaatatacataaggttattagagcactgtctggctcagaaaagggcatgattttaagtataaggttttattctgttaccttggagtataaataatttaatgtagataaatgaaattatcaaatcagatctgaaggaaatgtcttgcacatttcctataatacggaatatgtggtattcatctagtgcctgctgtatgccagatattgctctttacctgtacacttgtgttaatcctcataaattgggtgttagtcccatactataggtgaggagactgaggctattcaagtaatgtttccactgtcacaaagctagtaagtaagaaggctgggatctataatcaaaacctgtgttttgtttgtattattgttagccttagggttagtcgtatgaatatatgaatatgtggaataattacacacatgtatgaatagtacgtaacttctggaactactggccagtaatagtcaaaattggtcaaacagctaaatgggtctgtttattgttaagttgtgactcttgtactccagctataagtttgttgaggtggagggctcaaggttggatttttagcatggggccctagagtatgcattcttcccagataccttctagtgattaaagtagcattgctgagagcttgttggagcttgtgcttgtcttcaccccagcctggacctgtgtcagaaactccaagacagggcctagcactttggtttgaaaaaataattttaccaatcctctgctgagaaccattgccggtttacctacatgattttggtgcaaatcgtctttggaacacactcaggatttctgcccaggagagaggcatttttcaaagactctgaaacatgttttaaattagtgtggtccaggatcatactatattaaaaataaaatcttgtaaagtttaaagggtctgtgcatcattggttttggcaaaattctttacttctctataatggctattaccaagaccttaaagtgtgtaattctacacgtttattcatttcacactgagtagcaagtgttcagtgagtactaatatgtacatatgaattcaataaagcatatgtaaatgaatatcatgaaaatttccactagttactgaaatttgcaatagaaatggaaaaatactgctttacaatatgccaagtattttctgctagtttatactatcagttttgtcacctatcctatgacctaatgaagcaaaaaaattctcccaaatatttggtagagcacattaaacaagattttatggtgaaatgattacttcactatcttaaagatctctgtcatgagtaattgtagtgtggtttcaagtcaagactttattttaataaagtcttatgttatctattaatatgtttgtgtttttctactggggagttcatagatacaaagcaggtttttgccccagagttttgactgtttgaacatatctaaatttcagagatcagtttgttactataaaatgattcaaaaataaatcattgactacttcattctttgtcgtgagggaggtgcttgggattgagcacggcagtgtttgctgactggttgttttctgagttgtttcttgaggtttgatttttgctttgttttgtttctacacccttagcctggcaaactgtattgctagactgaggccctgttacacttgaaagacatccccacttggtttgtcagatcctacctggctgcgctcttgcactctcggtttcattctggttttgatagttgctttatgcttagcttcaagctactcggagtgctgtcttcttgcagttgatttgggtgatcagaatgtttatcatttatgatcgttttaaatctaccacaggtttcccatgagactaaatatccaacaatagtcggcttgctttcaggctacttgccctaattgaatgtacaacctaaaacaattctacatctctaattaagaaagcaaagttattttccctcctcttaaaagcaaaaggcaaacacattgccttcatttctattgttttgtattaggacttacaaaaacatgagaaatatgggagacaagctgtggtatatgttacactaatgtaacctctattggttaaagatggcttacagttacatatcagagctatatcaaaaatcttcccaccggtggaaatgagaactttgtacagattctctttagagaagcaactggaaaagcggcgtccgggctaaatgtacttagttcatctcccttacctcttttgagtcttcagttacattaattaagtttgagtaactttgcagggcgctataaattaatgatctacatgaagtgtattattagagggaaactaatcttactgctaagcagtgtgttgtattatacagtgaatgtttgtgttttggaatttaaaaataatttaaagtaatagtgtcaatgaagggtttaaaatgtctggtgacttgcttattttaagtgatcaccattaagtcagaaaaaatgtatttttaaatgttttttaaagtgccttttgagaatttttaaacaattgattcaaacaactacataaaataaattaccatgttcaaaaattgcttcatctgtgtattttttttaactgttataaggggatggtttggggttttttgtttgtttgtttgttttttatcaaagccttttctgtttgcgtaagctttcataattgttctagaatatatgttatataaagcaacaaagtatcccgcatgtgact

SEQ ID NO: 30948 - DNA, 1659 bp, Mus musculus
gatggctccttctcctaccaaacgcaaggaccgatctgatgagaagtccaaggatcgatctaaagataaaggggccactaaagagtcaagtgagaaggatcgtggcagagataagactcggaagagacgcagtgcttcaagcggaagcagcagtaccaggtctaggtccagctcaacctccagctcgggctccagcaccagcacaggctcaagcagtggctccagctcgtcctctgcatccagccgctcaggaagctccagcatgtcccggagctccagttctagcagctcctccggctccccaagcccttctcggcgcaggcatgacaacaggcggcgctcccgctccaaatccaaaccacctaaaagagatgaaaaagagaggaaaaggcggagcccttcacctaaaccaaccaaagtgcacattgggaggctcaccaggaatgtgaccaaggatcatatcatggaaatattttctacttacgggaaaatcaaaatgattgacatgcctgtcgagaggatgcatcctcacctctccaaaggctatgcatatgtggagtttgagaatcccgatgaagcagagaaggctctgaaacacatggatggaggacaaattgatggccaagagatcactgctactgctgtgttggcaccctggcctcggccaccacctcggcgattcagccctcctaggaggatgcttccaccacctcccatgtggcgtaggtcacccccacggatgaggagaaggtctcgatccccaagacgcaggtcccctgtgcgtaggaggtctcgctctcctggccgccgccgccacaggagccgatccagctccaactcctcccgataagcagggacattgattcgtacctctgtaacttatgttccccagactctgttttgtccttttctctagccaagtgagggtctgtagagaaggatcccttactgggtacagcagttgagatatctcctctacagaagggttctggcttgtagagctactgttggttcacggctgctcccatagaggtgccctgtagttttctggctagaaagttcatcccttcagttcttgataggctggtagcagagccagctggaacctatggcagcacacggatttccacagatgacccagaaccagacagcctggtctagcccccgctgtgccacacctgtgcaaaggaccacaatgctgttctgttgggccgaccatgccctgctgagtacgcttcaacttagagggctaaaacctttgaaggattcctccacaaatggttacctttctgtccccgtgtctctgttactttctagaatttgtgagccagttctacagggtcctcatgaaacctaccccaccccgttgtcacctgccattcatggtgatgttgcaggttaaccttggcagtgtgtacattgcccctttttgcttttattgtacagtcagtactataaaatttgttttgagttttataactttgtagcattttagataaggttgtgtttgtacttgtgtagagtgaaaggactgttgaataaaacctaggattagaatgcaaaaaaaaaaaaaaaaaaaaataaagtcccgaggcctttgtgtggcaatagctaactgaagcactcctggtctactttaagcagctaggtctttttctc

SEQ ID NO: 30949 - DNA, 1164 bp, Mus musculus
ccagaggaatcaaaatcaaggaaatgccccacagatttgtacttcacactcgagagtctttcttccaaatgcctctagcttgtatagtgttaacaaagacacctgcaggaagtgctccatcaaggctctgggggtggatatgggtgaaagctcactgatggctccatctcttcagggtaaacattctccggattgggaggcacatggagctgcgtgtctgtatccgctggtgacctagcacagaccgctttgggaggaaagatgccctgttcttgcaatggaaacaataatagcttcttggtaactcaactacggtgcaaagtgttttatttgtggtatactgcttacttatgctattgtaagactatggttgagaaattgaatattctaaatgttgaaatgtttctttgtaaagctgaagtgtttcctaatatatttcaaaataacaataaacaaaaaatataaaacttttctgtttttaggaatggtagaaagcagcagacataattggagtggcttggataaacaaactgatattcagaacttaaatgaagaaaggattttagcattacagctttgtgggtggataaagaaaggaacggatgtagatgtagggccatttttgaactcccttgtgcaagaaggagaatgggaaagagctgctgctgtggctttgttcaacttggatattcggcgagcaatccaaatcctgaatgaaggggcgtcttcagaaaaaggtattaggttatatgctctgagaatttgcagttcatagaattttgtcaagaaaggatgtggataattttcagttatctaatcaacatctttttcattcaaagggaaagtatattatagtcttgagcagtaaatactagccaatcccatttctatatgccttgggataggtcaataaaaacaaacatatcttaaatgacatcttaacaataatatacgaagttgtctagcatgtatgcccttgttttctttttaaagaccgaccatatacattaaagaataaatattggaactgctttcatttgtaagcactctgactacaaacagctggatatattctagtgtatgcgttctcctttggtaggagactaaatgatatttttgcatagaccagtgtagattcttatgaaaagcatattttgacctgga

SEQ ID NO: 30950 - DNA, 1812 bp, Mus musculus
taagtctgcctgcctctgcctcccaagttctgggactaaaggtgtgtgccaccactgcccggctctaacctgaactcttgatatttcctcatcaccgagggactgtgagcaagccattttggtatattagtgtataaactaaaactgttcattttccagtaactttctcttaaaagttcaccttggtgattgttttaatttgatgctactaatgcatgttttgctgtgggttttaattcctatacttaacccagtgtcattttgaaagttggtgcataaatatatttgtgtgtataaatcttggattcctaacgattctttcacctttttcagggaccatgcagagtgtcctgtatctgcatgcacgtgtaaatgtatgcagttggatacaacaggaaatctggtgccagcagagactgtccagccatgaaatgttccacctaaagaaaaatcttcacatgtggagtttttaaaggatgtccttcatagttcaggaaataaagtcactcatggctttgctgtcgtggaaaaataaagcattctgtcagctcagcaatgtgatgtttgagtgactttgacgtactcctcagaggccaacgctgctgataggaacattagaacatgaatattggtgctgtttagtaggttaaagttcatttgaaagaactgtctaggcttttgtcaaaattatgtttatagatggttttagaataaaaacaggccttgtgcctgcatcttcaatctgaaattgatatcttttgataaaatctgtacatatctaaaaccaaatgccaattcattgtttcatatatcaatttaagcttattcatgcttaaatatgctttcagagaaaatgtcaattttacattggtaattagctcctggcccatgctggagaatacatgcatgtgtgcatatgtgcacacacacgtttaaggaacgttctccctcatacatttatattttaatataaaagatttgacataggtcattcttgtcttcctcaaaactccaagttaaaagcaggctggtgagctggttcagcatgcgaggaggcttgcagccaatcctgatgacctaagtgcggtcccatgtgttggaagcagtgattcaactcatctccagaaccttgctgcagcatggggcgagcacgtacacatgtgcgcgctcgtgagcactcgagcacacgcagacaataaataaaaaaaatttaaaacgataaactttgaaacttttttcttttcaaaaaagaactgtgtgaaaatttcaggaaaacatgataataactttttcagtttcagttttttctttacagtgtgctgatttgtctctggctatcatctttacttaccattctcagcaccaccaggtacttctgagtatgaaatctatgcaagatcatatgtgggacaccatttgtggtgctgtcagacaccttcctattttggagtctcatctttttccaaggtagactacatggtgttggccaaaacaagggcattcctgcagtcacctttagatataagtcgctaaaagtgtgtgtattggggccaattcaagggctttgtttccatttttgtttgttccattttgttcataagtggacatagtaccacgcttctttgttgcacattgtgtgtagaagggaactggattttgtgcttgaagttataagtgtgaggcggctcctggtccctaggttttggagaggtatctgcagctgcccagacagcatgaagagcaccatgtccaaagactgaagacccagtggacgagactgaattgtaaccttgcttccttaagacctcacgg

SEQ ID NO: 30951 - DNA, 1226 bp, Mus musculus
gtatgatttcactcttgaaaattcagtcctctgtgatttgtagtctttgtgtctatgcataccctagcagctttaaaggaaatgaggctgcccattttattgaacctgtgtgatgttctttgtcatttcactggtggcggccttgaggcaagcaaggatcataaaataaataaaatagcatcatattcatggttttatcttcaaaatcaagtgaatttatataaaaattaaagtcaatttaatgaatggaactgactttgggaaaaaatatggattcagaccactcatatttccccatgtgataaaagtccaattgtggagagtatatgagaggcacagggtgtttttgctgacacaacagtgaaagagaaacaagaacttccctcgctcagttaccaaggctcagcaacctgagcatggagcgggtgtgaagggcctgggttcagaggaggctatggtcctatgcagttactctcacagtgtttatgaatgaggtcagacaaaccactagggaaaattgaaacctcttcgaaacaccagcccttctttgctgattcaagactaagggagatgctttggttttcttagactcatgtggccctctccaccctcctgaaggatcgctgtgtccttctttattctcatccctgctgagtgtgttgaagccctttctagagaactgtcctgtgggtccttcctgaccacgtgtgttcccagctcgtgggtctgcttctgctttcacctcttctgcttcctagatcactgctgataagccctggttagaagtgtgttggccgcagtacagtggcagggtttgactgttaaacacacccagttgaatgatgctccaattagtgtgtaggcagacacccagataggactagaatgcccactgtttattccaagtaaagctgagcaggattgctgtcggtcagtacacgactaagagagttggtctagagtaacagggccatttccttgccgtgaaaattttaagtcatttcttttgattagttataatttattaattctgtgccaaaggtttttaagtatattttttcacaaagagagagtatcaggaaaactaaacactgtgcagaaaagtacaagagtttttctaatttttatgtgctctgcatactcatttaataaatgtggtgtggtcttcataaaacatactgtgtgatttaaagttaaagggacatttgtgatgacaaaattatact

SEQ ID NO: 30952 - DNA, 1105 bp, Mus musculus
gccattttaataaacactggacctccctgttgaaggaacccacacaaaaataaaagcttgaatgaggagaaaagggtagcctgaaatggcaatcccatcttcttgtctaaataagagatacaggtgatgattaatctaaacaaatagaagggtcagcaaattatatgcaattgagtttaactctttggatttcagtaaggtctatggtaaacaagagcagtcagtgaactgattctttaaaaaataatacttggcatttgcatatcatcttacgtgtcacatgactgggtttgctccgcacccgggtatgtgaagagggcaggcaggtcttattgaccccatttcacagatgagcaaggagaagctgcaagcagtccagaggacttctttccatggatagtactacctctatatcctggtgccggccctttctgatgaaaacttacctctttgttcaaataagggcagagcctccatacaatccaatgttaactgaagatgtgtcctaaaactgtaagaagcatgctactgacaagtctttatggaatttaagcaaagatcctttattctctgtcattaaagtctgaagtaaattaggaagagcgcagatcatacatggtcagttgtgtgtcagaacacaacccgtgcccttgtcaggggctccctcagctttgttcagagctcagttctcagaatcaatgagttctggatttgggccatgccatttatgtttttccaaaagccattttctcacatgagctaaggttcttgaagctgctctgtgccctctactagctcgatgcactccccaatgcttccatccaactgctccctcagaatgacaggagcctggtatagttgtaccctgaaaggctctctgccaagagccttaacattacggatgcgtgcagatgcttgcagccaaccatcgaactaagcatggggaccccaatggaggagttaggggaaggtaggagctgacgggggttacaaccccataggaagaacaacaatatcaaccaaccagaccccccagagctcccagggactaaaccaccaaccaaagagtatacatggagagatccctggctccagctgcatatac

SEQ ID NO: 30953 - DNA, 1739 bp, Mus musculus
ctcagatccatcaaacagaccacagccctcccttgccaaaactccaatcaattctatcttagtatctaagatagacatcctgtttgtttttcataagtcaatcttggcacttttatgaacaattagttcctctattcacaaaaggcatcataattatttttactttcttaaagtttgagggttttttggtttttgttttaagtagccaagatctacagttgatcttctaaaaggtcacgatcttagtaagttctttttagttacaggcaaaggacccactttacagttggcttttaggatcttgccattcaaacagtctttgttgttatggtaagcacacagacactttgtacaatattcaaattgacagctttcccgtttgcagactgctcgctctaaatagtggtcatattttgcagggaaattatagcaagcacaggctttgaggcttcccttgttcttcaatgtctgccacctccacgaacttgttgtgccagctgtaggtagaacctttctgaccacgctgactggaggacttgacctgaacatctttttttgggaggtgcccaggtcgacgatgactttgaacagaagttagtgcaggtctgcccacaacatgtcctctcgttgcagcatgtagtgacaacttactgctttcaatgactctgcatggttttgctgtagagctggaccgctcccttattgttttccagtatcttcttccaaattctgctcactttagacaggtttattaagtccgtgccccgagcttcatcacaatgttagccaacaggtgcacgaatcccctccgggagagctcagccaggagatctaggtgttccaggcccattttcttgccaattatactttgcagtctaaagttgccgctggtgataacttccttcagcatttctcgatccactttagggtttcgcttgccattcttttttagtgttgagcaaaccactctttgacaatgcaggacaggcagcaggttttgttgggatgctggtccaggctctgtgatggcagcaggcgggcctggggactgtttctgaaattctccaggataaggatgccgtcgtcacggtcactttgtgtaaaagatgagtagccactgtcctcatacagtctactggcctctagctcttctgtttcgtttgaactatctagtgtgttttgtacacgttgattctccttgctatcatgacccacaattggtgactcgatgaaagacaacctctcatggtttctaacacagtccttacaggaaggtttcaaacacacgggactgtaggaaccttctctcccactgtcctcaggcttcaaccacttcaagctcagaaagatcagggttgcaattaaaacacttcattgtaacagaaagaacagggctttcttctttatgtccacggtcgtccacgcgccaagacggcagggacagaacgacggccggcgcagatcactgcaggtgtgcctgctcatgcgggaaaactcgggctccagtgcaggggaggtggcggcgaccataggaaagaggtggccggccctccatttaacttctaatatctgggttagcattacatgatgtgttgatcttatgctcagcatttgtctaagatgcaatagtatcattatcaatttcagaaatatggactgaatatgcttttttggtgatgaaatctatgtacgatatttatagtgatgtgcttttattttctcatgagaaactaaatatt

SEQ ID NO: 30954 - DNA, 1284 bp, Mus musculus
acctcagaacccacctccagtgactcatttcctccagcaaggccacacctaatcctttaatcctatcagaggtcattcctcggtaactaagtattcaaatatatgaccgtatgtggatcattcttgtgcaatccagcagttccttaaccaaggcgaaaagtctatatatttaccttctgttagagattcctgaatataaataatctagatgaactagaagcttaaaaggatagaagtatgtatccgaaggaattaatagttactcattttgcagtggattctctctattggtctagctagtagaatatacttaagcttcaggttggatgcctagttacctcaccaaaactatcctgaaagactgcaattttagataaagtaaatttttgtgaattaagtttacatcatgaaatattctaaaattttttatttataagttgttattgagaaagttgcatcatcaaattctaaaatttctgtgccatgtcagtttttggcaatataaaatgttttttgttttgttttgtttttaagttctactctgtgaatgtggactacagcaaactgaagaaagaaggcccagacttctaaactatgaagttcactgtaaagctgctgataatgaaggtctttcagaagccatccgcacaattttccacttaagcaggaaatatgtctctgaatgcatgaaatcatgttgattttttttttttttggagtttattacactgatgaataaatctctgaaacttgatgcgtgtcactatttaatgctgaaaattcatgtgggatttgatagctaggatataagaactaaagtattaggatgtaaagaatctcttgaatttctcttaatacatttgaaagtgagactttatgctgctttaataagtgtgtgtgtgtgtgtatgtaggcccatacttggtgacttcaaactggaaactaaagggcaaccgagaagaatattcatgcctttgttcaatgatgaacaaaatagaaagctgtgcatttctgttattggctggaattgaaacacagttaaccttctttaccttgacattactttcagggttattcactcactagtactagcataagataaactcagtctgtcactgctattagccaaaaggtggtgagactttctattgtgtggctttggcagatgttccaaggttagaaagtaatcagtgactttaaaattgggtctttgagttctacttagggtggcgaatggtgagtgagtattttgatgtttcccaatgtatacttcaggcccctggg

SEQ ID NO: 30955 - DNA, 1134 bp, Mus musculus
aaagttaatcttaaagaaaagaacttacaggaggtgagattacacagggaaatatatttatatgtaaaagctaagcaaagggtctaaatggagaagaaaagggcgcatgtaaagagaggaggggaaccaggcagagtacagggaagcaactgagaactcagtataatgtatgaagattctcgggcaaaccccaatggcctgtatgccaatctaaaaattaataaatacacagttgcctaaaaatgaaacattgtctacagatctccctgcactctaaaacatattttatgtcatatattctataagatgtttataaatatatacaaaaggactaaattgaacctgttgtatttaaattcaatagagacaattccactatactttaaatggtaccagttttaaaacataattaaaaaaatgctataccaaacatgtgatcaatgttttatttgaaagtttagctcttaagattctcaaatgtagggctggtgagatggctcagtgggtaaaagcacctgactgctcttccgaaggtccagagttcgaatcccagcaaccacatggtggctcacagccatcggtaatgagatctgactccctcttctggagtgtatgaggacagctacagtgtacttacatataataaaaataaataaatcttaaaaaaaatcttcatttaaaaaaaatctcaaatgtttgtacaatattccaaaactgttttgaataggacttacagcaaattttttctacaaaatgtgcaaagagataactaactagtaagtcagacatcccaagcacacacacttcttcagcagtatgtaacaagaactgtgaatgctttgtattcattggatcctgtgcttgatttacttgtacatacttgctctatggaaacacagatggtttttcaagagaaagggttaatattttcctacttaaaatttgataaattttgccaaaatccttacatattaactgcaaacatcaaatgacatctatcattaagcataaaagaaccttatatgacaaattcttatactaagccaaaaatataaggttgtagttatcaaaacagtattccaagagccaaactcttctacaatttcttcctcaatgagaaagaaatatttcctc

SEQ ID NO: 30956 - DNA, 1214 bp, Mus musculus
catgacttttatcatgaaggggtgttggattttgtcaaatgctttctcagcatcttaacgagatgatcatgtggtttttgtctttgtctttgtttatatagtggattacgttgatgatttctgtatattaaaccatccctgcatccctggaatgaaagctacttggtcaggatgtatgattgttttgatgtgttcttggattcagttagtgagaattttattgagtatttttgcaccgatattcataagagaaattggtctgaagttctctatctttgttgggtctttttgtggtttaggtatcagagtaattgtggtttcatagaatgagttgggtagagtacattctgcttctattttctggaatagtttgtgcagacctggaattatatcttctttgaaggtctggtagaactctgcactaaacccatttggtcctgagctttttttggtttggagactattaataactgcttctatttctttaggtgatataggactgtttagaccattaacctgatcctgatttaactttggtacctggtatctgtctaggaagttgtccatttcatccaggttttctagttttgttgagtatagccttttgtagtagggtctgatgatgatttggatttcctcaggttctgttgttatgtctccttttttgttttttattttgttaattaggacactgtccctgtgccctctagttagtctggctaagggtttatctatcttgttgattttctcaaagaaccagctcctggtttggttgattctttgaatagttcttttggtttaacttggttgatttcatccctgagtttgattattaactcccttctactcctcttgggtgaatttgcttcctctagttctagagcttctaggtgtgctgtcaggctgctagtgtgtgctctctctagtttctttttggagctactcagggctatgaattttcctcttaggactgcctgcatgtatcccataagtttgggtatgttgtggcttcattttcattaaattctaaaaagtctttaatttctttctttatttcatccttgaccaaggaatcattgagtagagtgttgttcagtttccacatgaatgttggctttctgttatttatgttgttattgaagatcagccttagtccatggtgatctgataggatgcatgggataatttcaatatttttgtatttatggaggcct

SEQ ID NO: 30957 - DNA, 1155 bp, Mus musculus
tttggaaatacattttctccacttattaatgtgctagacatgcttatgttctaaattgagatataaataacagtgagtatggatcttgagcaagagaattcattttctcttgagaataaattggtaatgctttatgtagagattctgccgaaatatttgttctgagtaccttgtactgagattattatgtttatctctagaccacagtttctaaagacccttcgcatatcataaaagttgaagtttactcacattggtgattatagagtacgattggcaacaactttcatagcacttcctcattgctttccaaaatgaatgtgttaaatgcttctctgttatgaaataaagaaaggtgaaaagatggcctagatagagtttattttttgtttggtttccttctttgtttgttttgtttcgtacttttaaaattttttaagtcaaacatgataccttccaggaacctcagctgacgctgctcagtggctactcctcaagcttcaaagactttgtatctctggctaaaagaagaaactactcaaagtgatcgggggaggcgggcatggatggaaagcaaaaggtgctcatttaaaagagtgtctagtctttcagggtccactgacacacagtgtggaacagtgtgacacacagtgtggaagggagttttttctgagttcttttagaaatgatgtttaataaatctatagtcaattaactggggacaaagaaagtaaacatttcaaaaggaataaaaaaatgataaaacacatatttgtattgtatgatttaaaacatttactattaaaatggcgtcatgtatgtcagtcactaagaatataacttctgtttgtgttacttcataaaaggcattgagttgtaaagttaataggtttgtttttttgagaagattaggaggaagtaaaaattctagtgaagaaataaaaggataagaactgctctatagattaagtcctatcacaagttaaatttctttcaactttgagaattacccctgaatagttgtcttcccattatgatttttgaagactgtcagtggtgatatcagaagcataagtatgacttagttgtattcataaaactatgacttttttttaaatgatagccgcatataattaacaaaactcaatgaaagga

SEQ ID NO: 30958 - DNA, 1178 bp, Mus musculus
ttctcatcctttacagctgctgttgtgcaggctgttaagctcgcagtgtttaattaatggatagataccattagagagacagctggacctgcatccaaatgagcttggattcaaggtgccacaagataaagatctgaaagtggagaagctgggctgcgattgggttcatttataaaagaggctgttaaaggtcaactgtgttttcttgtgtgagagataaagagatgctattaaaaacaattggaaagtaattcataagggaccaggaagtcactcatggtaaattaatttgtctctctgatagcatggcactcatgatggcaaagtaaatttgcctaaaatcaagctctctcaaaaacagccattgatcatgtctctccttttaaaaagccactggagtaagctcccgtgtgccaggtctgctggagctgtctgatcccagcacactcctagctctttacaaccacttttcaggctgagaattaaccaattatttcagaggaccataagtgcagtggcatttctctggccatgctgagctgcctcgcctgctgatgcttcctgtcacctctgatgaactaatcgctaagcacccgaacatctcatcctgcacacagttttgctttcctgacattcaacaacaccctggcatgttccaccccactgctccctcatttgaaacctccctctgccctgtcccccttccagtattccacaggttcaaacatgtacataccaagacaaacgtgttttaatttatccagaaaatgtatctacaattacaactggcagtttctttaactccctggaacatgatacgttttctttgcatcacctcccctgggtaaattcctccattcatgcaccatgaattccctttctcctccctagtgtctggacgctagcatgagacgtgacaaagggcagtgcttttcatgctcagtaaggacagaccattatgacacatcttcctcttcctctaggcaaggaggaggctgtcggtggtttgcagccagtcatgaatacgaaaatgggaaaaagcattatatcagcctgtgatctttgctgacttaaaccgggggtggctgtgttctctctgctaaaaactgttactctttttcctttgagttgaaaactatttgggatcgccctcctctgcctctgcctctgcctctgcc

SEQ ID NO: 30959 - DNA, 1110 bp, Mus musculus
aattgaaattaagaaacctataaaatatcagtaggttccgctacatgttggatctgacataacatagatgcacagtaaaacatttcgatgctctactttttatattaattatatagatgcttttcccagcaattaggtatcatcaattttatgaatgttttagggaagaaaaccatttctttctagaaattagtcaaggaataatttcattgaacactggtgactacatcaaaataaaacctatagtttgcttaaaaaatttaatcattacccatcatcctgagtcgatgcttctagcagttacagtaaacatttattttttaattttgtctaacatggttttcaaatatgatggacgtattcatcttgttgctttatatttccagtgtcatttttgaccaagtattttccttattcacccagcaaatttccagtgcattctgttttcttatgtcagaagttgggttttccgtttcccatacccaagtgcttccgttggttgtgatgtgtgctctgttcctcagcctggctctcaagtggaaagcagaaactctaacggcttcaccctgcccttgaagcactcgtcatctttccttagcagtcacctgcattcgctgtatgagggagctttggggtcacccgtggtctgtgtgtggccacccttcccgtacacccagagcaccctctgcagtcattcacgctctagtcaagctgggctttgtttgtttggtttttcttttctgtgcttgctggtcacctccattcttgaagctgcacagttggctggttgtgcttacatttttcaaatcaacctcatttcattatatgcagtctctcctttttatgtaactgtctgtgagtcatttgtttcatttcatttgttttgtctagaaatgtctactcctgttacttaaaagttaccactgtctttagtttggctactcagctgaacactagccataaatacgtgtgaggtgtgcaaaatcatcatccatccatctctgcagaatcgccctttacctaggcctcatgtagtagccactttctctgccccttccatgtgtatttcagtccaggagagcactgtgttctgccagagttcgtggacaa

SEQ ID NO: 30960 - DNA, 1319 bp, Mus musculus
tgaagtaattcttttttcttaaaacctattaaaagagtaaaatataactgacttcagatcttataatttgcacttaggaaatggtggtgaagtgtaaaaggatgtgggaggttgacatccaaacaccgtctaagtaacattaggacaattggaacttggccctaatgggccttgtggtttttagcctactatggaataattttggctattatgttggcaggtgtgccgacttttccattctgccttttaaagtgcttaaatcaactggttgttaacacattgcgtcttattttagaagatagtttcattcatatgtttttaaaataggagtaccttttacattttcaaatacatttttgtcttctttgataagtaataagagctaaacatttagccattggtttataatcaaatggtaaaccgtgatgcctgagacactaaaatgccatagctgcttggctcaaagtgtgtcttagagtgggcagccttattcctctgactttgtgaaactagattttaaatgaaacatttatctttaactttctaaagaaaattagtacatatcttagaaagctgaataaaaaaaatcactatttcttcaaagttgtaattttagattaaaataaatgtatttgtgatatacttacttggctcaaaaatttaacttctatatcaaagacctatttacattacagtcttcattcacagtttctggttgcaactactttgtgtggtttttagcttgcttagagaacaggtttcacagaagagctctgacgcttatctttaaattcgataaaagcaacagcaatgggattactgtaggaacacaaatagaatttccatgttttaagctgttcttgttcctttttacatgtgttaacacagactccaagctgaagatacagtgtggttggggttcaaccctcaaagcagtgcatagacaacgtagcaatattatgaggagcttcatagttaagtcttaactattctagaaggaagttgttgccttctgtttaattacattcatgaaatgtgtttaagtgaaatattttcaggatattttgtatgctgtaaaacaaaaaaggaattgtattgtgccaatggccaaaggtaatattactaccatgtagatgatgacagttcaaattgtcccacgtcacccagaagtttagaaactagaagtctgggagacaccacatcagttgtattgggtgattcttaagtgctgtacacgctattcatcttgtcaatgtccagcacaagaaggagcgatgccaggcaagctgcaaagatgcagaatttcatgacgcaggctg

SEQ ID NO: 30961 - DNA, 1969 bp, Mus musculus
gatattgaagaagctgacccgccacagctgggtgactttactagagactgggtagaatacaactgtaactccacaaacaacatctgctggactgagaaggggcgcacagtgagggccgtgtatggcgtgtcaaagcgctggagcgactacacgctgcacctgccgacaggaagcgatgtggccaagcactggatgttacacttccctcgggttacgtatccgttagtgcacttggccaactggttatgtggcctgaacctcttttgggtctgcaaagcttgttttaggtgcttgaaaaggttaaaaatgagttggtttcttcctacagtgctggacacaggacaaggctttaaacttgtcaaatcttaatgtggacatcaaggaaggctattattgagagttcatgttaccatttatcagtaacttgccattttttgtatgctgtatttttatttgtggaaagtatcttgctacatttgtagctgttctcactttgtcttttcttaagtaattatgggatgtggaagatattgggaatatgcatgattttatactaaaagtatatggagggtcatgaaaatgctgaatgtaaatgtgtaagagatgttaaaagtaacagtgcactttcaaataactttccatttgtctccaatgaaaagaaacacagttgtctgtgctctggagtggccaatggacaattcctaatgccttattttctaggcacccgttagagaatgtagaccagacaagtgtgttttaagagaactaccagtttacttagtaggagattctttcatgtgtgtgattcatataggtttggccccaggactgtttgcagaagtataaatacttggagcaggaagagacctgctcataatgactgcaaaatgcccttttaccaccacacccagatgtcttggctatgacctttacagtacagcagaaaagccccaactgcctttgagatgaaagcattgttaatgtaggtaacaataagagcttacatgctacaaagtgttccttcatggttagtgagggactttgaaaatactggtaaatttaagagtccttctcagggtaattttgttttcttaatgagtagtatttccagctacaaattcctttcaagtaaattgccattcttttcaaaaagtacacacttacaaaaataaatgtatcagtttctcattgaccgattcttcctgtcttacgtatttatgaggagttagtactctgccatgaaagttgcttttcagtcctattgtaataacttttttctgctgaaggtcaaggatgggaacagatcattttgttgttgttgttgttatatacctgtattgtattatgtaaaaaagtattcattttggcagttttaggtaagcataatggtatggttgtaatttgtaaactttaattcagtgttttgttggagtaaagtaggcgctgatcaggatatctccttaagaggtaagtcacttcctgtccccttccaattatccttacattctagattttcatctttgaaagagggaggtataattaaagtggagattagactttgttaccatggtgacttctcaccgttgaagccatttttccatgcccagagagggaaggtaacggatgcatctaccattttctaccaatgacttgaaaactgacattttatttagaaagaagtcacaccatcagggaacttgtatactgttatctatgcagcattgctacagcctatttctatgttttgaatattgtactcttaatactttgaataatattttgttaaaaattaatttttcatttaatgtgaaattaagagttcctgaatattttactgtattaaaagtggaagttatacaaaatgcctttgcttttagagtttatgtttggtggcatgttgatttgaaaatatttccttattccagaatactgaagaattgatacaatattgaaagttagtggcatccta

SEQ ID NO: 30962 - DNA, 1105 bp, Mus musculus
gaattcttactctgccttctttgtttttgtttttgttgttgttgttttgttttgtttttttctacagagtgtgtataagtgtgacttcctgaacctgcagctgcagcagccactccagcttgcacaagatgctatagatgcttttctgaagcagctgagaaatcctattgatgctcttccgggggaactttttcatgtggttgtcttctctctccttctttcctattttccatcaccctaccagcgatggatttgctgcaagaaagcccatgagctgttagtcctgaacggcttattgctcatcatcactcccgattcctcccatcagaaccggcacgctatgatgatgaagagctggaagattgctatagaatccctgggttttaagcgcttcaagtattcaaaattttctcatatgcatctcatggcttttagaaaaacctcccttaaaaccacaagtgacttggttagcaggaactatccagggatgttgtatattcctcaagatttcaacagtgtagaagaggaggagtattctaacacttcctgctatgtccgatcagatctagaagatgaacaactcgcatacggtttcacggagctccccgaagctccttatgattccgattctggagaaagccaagccagctctattccattttatgagttagaggatcccatcttacttttaagctaatgtaaaagcaaaaagcccttccattccagattcctaaactaaatgcttacactaatcagaatactaacatgaactcagtatttaaagcctggtttgcatagaagaaatgcaaacgtttacagagtttgctattttttctacttctggatttcaaaatttattcttatataggaagcttaaagtttcatgcagagtgactctgtcttagcagaaaccactgttactttagcattttgcattaagattcaaaaggtaccttttctctctttagtgctgttgtaaagcctaatgtactatgtatttccctcttcagtttagtgttgactttacacccttgtcatgaggaacctcaagatgtgtagaaagctgtagattgcactttgatgactcacaagttgaatatttcac

SEQ ID NO: 30963 - DNA, 1176 bp, Mus musculus
aattagggcacggcattctgaatgacatttagggtagcggttcctggtgacagagaaagaaaggaactgttcagctttgattcagtgttaaccatttgctaatcagcacttccacagatgtgctcaagtaccttgtgtgacataaaatgtctcatgctttgtactaggtatggctggcattgccaagttccatgctgtaggtacctggaaagcttgagttttgatgtttttcaaatcatagtctatctaccattagttctgaaaccgctaaattaatgaacagcagaaagaacagatccaaggagagagggcagagcagtgggcatgtaaacagtggatctgggccagaccaaggaaagagttttgaaaaatggctcaaccagatggtgggagaaccatggatttcctccctctctttagtctgaatcctgtaagaagtgttcgtgggatgtggaaacagtctggctttgattctctactgtttactagccatgtgtgtgatattgggaaatttagatcctctttttgagtttcatatagggtattacggcgttgccttattttaacttaattaataggggggagagagattggagacgcactattgaaaggtcaatcccttcactgcctcccacccaaataaaaaagccaattggccttgtaacaagagccggtcgaactccttctccctgtttcccacctatcttccaaaaatgcggaggaatatcaacttagtgctattttcacatctttcagtcaaacttagccagagttccatcgccctacttaaaattcaactagaaagttacctaccaagtactaattagcattataaagtcagagtctgcagctccaggcctttcagttgtttactagaaaggacagtcttaagccagatacagtttaccataagaaaggttaaaaaatcccagtgaagcaagttttttctttagccctagattccaggcataactattgagcatagataattttcccccctcaggccagctttttctttttttttttattttgttaataatagggaggagatgtagtctcccctcccccagcctgaaacctgcttgctcggggtggagcttcctgctcattcgttctgccacgcccactgctggaacctgaggagccacacacgtgcacctttctactggaccagag

SEQ ID NO: 30964 - DNA, 1155 bp, Mus musculus
cctattttaaagaggaagctagagtcagtgagaaacgaacagcaaggacagaaattggtaacgagtacagaaaacactccctaacagttccttcaaaaagagactactagatttaaagttagttctcacacacagattgctaaatgaaaccaagccgagaagcaaattcatcccaagatctaacataaagatctggaattccttcgccctgggagggtgcaaatttgttgggttgtgcaagtacactaggagaatcaatcctggaatccccgggagcggagtttgtaccttaccggaccgaaagcagccattacaggaatggagagcagggcggtgtcgccagactacatttcccacaagccctgctgcctactcccgtcatgcacagcgcgctctgggatccctgactgagggatagaccacaggctgcttgttgttcgggtttcacaagtttgccctctggttttactgttaaagagagggtgagtgttcaagaaaaggtttagtgaattcgtaggactaacgaaacaacaatacgtgttttctgccctgtaaaggaattctagccgcatgaatatgtcttgttagtactctgaaataaggaagtaaccgtgggagagggtagctgagggaagccatctgtttgggaatgtttcaaacctggggccttccaacatttctgcagcagaaaatccccgttatcattttccaaatgtgcctaatgacatttgctaattttttaaaactaacggggaaaataagcacatttaatcagaaagtttggaaaatattgaatcatttgtggtgcaaatcaggtttagaaaatatggtttcagccctatacacagatcttttccgattcgaattcttgtctttttcagaatgttcactctccacagcctcccaatattttaagatgccaagtttagtactcaaaaccattataagtattattcacatgcatctgtaagcattaactttgaaaagttcttgaagtcttgttacctgggatatccatactaaatgttccttctggcccgagcactttcatacttactgacaatttgtcatcttctcattgtaagttactcacggtgctgagttagaggtgcccggacttgtcctgataaaaatcatgcgaatactgtgggcaca

SEQ ID NO: 30965 - DNA, 1747 bp, Mus musculus
cttcctttcgccggatgtatgtggtttaatatgtgaagttttgactgtctaattggttttttgaaacttcttcatagatgacaataattggaagacattttgacacacacagcctaaaatgttaaatgtcttctttctcttgacatgtctgttttcgctaaccattctgagcagctctttgctctaaacacaacattgctcagtatgtatttaagccagatcactttgatgtttatctattggaggttaaaagcaaacttttttttaattctaagtaagcacaaacattgggcagagccgtaaacagatgtgggactctccgtgttggtctcctctgggcttttcagctctcttgttctgccagagtgctctgaagaagatcacattgctctcatccagagcggcaggaagtgtaatggaagcaagcaggatgggagctgtaaaggatgaaccaggtttcaaagcatgctggcttcaagactgtaaaggcaagaggccataggaacatacagaagtgaataacaggttacagaagaaggcctggaggaagatatggcactgtggatgctctaggaccagctacttgaatttaaggaaatgttgaaggtacacagcctagactgtcagtgctttggacaagtgaaaaggatttgccttgtatatcgcagcaacacagctttcttagaactgtaaaatctcaactaatgcaaatacgcactttcctacatgtaatttaagtgttataaattttaatgaaaacataataccttgttaacataactatattttaccaaaaaatgtagaacactttttaacaacgttcatttaaatgagctggttttttttccttttttttaagattaaaaaaatcccagtattccttggggtttttccaaagctgccttatatttggaaagactcggttctttatcatgcaggggtgggggggggcggggttctatttattttcattggcttgtagtcctagccatgttgtctttcataaggaggtgagttttggatccactacaggaggacttccgacgtccaacaccatccaccaggtatcaggattccaactgtgtgtgaaattatgccaagtgacaggttataaagatactaaagtacgaagaagaggggctgcaatgagactaattctacagtgatggagtcagctcatgtggaggggagagtttggattcacacacaccctcccgtgggcgttttccctttctctccagattttaaaatttggttatattgactgattccttgtaggctcttgagagtatgttgttgttagtggttctttctagttccagatgaatattagattgttagaaataatgcaatcttaagaagccattagccagcctaggcctttaggagacttaaactttttttctttttcatgaagaatggcgacatcaccagtgtctttcctttgaaagttagcttagcttataattaaattattattttaaatattctttgaaaaagaaaagctaatccgtctcctttctagtgcaatttccacgtgcatacactttaaatacgatgctaatgtacagctgccttcctcctcgtctttgaaacagaagctttgattcgctgcgtcaaatataatggcaaccttagtatttccacatacccaatgctagtgtgtgcttatatcataggatgaagaagtgccatctgtttatggataagcctcctaatgattgttaaaatatttgcctcattatcc

SEQ ID NO: 30966 - DNA, 1122 bp, Mus musculus
gaatttaggttgctgggcttgtgtgacaggcctttttcctactgagccatctccctagccacataaaacaatttgatactctatcttgataccttttattagctttctttatttcatcaaaatcagccaactccttcgaaagaaaatgtaaacagaaattgtgacatgtcaaatgctcagcattccagcagagaatgaatgctttttaatttgaaaaggaattaaacaatgtcaactactaaattagagttcatctctcattaagaataaaccagctagaataattttacaaattgacatactgataattattagctacatgttaaagcagctgaagagtacaaccttatgtttctctaaagtattcataaaaatttcaaagttactttcatggccatgagtagtcaatatcagcatccactatagtctctccccccaaatcttttatttgaagaacaaaccccgctattcaactagagcaaatacattgcctccaaagtactaagaaacttgagaaataatactgaaccaaactggtatacatcaacacaagaatcaacaacagttcatgattagttataaggcaccttacattatatagtatgtcttaattatctctgattgcctcagcttttcttcttcctgtatcactgatttcatcaggaacagctaaggagttgttggttttgagattgcaaagactttcctccttgctaattctgtgcaatcagcacgagcagtaaccgattctcagactcaggttcacttgtcacctgaaaccaaataaagcgtttactttcatcagttggtacagcccagtcatgtgatagtgttaacttccttttcagtagacttaattcctagggaattgggagacagtatgagcttgaaaagaagttttatcttcttcagttccaaggacagttctcaggtctggtgtgagaaagctcttggggtttttattggctgagacttcttcgagggatcatggtagtgaaacggtggttggcatggtaacagatcattttgtattccttaatgtgattccttacctcacctttgctctaccttattactaatatcatgagttcatgaagcactaaagtcttctctcatgctttg

SEQ ID NO: 30967 - DNA, 1149 bp, Mus musculus
attctcataaaataaaacagataatatcatcttaaaataaaactatatgcattctttttaaaatactcccaacagaatatgaaaatgtatactgccaaagtcaaataaatgcctgtagtattagtaatgtcgtacggggaaaagagaaataggtcagaaaattttaattctataatggggaacacagcacttgatgacataagctagaatggaaggatggatgaatgaatgaatgaatgaatgaatgatgtttgccagattagaaaaaaaaacattgcaagtaaaatgaacttttgcaacgtatctgtagtagagacactagatgtagagttttagatctaaagggcagttgtcatttcctggaatgtatgagtgacatgtcctagagaaagaagggatgtgcaagatataacagcagctagagtggggagcctgggcatcaggctctctgcggagcagtcttgttcatggccagtcgtgatctttgaaaaatgtttgtgaacagtttgacaaggcagtatgtgaaaggggagaggtaactggaattcctggctgccattcaatcgtctaagtgaaagctgtgcagtgacaaaacaccaagctgtaatctctctggaaaccaggcagtagtgctgagcaagtaggagcagtgattcaccaacatggaagtgggcagcatagtgctcatgctccatacatctaactggtgttcttatgacaaacacgcgtgcaaggtagaagcatgcagaatgctggggaatatgttataaaaccttgtaatgtacagagctttatcacatgcttacttactgtattctcttttattgaggtggcttttcctaaataaagggtatttactaaattagttccacatacaggcagaagaaagacctaaaagggaaagaactgcattgggaagtattctgatgtaacaaggaagattcggctttaagcagattttggaagcccagagatcactaggcatgtactttgaatgcatatgccatgtcccaacataaatagatttttcaacattaacagaagtatctcagaagaaccactttgctaaatatgaaatgcaagctcaaggtgagtattgtgaagtatgttcattgttaagaatgctgtttgcaagtggaattatagaaa

SEQ ID NO: 30968 - DNA, 1150 bp, Mus musculus
tgtgatgttttatgggggaatgtatatgaacgtcccactcacttaaaagaataacttggggaaggacaatgaagcgggtgacgaataaaacaggaaatttcctgctatgatactttaggtggtatttatttatttatttatttaggtgtgagattgaggagtccgggacaaagaccacatgggttatagtcacactggctgggccttttggacatatacttcttacctataacctaatttttcaaagtcatataaagtaagggtgttgttctcctgtgtctctcttgcttacgtttatgaattctcatcccttctataggaaagaaacaacttggtctttgtgtgtgtgtgtgtgtgtgtgtgtgtgtgttctctgtaatacactttaaaagtgtttcaggaaccaccaaggactgcacatgcatcactggttaggtgtacttggtcattttctgctccctgctcaccccccaaattataggaaaatatgtcgtaactgcaaatgtggtcaagaagagcatgacgtcctcctgagcaatgaggaggaccggaaagtggggagactctttgaggacactaagtacaccaccctgatcgccaagctgaagtcagatggcattcccatgtacaaacgcaacgttatgatcttgaccaatccagtggctgccaagaagaacgtctccatcaacacagttacctatgagtgggctcccccagttcaaaaccaggctctggtaagtaatgggagggttgaagagagagagcctattattattttaaattattattattattattattgaatgttactagattatttagggcagctccttttgtgacatggccacccaccgccacacatcagttgtttgtcttgaatccccatttttttaattttggtacctattactactttttaaaccatgagtctactacattgccccacagacttttttctaactatctaatttatcctcttttagagaatgttctaaaaatgttagtagttacatgaaaatcagaaaaaaaaaaaccaatcatgtgttttatatccatctagctggttttcttgtagactcttaagatttttcttacgatgacaaaggataaataatgaatttcttgtctgcatttggaactgaacaaaaaa

SEQ ID NO: 30969 - DNA, 1319 bp, Mus musculus
tttaaccttatgaattttgtctgtcttaattttaaatgacttttcatgatttaaaaaaaaacagtaaagaattgtagcttttatttctatacattaattaaatctttgaattggaagcttgaatttaatcagtccttataactgcatactcctagtgccaaatttatattaagtgatagatatgaaatcacttaaaattagtgtcctgggagagatgaccattttaacttctatgcttatttcacatgggaaatgtaaaggaagttgcatgttgcctgacatgacgctgtgcacatagcctgcctcatcgatggatgacaaggtgacatcagctcggtgaatccttctggcagacagcgtggtccacgatgggcgttcctttgcctaagcctttgcatcccctggtgaggcagaggggcctctctcactgcatctctctctctgtttacctcacctccccatgttcgcttttgcatctagtgaccgccatctgtggccttgcatattttctatgtgtgtggctggaacaatatgtgcactttgctcttagagattattattttttgcccagaacataaaagtaggccattcatttagttatttttttttgaaacccaaagaatatgtataggttttggtacccagggaattgtaacttgtgctaatatcacctctctgccatgccttgactcaattttgcatgatttatggtgttaccagatggatcctctcttgtgctacctctgagcttgctgtagacacaaaggctattttctttgcctgtgcactcccatccttgggtgtttttaatgttttcccttgtatgcattcatacataactatgcactataaatattaaatggaatgacttatgttattgaaaataaagtctctttcactttaataattgtctttctatgtcctttttgtgagtgggaaaatccttctgcagttgagtgtcatgtacagcagggggcactgtctccaagagtaaaaatattcctgacaaaagtaaaggcagctgcagctagggcagacagattggatttgtctttgcagataaagagtgggtttcataaagactgaaaccaggactttttggtaattcttaagtcatgcaggagtctgttatttttttagttaaactttaaaaggagtcaagtgttgcatttttagttgttttgggaggattttttttttttttgagacggtgtctcactaggtagcccagactagtctacctcaaactctcagttctgtgtcagccttccaaatgttaagctttcaagtggtgtgccccattatgcctagctataaat

SEQ ID NO: 30970 - DNA, 2192 bp, Mus musculus
aaaaaatagagagatttaattttccttttttttgtttttaatttcagaatgaggtgcaaacagcaaaagaatttataaagattgtagaagctgcagaaaatgaataccaggtatgattttctaaagtatctgttcactgagggatgggtcttaagttctttaagtccattttgtgggttttttatttcactgttaaacagtgaggtgtgcttcttaaagagtattctgaaaatgtcctgtgttgtaagtagttgtttcctgatttaaacatctaaccactgtttcttgtagactgccatcagtgagaattatcagacgatgtcggacactaccttcaaagccttacgtcgacagttgccagtgacacgtactaagatcgactggaacaagatccttagctacaagattggcaaagagatgcagaatgcataaatgaaaattgcatgagcagattgttttagtgtcttcgcgttacaaaaattattgcaaaagtattctgagctgacagctgcccagtgaggtgggctgttgcatctaagatcactgtaattaagtagtgtggttagagcacagagcttagctaataacctgttccatttcctttgttcagagggttggacatgagtttagataagtatcttactctgttcctcctttcgaagtctctctctctctctctttctttctctctctctctgttccttctcctacaatgaagaggtgatccctctgggtcatgtctaaagggtttgaaatatctcaaaagtaccttctttactgtaaccctgaagttgtctttggcttgtgaaaggggcagcttttgatgttagcccaggtagttttagtggggtcagtcagtaatgggcactctagttaaggtggttgatggacttagccatgtatgctgctaaagaaattgtctaccttttcctttcacctcttccagcatggaagatggagattagagggagagcattttctaacgagttacgttaaaccttctcagcaaggttatttagctagcttagtgtctaactaaacttttttaaaacaaggccaaggtctgttgctgttttgagattctgaaattaaatgagaatacttatttcagaaatgcatttaatgcttttttcttgtgacagttatgcaaattagcttgaattccatatgttcctgagttatttttatcacaaagccacaagtgtattataaggcagattgtaatatatatataatcctgaactcatgaacatgtctcagttgattctccctccccttggattggaaactgaatatcagtgtgacattaaaatggcaacatttggtatttatttgagtaaaaaaaaaatcaccagtgaatcatacactattttaaaatactttctttgtatattgtcattcttaacaagttgtaaattagaaaatttgggagtccacatggtatgcaactgcatcttttgttctccattttcctatgcatcataagcatgtttgtaatactttaaaaatatatctactgccaccacaggaattcacgcctcggtgaatgttagcgtttactgtaaggagttggtggatttgtggtttcattcagtagctctgctgcttatactcgagtggaatccattcctcacgtactcctgcagacatctgggcctggaatttttttttttttaaacaccacttttactatgtataataaaatatttcattagcttgaattgtatagatttttaaaaattcaataagagcatgttgtttaatttctttttaaaatcactgttgggctttgaaagcattgcaaatatatgacattgtgacagttttggctaatttcctctttagcttttagtcttggcatcaggatttttaaggaaaatgaactgataacattaattctatgtctagatttttaaaacacgtacttaaattttgatgattctgaagtaaatactaaataagtaactaatttggtaagttgtgtgaattgggctagctagcatgggtttatatccatggcagccaattatttttactattttctagaatatacttttgaaaatgtatgcaactttttaaattggcatgtgaaacatgaaattcttccaaaatttcaggcatgccaaaacagtgattgtacaattttagagtcttaatattttgtttatatgaaagaagaatggagccatggg

SEQ ID NO: 30971 - DNA, 1159 bp, Mus musculus
aggacttgtagtttcttccatagtaaaacaggctgagttaatttgtagatgtggggcctgtttgtgacagttccaggtggcaaactcaattgcactaaggagtggtttggggattgcctgcgagggtctttccagaagagactgagaagtgagtgtgagcacatttgatggggaatgttcaccttcagtgtgtgtgagtaccattcaagaacctggagaccatagaactagagagaatgtactctccttctaccacagaagaggcattttgacctcttcttctgttgacattggccatgagaactccaggctttagactccaggacttggaccagtgccaccttcaggcctccagactccaactgtaggttgtaatctaagctccccttccctaccatgggtcattctttgaaattagcctgagcggcgctacctactctctggttctccaagactttcatggaacttctcatactatattcttcataagccaattccccagtcaaccaacccctccttcctctcctttctcttctccattctatactgggccttaagacatcaagattcagatcacctctgtgtttctcccagcaatggcctctagttacagcctgattgttacctagagggaactatgttgtgggttcctaccaccaattttactaccaccacctcatcatcatctatctaaaaatgatatgtagatggcatatagtattttgccgggcacttttgtcctcctgctccatactacctgtcatatatttctctggctgcccttcccagccaggcaacatgttcctattagcagatttttcagagattccattgatgtacgacctcttttgacacaccaattccatcagaccatcacaccactcatccttttctgaaagatgcagcaccaggaggctagtagtgggccattacagcataggcctactaggtatagggctttattcatgattttgccaatcactagtgggatgcttcttgaaagttgctaatggcccttgagctacacagtttattcatctgtactgtggattcctttgttcctattccaaagggacctggtatagactgaatgaaatatataccaatagtgctatgcatgacctgcacacgccacgcttttctctgccagtaaagtagg

SEQ ID NO: 30972 - DNA, 1248 bp, Mus musculus
atcatataatccaggctgtcctcttatttgctatgtagctatgaatggccttagatccctgatccttgagtttgttttctcacttctcctcggatcttagaaatacaaccatgcctgtctgctgagcaggttttaaaatcattgagtgtttctctcctgtataaatcttaatgttgcccttgctttcctcattcctccatgcacttgggagacatcacttggctagaatattaactactagtatcttaagctggggattacaaaaatgtgagagaagcctataagatggaaagctaattatagccgtagaggttcctcatataaagaagagaatgaaagtataacaacgtaaaaacagaattataggcctttaggcccaggcttgggaatgtggcctttgtaaaggtatgctaatcataaaagagatagcgacattcctctacccacccgcttcctgggttcaaagagtgctcattcaaagaaagtcaccctgaccattaccagaacctgcaatgcaaatgtgctattgttaggggctcttagaagctgtcttgagagttaacaattaccaggtattccttgtgactcttgtaactttacacttccttgtgacccttaactggtatctttggtatcttccaacaacgccctccccacttccttgagtttcggtttcttcctttaaataccccctttacccagctactcggggcgccacggtcctctacccctgcgtggtgtatgaccatgggcccgagagcgctcttgagtaaaaatcctcttgcaatttgcagcaagacccgtttcttgtgggtgattttggggtgtcgcctctcctgagtcagaacgtgggggagccctcacattatgggtctttcaagaacgttctaaagagaaggtattgctggatcctccggtagtactatgaaactcaagaaaaatgaagactgaagtgtggacactatgcccctccttagaattgggaacaaaacacccttggaaggagttacagagacaaagtttggagctgagacgaaaggatggaccatgtagagactgccatatccagggatccaccccataatcagcatccaaacgctgacaccattgcatacactagcaagattttatcgaaaggacccagatgtagctgtctcttgtgagactatgccggggcctagcaaacacagaagtggatgcccacagtcagctaatggatggatcacagggctcccaatggaggagcta

SEQ ID NO: 30973 - DNA, 1232 bp, Mus musculus
ccttcacattacttcttgagtcccatgacatgggtaattcagttcacttagtgatgagatgaaatggcttttgtttcctaccttgtatttttgctgcaccttctcagttccacatgtttaagaagcatgaaacaagatgctgtagttaatgagactttagaaatgtatgtcaatttattttagaaatgttttgactcttttttctcatattaataacagagcagtcattggggaaatagatgaagagacggattctgcactcgacttggggaacatccgagcagagcctctgaactccgtagcacactgagacctcagtgtgtagtgagatgtgtgtaaatcctgtacagaagcgtctgtcctgagagtgatgtttagggtttttatgagtgtgtaattgtgcagtttgacttcatgttggtacactgtaatatgtaatttaaatatttctacattttttattgggaaacattgcctaaattaataaatgtggttggctggtttatttttctaccaaatgatacaaaaatctaaggatcatttgaaaacttagaaaataccattacttttggtaatttaatatttatgggaaattggctgtaaagagaacttagactattattgtaacttatactaatgcaaataatagtaataaaagacacatttctttttgtggttttcttttctttcctttttttttttttagaaataccagatagtaaatggccgtctacaggtaactgtcatagagtttatcccaatgtggtacagttctccagtagttggaaaaattgtgtctaaatttttagatgcctgttaaggtcacaagatttggtttctgaaagaagattttgtgaatgttaaatgccattgtactactgaatttttttaaactagagtgaggaatatctctattcaaagagcttttgtttaatgtgggaaattagttaaatcaagagcagtgctctctgctgtctctcattacttagtccatgaggcaacttttgttgttttgttttttgtttttttgttttgtttgttttctcaagacagggtttttctgtgtagccctagctgtcctggaactcactttgtacaccaggctggccttgaactcagaaatccgcctgcctctgcctcccaagtgctaggattaaaggcatgcaccatcacctcccggctccgtgaggctactttgataaactttttaaaaatattcatagaaacagtgc

SEQ ID NO: 30974 - DNA, 1200 bp, Mus musculus
gataaaaatgaaaattggccataactaagccaagctttttcaaaaatgtagattttagttaaaatttccttttgtttattaatgtttgcacaaacaatggtccacttccctgccttgtagcattgattgcatttgtgcctttgttggctgagtatcttccctgttagtgtaaggcagtttgcatgcagtgtggccggccctaggataaagttgagacagaaggtaactgaggcacgttttgagaagttgccggttctccaaccctcggaaccctgtacttactttgattctcacagcccctcttctgaaaatcggtcacagaacattttctaacagatttgagacgctgctttcttaaaaataaggttggggaggtattagcccagtaccctaagatgtactaagatataagttgattgactagtctaaagatatgaagcagacttaccttttagtaaagaaatattgaagtttcgtcattaaaccgtacgttagctgggccccagattttggtgttatctttttttttttttttttgaaacaggtagatcgccacttgagaaagctggatcaggaactggccaagtttaaaatggagctggaagccgataatgctggaattacagaaatactagagaggcgtaagtacaatttatggtttttctattcatcttggagagtagttttctcacaaaagcctgccagatcatatatgccctttggtggatggtagcctctgggtcccgtaacttctaggctggcattgaagtctttgggtcataaacactgagagaaatatgcaggctgtcagtctactccctctttatgaagacagcatacaaagtctttcactttgtgttgttttcactttgagatgggaccatgctctataaagcttgccgccccagcctccagaccattgtgattctgagcacgtgtgcccacattgcagactccgtgcgtgtttaatattcacatatgctaagttagaagagagttagagaaagaaagaggcaaaaacgtccaagtgtccaccgtgagagccaagccacgcctgttctgtgtgcttcagctggcagaattgttgagactttgctcctcacctgtgtggactgaggtttccatcgcttccgtaacacttcctcttgtgctgggaagtcttttcaaaacctccccttatcagaagaactcatcctaata

SEQ ID NO: 30975 - DNA, 2488 bp, Mus musculus
tgaccttattgttgacatgtgtgtcactgaagcgagggcaggtgtgctgtgttcctctacattagcagatcacactcatttttgttttaatgctgtgaatcatccttgtgttcccttagcacataaagaacaataaggaaacgaacaagtacgagggatggcctgaggtggtggagatggaaggatgtatcccccagaagcaagactgacgggaaggagcgagaggcgaggaggaacgcactttgactctgcaggagagtggtcaggcagccgctctgtgtacatatttcagtagcatgtggccgtccagggtgtgcatgagcaagaccgtctctgtcgattccaggattatttattgctaacagaaatggctacctttttgtaaatagtcttcattgagccaatcactgaactatttgtaagcacatttccctgaaagtacaacgtgtagacgacaatggcaataatgtattttaattctaaaagcatattcagggggtaaccacgcaggttgtacaggacgccgatatttatcctggttgctgggaaaccctatcatggaataatgtggcttttagggaggagattttgttcgtatacgtgtctctgtataaaaatctggcatgttatggcagtacccttcaaatgaaagagatttttggctagttgtctgtgtactgtcaccttacagtccaactcctgttgtatcttttcacagtctttatttttgaccttccaaagaaatccagaaataaaatgtttcacacaaaaatttacatcagatttgtgaaaagcacaacagtttttttgttgttgttattttttttaataacagtgaagaggaatattaatgtaggtgtcattcagagctcattttctcaattctgtgttagcggtgtgaattctgtgatgctgtgtaagctgtgtagagtgagcctaggggtaggattccacagaactgggggcccaggccgagtcccttcctcgacctaatcaggtcattcaagacaactgggtcagtacatttagggtaatacaggcatttttctgctttcatcgaccacatgattttaggacaggaatacttgactctcatagccttgatttgtaaaccaagaaattctgttatttatttctaactttgtgatagcagctgttgcctaaacgtgtagcagaagccttgaaaagtcccgattattgttttttttagggcatttgatgtctattatataggtgacatacatccacttcaaatgcaacataaacaagtgaaatgttcatgctgccctttgtgggatgaggccacacgtaaaatctgaacctaaaatttaggtggtttgtataaaaatctaagagcagtatttgctattttgttaaaagctagaagcagcccaggtgtccccttcttgactgttactgacctgcgctactgtttctctcctcaaattgaatgtagttcatgaggagataaataatcgtctgtgctcagagaggttttgtagactttaaatgtagagttctgctgctcctgtactaatacatccagcatggatggtttagcttttctttgtttgtttgttttttgtttgattttttttttttttttttacagttctagggatgggaaaataaacattgcagggttattttgttttttaatactgaatataagtactcttggtttgacattgtgaattttttatttttcatttttgtatttgacaaagcactatacctgcagaacatcccctgaaatccttccttttttttttttttttttttttttggatacatcttaacatataaaaattaagtttttgccattcaacatagtagtatcatatggcctggatatatttgaatgtgtatgaagtaaagttgcttgagaacaggctaaccctttgagagatgggctttccatttgcataagctgctgggagggagaagactggttctgtaactgctgtggcccagtggggtcttttggcctggattctgtcttgtactggttacaccggctcaactcgggaagcaataatcgactgttttatgttcacatcagccttagaagtggaacagtgctcacttactgttgacaacaagttttctttattaaaatcaaaaatctttaacactgacgtgtagtagttgcagtgatgtggggggcgggggtctacaaatgcacttctgctttgttaaaacaacagaaggaaggagacataagcagatacctgggaaatgagacaaagagaacctttctagtcttcattttcatttggttaatggtaaattcattgttccgtatgttctgttagccctctaccttcccctgtccattttaagagaaaagagaaatgtactgtgctcaaagaacaaagcagtctacactggaaatacatttggtatcatttccagccaatatgagaaaggggaaatgcttgttgagcgggtaaaagattggccactcagccaattccttccacctctt

SEQ ID NO: 30976 - DNA, 1178 bp, Mus musculus
tatggcacgatccatttctgtcaggttagctcattcctcacgagggtctgaataagggagcctttttatattggaagctttgcctttcttcttgttcttttgatactcttagagaaaaacattctgacagattttgaaagtttttatttatttatagtttattaaagaatgtgtgtctcgcctttttaattaatttttaaagtatgtgtggtgtacagcctgcatggatgtatgctcaccacgtgtgttcctgatattcaacgatgctgggagggcatctgattctttggaactagagttatagatggttgattatgtggctgctgggagtttaacctgtgtcctctggaaaagcagccagtactcctaatcgctgaacccccacctctagcccctaactaggtataccttaatgtcttatatatgtgatttcgtgtatatagtttgagatctaaaattatctgaaatcttaattaatttgttttctaaagaatctcaaacgtatttctcttctccccaaagctacgaaacctccgaggtacaagtgtgggatctcaaaggcgtgcccagagaagcattttgcttttaagatggctagtggagcagccaatgtcgtgggacccaagatctgcctggaggacaatgtgtgagtatcggatggctcagagctcgaaggtcgtggattgagtgacagaccgtggactgtcatggcgttctgaaatgcttttgctaacagccagtaattctggttatcactgtatgattttttttctcccctgtgacaaagagacctgcatttatctgactttgtgtaggatgcaggtggctgtttcatttgattcttaagtatgagaaaaaaaattaactcatttaaaatcattaaaataaaaacatttctctagttggtatagttcaactgttcagtgtctccaccacacggctgttgaccacacatctcatacagaaaacatttgtgccagagcaaagtcccattgacagctctacccagagcaatgcatgccttacatcctaggccagatgcttgggtggcgctgcttgctgaggtgtgacatgacctggaggtcaagccccttgcgctcacacggctctgggatgagctgagtgactcccgagttgcagtgctctctacaccaatgctcgttggcttgtcatcatgc

SEQ ID NO: 30977 - DNA, 2425 bp, Mus musculus
atttttgttgccttttttgctttttttttttaaattaatctgtgcaatacctcatttaatctgtaaaggtttgttataatcctatataaagctactccttgttgctgtgtgcaagtttacatcaggatgctcacgtgatttgtgaatattttcattccatcaacaagggagtttaattatgtgtgagactgacacaaaccttaatgtaatttagttagaatgccagaaggagaacactattttcataccctactttttctgtacctaaattttcttaataaaatttagtatagcactacattcttttttaagtgatgtaaactttagtttctttagccccttcattttgaatatgatgccacatatgaatgttgaagctgatacattgcacaattctctagacaccactcactacactaatgcagtttttcaaattctagtattatgtgttgcttaagatcactacagagatgctactgaagagagacggtagtacagctctcttgcagtactgcctgccgttggtaagcagtggcatccgaaggcaggaaccctgatgagccctcacgtgcctgtccttgaccaaggtgacttttatgctgtggcaactgtgacaggctattttttagcaaagagttagacgtttgttatcatgccccaaaatagtttgaggtaacatttttggaggtagcttcgtgcatcataaacaactttcgtgctcgtgtctgactcgagcggtatcagaacagggctgggatggagtcttcgtgttttgcaccctgtgcattgctatattcacaagtaccaactgtaggagtcagaggtgttggcaaaagtatgcatgaatgctaacctttgcacatactctgtttttactttgatggcttctccaggtttttgtcaggtaccacatgtagaattacatttttcttaaaagattgatcatccaaatggcaaatttcttagagtccataactgatttgatagatttttctttttaaataaaacttcacagcctgcacagttgttacgcatactacatggtatgttacaattagggtttccttgcctctttacagtacactaatccgcctaaaggtggctgtttgatatttaccgtgataattaccttacctacctacctactttcaatacactttaggtagccgattatctgatttaagtgcagacacacttttctcacattgagttgtatgcagaatgtagcttcagatgtattcattatagttacaatatccaactaaaaagtacgctatctagaagtataccgaccaaaatctagtattgacatgatcttgacaggctggacctgtgagatatggtttgaattttaaccagtttatcacataacctctagagaccatgcatctagttattgtcaggaataatttaaaaggtttagtcgccaaaagcagttaagtggtgcagtaagatagttaagttattcaaagagtgttaccctccttgcaagagtaactgaagcacattggaaagattctcaattttgtgtttcctgtaaaaacagtgctctctgctgctaggaccttttttctgcttcctgtcattttcatgtggcttgagctctgagacgtgcggatgaggctggacaactactacccatacaattagggggtcaaaataactttaaataaatagcatcggactttcatatttttctttttgacgtggagaaaacattttcatgcctaaaaatgtctttgagataatgccaattctgatgtcccttaccttttggccaagaagtttgagattttttcagctaatttgttatttgaccagaagttgtctggggagactgagttctttgagttgcatataaatgggggtatattatttgccaaaggtaaaattgagtttattctttttcatacagaaatggattttgcttttgtttgctttttatttttgtgtaaaatctaaattccaggagctatggggttcatccaggcatgaaggctaatccactctgagtaaagtgtcagttgcacagctccgtcctcttctgtcttgcactgtgggtggcactatttattcctgtgcgtcatctggaagcctcacggatacatccagctatgtgcttgtctggtagcctttgcgtttaacaaactagcatgaggcctttcatatctaaatgctgtgtgatagacaatttcagctagccacatattgtattatgaaattcataaagattttcaatcattcaatttcatttatcaactgaaattttgtttagtatgtgaatttttttttgaaatgtatagtaaataagatgttgcactggtggcaattcatcatggaacataataaaattaatttgacccaaatagtataaaatagtgtgtctcatttgttattaagatgttaaaataagtagaaaatttta

SEQ ID NO: 30978 - DNA, 1150 bp, Mus musculus
ttagtagtggagagaggtgagtgctgacaaagtaaacaagcttatttctccatcagtcaagtttggagaatgtctgctcattttattcttttgacaatggtggtttacttgtgaactaaacatagttatgatgagtctctgacatcctgcgtgtgaaattatacatctctaatgcaaatttattagctaccattcaccgagttctttactttgtgctaattagcagaagtagaaagccaagtgactagaatttaaacatgatgctataggctgttacttagtaatttattgatgtttcccagatgttgaaatattcaggaatgataagataagacctgacatagataatagtctgaagcaggttttaagacacatctcttggtgtattagtcaaaatgtttccagggaacactaactgagcagggaagacgtactattagtgtgtcagaagcatcccataagattgggaagcagatagaataaaaggggaaagggggaaatgaccctacaggggctcagatttataaccttaacacttaggatgctggtggaaaatggcaggtatagtttgaggccaatttaggctacaaaatgtgacaaactccccaaaacaacaacaataaatattaaataatagcaagttccaaaaatggaaatgtagaaggcaagctgcttgacttcatgcctttctagaactaaagaacaacttccttcatatgtccctgtcctatgacattttacccaagggtacgaggccaaatgatcataaactgagcccctacccccaaactgtatagcaacataaatcgttcctaagttaaattgtttgtgcaaagtatttgtgtcactgcattataaagataactcctatacatgctaaatgatgtgacagagatatacacaacataaagagaggtaacttttgtgctatttcaatatcagacataatttgacagatgaatttaaatgtcattgttatcaaaacaagcagaattaaacagagccaaaaaaaagttaccgtaaggaaaatatcattgctgaaaaacaggagatagatttgagaacagcaaaatgtttactttaaatagaatactctttatttgaaagaaaaattagatatcattttatagaatattttcaatgctagcag

SEQ ID NO: 30979 - DNA, 1175 bp, Mus musculus
aaaaccaggtacatatgcacacccaagagtcccatgaaaacacaaaactggaagctataatacatgtgcaaaagaccagcagggtaaaaaaggaggaaaaagaatagagtaaaataaaagaaaaagccctgacatgacattgagacgaggaaccttcaaagatgcctctgagcttgttttctattgggcaggcagcctgcccttaaaaatagttcatttccccagtgagaatcccttggcaagagctacattttcatttgcaaataattatcagttggagatatcttctggattaggcatgtgcctacttctcctttcagctctacgactcccatctgatagaccgatgtaggccctgtgtgtgctgccttagtctgtgagcttagatagtgttgatcctgttgacttagagggcctctttcccttggtgtctccatcccctccagctcctacccggtccagttcttcactctgcacagtgccctgagccttgaggggggtggggggatttgagcgtcatcccatttagggttgagtgttccaaggtctttcactctgtttaatatctgtctgtgggtctctgtatttgctcccacctgccgcaggaggaagcatttctgacaatggctgagcaagtactgatgtgagtatagcagaatgtcactaggagtcattttattgctacattgttttgctttgttttgtttgttttagtacagagaatttcattttcccagaggttcctgggctatggcttcttaggttcttggttacacagtgttgggtatgggctccatcccatggagtgggccttcatcagatactatagtggtcactctcataggctttgtgccacctttgcactcagcacacctggttggcaggacagcattgtaggtcaaaacgttttgtgttatgtttggtagtgtaagccgagtgtcttgataatcattgagtcagcttagtgataaaactttctcataggaacatgactgtctgttactcaggcattctacctcttagaccaggccacacacattgaatacattccttaattcttgatttttttttttacttatggaggtacagattatctcactgggcatgtttgtttgtttggttggtttttgattgtttttttttttaactagagtttgacaaaacttactttaatt

SEQ ID NO: 30980 - DNA, 1130 bp, Mus musculus
gccaacattcaagagattttgtttggcaaagttttgcaaggtctatcagtatgctctcagtgatagcacacccattctctgtccctctaacagtgagcaccatcaacatgtatcatggattttgcccgtacttgtttatacattgtctctttctttacctttttaagttgattacaaagattaatcagtagattacaaagatagaagttttttttttctcttatttttacttagatgactttcttttttcacgtaataaaaactcagtttgtgtcattcatcaggcccaatgtatacttttaatggaaaactggcacctcttgacttcctggttttgtgctttttgggtggagctgatttctgagtgtgaggttgtgacaggaaataatatgaggtacctgcaagacaacactgggaacacttgccaaaggttctgcgtaactataatttttctcgtccctaggaccctgcctacagaaaggttgcgtctaggtgtatgttggtcttgtagtgagcctactcactcaggtcctttaaaaaagtcatttatttgcatttagatgtatgtacttatatgcacacatgctgctcctatccacagaggctgcatggggttggatcctctggagctggggttgcaggtggtggagctgctcagtgtgtgcaacactggggcccaaacgctgctcctctggaagagcagcaagtgctcttagcttcagccagtcagtctgtgtatcattctctaaagaaagttgggcaactcagtgttgaaaaaaataattttgagcatttctaatgaacttacaacttagaagcaagccatgataagctgaactcaccatctaactaccttcttacattgccaccttctaatttgaagagattcctgttgttgatcactttgtccgtggtgtcactgtccctttgctggtcatacagacttcagagcctgtcctctgtaaatctgttcctgctggttctagcctacagagacttcttctcccaatgaggtttgaacatctgcctttctactcattttcacttttattctttgtaatattgcatccatattaattttcctgtcctcgtgaatcagatctagcccttggagaccaaggctacttatt

SEQ ID NO: 30981 - DNA, 1189 bp, Mus musculus
ttatattgtattaaaaatcatatgtatagtaacatccttcctgatattttatccattctgggttgtaacttcttgagttggctttggtattctaaaattttcagactaaaaaaccaagtgatcgtatttttattgtttagagtgatccatgtgcttgtgtattttataataagggaacttagaagcagaagtgacattttagattatacctttctcatttggtaaattaaagcaaaattttaatatagttaataactaggtttatattcacaaaatgctgaaagtagataatgctataaaaagatacatatacgactaaaagaggtttcattatatattttaaaatattagagggtgagaacaagttaattctttcaggttaaaaacaatttttattttcttaacagatcttcctgatgtaaatgataaacaaagccaagccataagtgatctcctagaagccatatatccaagagtggacaagagagaatatattattaagctagaacccatagaaaccaaccaaaatgcagtgtttcaatatatttcaaggactgataaccctgctgaagtgaccgagtcaagcagtacacctgaacaaactgaagttcaaatacaggagacaagctcagaacagctgaaagcagtccccgacgcagatacagaggtggaggaggccatagagcctccttctatagagactgttgtagatgaagctgcagctcccactgaggagcaacctcaggaatcacaggctgacttggagacgtctgacagttctgaccttggtcaccagttgatatgttgtctttgtagaaaagaattcaattctagacgaggtgttcgtcgtcacattcgaaaagtacacaaaaaaaagatggaagaactaaaaaaatacattgaaacacggaagactccaaaccagtcttcaaaaggacgcagtaagagtgttctagtttcattaagtaggagctgtccagtttgttgtaaatcatttgctacaaaagcgaatgtaaggaggcattttgatgaagttcacagaggactaaggagggattcaattactcctgatatagcgacaaagcctgggcagcctttgttcctggattctgcttctcctaaaaaatcttttaagactcgcaaacaaaagtcttcaaaggctgaatacaatttaactgcatgcaaatgc

SEQ ID NO: 30982 - DNA, 1225 bp, Mus musculus
agggtactgccagtattgagacagcatctcgtagtggtctgtatgtggagcaggttagggagaaaggctgggggtaggaggtgcgagttagggaaatggtgagggtcttaataaataagatattgtataatgcttctggctcagagctaggaataaatgtgactcccaggggaggtcatctgactttggaacatatacagtaactatgtatgtattccttcacagtcagcatctggcccacttgtgtcttaattctctggggacatacatcaagctaggaagagaccagggagttaaaaacagtgacggtttgtcccaagggctgaggactagtgagttcctcccaaaacttggaaccttgcttccaggaaccagctgagccctttgtgcccatcccagagagggtcccgagcagccatgtgagcttagcgatctccaaagtggtcctgtttggtccaggacggggttaaaaacaaacctctcctgcttaaggcaggcagagagtgggagtgatgacttcatggtcttcccttcaacatggagcttgtagaagagatgacatctttgcttctttcagagcatttggacagtaagccgggacctgcagggatacgaggaatttctgccaagatgtattcccagctgtgtttgcttttgcagggacaggaaaaaggaggtaatttgctgcagattccagaacactgttaggaccctcccaggaaaagcagagttcagctgaaatactttctgccctatgatcctggcagaggttaattctattctttattttcttttggttaattctgttctttaaggaaagtagctctcagaaaatttgggtcaaagcactatgagttgccaattcttttctttgatcagtctgctcttcctggttataaagacctttggacctgaaagatcaatgtttggccattaatatatatctttttgctatttttattatcgagatctgttttgtgagggtttggggtgcagaaaactttgattaacgatgttttcagtgggaggaggtgacctgattatctgcgggagcagacttcaatggaacagaagtgatgtctttgtagtaataacaatggtcattaaacctgagtgacttgagctgtgttttcttaatggtggtgtctatacatctggacacaagtagagtgtgaaaataaatggtgaatgaaaaggctagatatatagttccttatattgatct

SEQ ID NO: 30983 - DNA, 1408 bp, Mus musculus
gaggatgagctccgggatgcggtgctgctggtgtttgccaacaagcaggacatgcccaatgccatgcccgtgagcgagctgactgacaagctgggccttcagcacctgcgtagccgcacggtaaggctcacgtcccctcggcactgggccccgtgctctcctgggcccgctggacagagaagaaagagaggggttgtctatgctaaagagaaatagcatcttgtgttacttgttcttttgttttctgttggaatttttgtcatctttgcttagcacaaggaagagttctcttccctgagactgatctccttctctctgtccctacagtggtacgtccaggccacctgtgccacccaaggcacaggcctgtatgatgggctggactggctgtcccacgagctgtcaaagcgctagccagccaggggcaggcccctgctgcccggaagctcccgcgtgcatcccgggatgaccagactcccggactcctcaggcagtgcccttcctccccactcttcctccccacagacaggcctctgctcctgcgcctgcctgcatgctctctcttgtcgttggagcctggagccttgctctctgggcacagagggctctgctctcctgcctgctgggacctgtggatgggcttcctggccaaggccccctcttccaggggaggagcagggatctggatttaatttggttttggttttggttttttgatttttttttcttttttttctttctttttttttgttttgggggtacccttggggccaggttttggggggaggaaagtgagggctccgggtggtgctatgacgtggaactggatattgagtaataaatttgctgtggtttgtacccggtgttgtctgttgcctggaagttgggaagctgagttactgtgggcacagaaagacggtgtgggagaggcagaaagcagctgaatccaggagggcagtgcacttgaacccttttcttcctcagcttcccctggagggcttctagggggaggaaatgccatttcttcctcagttctgaggatggttaaggctataagtacctttctcattcctcaaaccagagtgtttcctatctcttacctagctacttagcagttcatcatagctttgtgcacatggacattcaaaagataggttccccaagacacacgagaaaaatgatcgatcctggcagcccaacaacatgcgtgtttaaaattaccccgatgattccatctatgccagcatctgtgagccatatttactgagcactggtggaacctttgctgggaaccactgggactctgtctacatgggaggattccatcactgctgaagcaggaagggcacctaaaggaccagggctctgggccattctccaggcaaggttgattacatgtctccctgta

SEQ ID NO: 30984 - DNA, 1162 bp, Mus musculus
ccataaagctgtgattacacgagaggcagttgtattttcttcagtcacactgaaacagagctgagaaacagaataccttatggcaggcttgactctgaattgtgcttctcccacaacaagcatgctttctgttgtctgcttttttataacaacaacaactttctttggaggtggattagttgaaatacagcattttagtatggaagattaaagagtgtgaattagactagactgtatgattagaatgtagtatggctagagattgggtagagggacggagggactgggctgctcagtaatcaggataacaggtgggaatggttgcttctgcgtgggctatatccattcagtcccccgtctatttctgaatgccttcccttttcctggagcagtaggccttgatttgtgaaggtaaggagaagtgagagcttgagcagtacttcgtgagaagagtctgcttttgtctaattcttaactgagggactcttttgcctggaggtcagctcttatttttgtagacattttccactttcattgtatgtatgggaagtatctttatctgttttttttcttatccttgggattgactctgaagtcacatgttggctaggaatgcctgccttgaggtacatttccaacccactttcagccgtctactcctagtacttcctgtcatggtttcttttcagtttcagtgttcttactgtgtatatgtttatttacttattctcactacgttctccagtctgtctagtcctaatctcttggattatgggtaggtgccaccttgctggatttcagtttttgattttaaatagaaaaatttagagaaagtaaatcctggttttctaaccaggtcattgtggggagaccacctgggagagccattgaattaacatctaggagagtcctgagaatctgtgcttacaaaagccagccagccattcctgggtgattctgagaggctcagtttgggataggactggaactggcatttgggacccactgatttgcttaacttctgaggttgttatgccaagattggggttgagcgtgcctggattttatgagggaagatagagaattctcttttggtattcattttgatggctcccaggaccctgtcagatctgattcctgggtcaccactgacagctgagaa

SEQ ID NO: 30985 - DNA, 1193 bp, Mus musculus
ctggtacctggcttcagaactagttaaagacactgtagtttccatctcagtctacctaggcttccaggtaagtctgccaggcttccttgtcttggcatggttattagtaatggtctgttggcctgatatgagtgatgggggtggatgggagcaacagtcagcacagggagaccgagtgcaggaaagtgagtggtggtgtagctcccagagagcagcatgaacaagagaggcgggctccgagtgccctgggatgacttgatagaaggagggttgtatgggctcaacagcccggctttgtgtgattctggccaaagctttgcttgagaggttttgctgcctgtctcatgcagttactgctaactggcaagaagtaaggaaggtggtttgtagtggaaagaggaacttgtgaatttaaatgtccatggttttcttagaagtaaaatgggttgggaaaagtcacatgttagttttggttggtttgaaaatatctttccagagaagatggtgtaagggacagatgtcttgacagaggtaaagtacggaagataaagggcaggtgagctggcgaagcacagtgggaacactcagaggacgcatgcaaagctgaggtatttatctaaagaccaagggtggctggaagtttgttataagaaaaaggaaagaggaagaggcttcaaagctttttgcttccagtgatgtcagccaagtgttcaacctcatgaattctgtcccaggaggttcattgtcctatagccttaataccagcaacatttttatttgggcaaccatccaaggcataatcattgtgccaagtaaaatttatctatttacccattaggggattgtcctaggctttaatgagaaaaatagtgtgtgctattcctctatgtatattgcaaggtagaggccagaacctgggtcttggggtcccactgggatctgttattctgtgtgcagtaattacttgcattattgctcttggcaggtgaggccttttacagcccagaggccaggaggctgcttctgttacttaaaagctaagttaccttgttaaactcctctctggtgagagctttagaatctctctagacctcccatgagctctctctagggtacaggttcagcacaggttaaggctgccctgcctttgtataattagtcataggcattctagctctgagtagtggaataaa

SEQ ID NO: 30986 - DNA, 1150 bp, Mus musculus
gagtcattggctagactatttcatatttattttggtttaagcttcatagtgagacagttctattagatttaaagtaatcaaggcctgtttggtttggggcaccaaagagaccttaagacatgaagctaggaataaagagaaggaggtctgagtggctctgaagctttgtagatatgaattgagttcatgtccacctatccatgtgtgttctaaagaatcaggggtggaaagcaaggtattgccgaattgtctgttggtaaagggaccattttaaaggaaagtaaactgctccgcgtgctgtgtttcatttgtctttaacacagagcttgattgctctggtgttttaaagatggtcagaagagcagcttttcgaactctgagttcaggctgtggccctcatgccccttggaagcctgatgtgggtggggtcactggctctcacctcatcactcctcactgtccttactgtcctttagtgcccaaccttccgtcgggaaacagatgggagtgaaacgccggagcccttcgctgcagaagccaagtttttcaccgagtctcgactgcttcagagagatgttcagatcattctggagagctgccacaatcagaaccttctgggtaccatcctccacccggtgagtgggctggacccctgggctgatggtccgccttgtgctctgttcaacattgtttcaaatcttggcaggtttcttcttttttctttttgtattgtattatccattgccttgagagcctttcctgtgtagataccattagtcatgtatctaatttgtgattgtgcacaaatcagtgcataagtaagttcatctcaagtgttccaggctttataaagggaagtcttggagtctggaagttgccattgccagttgaaggctggggagtaggactggggagtttcatatgtaggtctagaattcagctctcctggagtactgacacatcaatcagaaggagactgacacgtggaaaaattatttcccatattcttatctttaacagttccctcctaattctggagcttgggtttggggtttttatttttaattttttttatgttgttaaagttgtgactgttgggaatttcactctgttgtgtaccttgatagatgtgatattcttgcacaggtaa

SEQ ID NO: 30987 - DNA, 1171 bp, Mus musculus
tgtggatgaacattgggtgtctccatcagttaaccatgaattgaggttggaaagtcactaggtggcactgtcagcttgagaaatccccaaactatcttataaatgtaaaatttttataaagactcttgaggcattggctgatggattttcttctcactccctctaccctctctccccttcccgccgggcccccccccccccgcctcctcttatggaaatgttgaaagtaataggtttcagagctcaactggcctctcctcccctccttagcaggtatctaagtagctgttaggggatggcaatcatcactctctttagtggacatgaacagcattgtctatggggacagagttgccagtgtatcctccatattctgaggtagaatacagtggctctttgcttcctttttctgaggtctatgctgttgtgcacttggacatgggctgctttgccatcttgaagctcatttagttttgcttacatgtcctgtaagtaagaatgtacctacacaaagggtggccatccactcagcagggagacggatcttcagtttgataacattcctaagaggctgtgagactagcgatgtaggtgagatttagaaatgtttccctggcccgctctctttctagtagatcctactgattggggaactaacgagttgctagtaaagaaagaattctaaagaagtaaatgtctgagccttgcaaccttgcctgcctgtctgtctgtctgtctgtctaagacagggcctcactgtttttcatgttagccaccaaatagccatcatcttgcctctgcctcactccctcttccctctctcccctcccctcccctccctttccatgttgaaagtaataggtttcagagctcaactggcctctcccctccttagcaggtatctaagtagctgtaatactgggattacaggcacatgttcattttaaatatgctgtgttgcctacttgaaaagggaggaatggctactgcaacatttcttccacttttaaaatccaggatttcttgttgtctgggttttgttttgttttgtttttttaaacacagtaagtgtcttgatactcaccacaattaagttttactgattacattgccaaagtgaggtttatgaaggatgatgctttctttagaatgttaatgtaaatgtaggtca

SEQ ID NO: 30988 - DNA, 1236 bp, Mus musculus
tctttctcatgtagtgagagtggtacccttttcttgtccaacccatgtctctttcactacagccattgagttgggattttgatttgtagttttaaacttgtatcaagaaaagtctcagtagagactggctttagtgtgttggtttttaatgttattattcatatttaagcagggtttttactgtctagccctggatatctcattttggaacttaacctacaccctccaccagccttaagctcagtggtcctcttgtcactgcctcttgagggcttagactgtaggcgtgcaccattgctcctggctcaggtttctagtcttttaacctgctagttaaccacaagagataaagactgatcgatcatcttgtgaatgaagcagcttttgttttactgagagatcatcatatggtttgggacttgagtattattggatattttctctgccattgttggtaggaaaacagtattgggtctattaagatggctacctatctcactttcatgtctgattgtgatgggcctggctctttgctggatggtgaggactatggaagccagttcaaacattgtccccttcttccttataggtcatgcaggttttgaatgctgatgccattgttgtgaagctgaattctggagactacaagaccatccacctgtcaagcatccgaccaccaaggttggagggagacaacatacaggtgagaacaggaagtgtactggtggggtttctactactgtgatttaaaacaccatgactgaggcagcttggggacggcagggtttctttgctgtgtgctttagagggacaggagtctattggtgggaaaccatggcagcaagtacagtggcggtgggaactgagtgctgctcagagctcacattttgaactgcacacacagtgtttgtaggggaagtatgaacacagacatatgccataaggctttgaaatgttagagtccacacccagtgacatgcttttagcgtggcttctcctagacctccccaaaacagcaccccaactgaggaccaggtgttcaactacatgaacctgtgagggtcattcttactgtaagcactcaggaagcatctgcacttagttaagtctgatgtcagtctgtaaaaggacaagtctttgacagtctccaagtattatgcctttttacttgcagccaaaaccttagttagctctgctctggtccactgcaaatagtgacacttggcattcctccct

SEQ ID NO: 30989 - DNA, 1147 bp, Mus musculus
gctttcttttttctgtctctatgcagtttgattttctgggtcaagtagattcctcatttcttcaagtctattgcaggctaaccatgtagttggtactcagttttataaggtgcttgaattctcagtagctcctgctcatagtctttggctgcagattggcagagtacattgacccttaactgtgattctgccattagtccaccagaagaccaggaggcccagactctttccttgggtggctgccttttgtaaggtgggctgcaattaggagaaagcctcctccttattcatatgaagtttgcttagcatctgcttctccagctggatggctagttttagatgactggtgtgcaggagctgtaggtggaactttgtaagggattgctggtgtgtgcagggttcccttgtcagccttctgctcctccaggcttggtcttgaggcccaggccctatgagttggggtgcaggtgtattgagtaccctcattggagcttctttaccttttactgcagcggatgggagagagctcactgtgtttacatggcagatcgacagacagtgtcatgtgctagtttgacggtagggatatccagattattagcccagttagcagggagacttcacatcattcaactcaccttattgtatccacttgtgatttcttataaaaagggaggaagttctggtagcactttgctggtcccttccagcgtgtgttaaacctccaactcagcgttttcccaggaaaatgtccgagttccttcctgccgcctgagctacttggagcctttctgtcagagcacaactgtggcttgcctggaagattgctctgagccccacctcctccctctaaaagcttttcgcctcactccgcctgctttgcctactccagtcctcctctgaggaagagtagctgactccttcagctcaggcaggcttatctgcaggggagcttagttagttctgggctgcctggatctagaaatagcagagctgtggaagatgactgctcctctgggtaaagaacagcaggtagaggaaggcagttcctcttgtaaggagagttctcaatccaagaagatagaaatgagcctgatactgttgaaggaaactgacaaatgtaaaactcagtgcagtaaaaccctgc

SEQ ID NO: 30990 - DNA, 1150 bp, Mus musculus
gacattttcttacatagaagcgctagctacactaagagggagcctagggtgttagaggggtttagccctagtccattgggtgttctaagcagtgtgttgtgctagggcggcatggatcacaggtgttcagggtaaagactgttgtccaaagtttacactccgataatagctacttgagtacatggaaataaagcattgtgtggaaacctgctctctgtgtgtgtgtgtggggggggggaggcaggatccagtggcgtttgaatcaaaggagaaataacttttgctttgtcgaatctcttggactattgtgatattcatggttgtttctcttgttcatccattttccctttggtccattgatttgtttccttattttaaagccttttgtcatatccagtgtagtaggaacgttttcaaatcagcaaaattgcatgtgctagtcactggctatgtggctgtgctttaaacctaagagtatgcaggtgttctctcttgagatgtccatttttacctagatgttcgtggagtccactcctcaggcagctcctgtcattttgctgaatgtcaccaagcatttactgtcacttctctgatgccaaggaggaaggtgatgccttctagcaaaatagcccctgtccttttggtagcacattaaaaggtcagcaccccctctgtccttctcttgcctcctctgccctcactgtcatctgtataacctttccttactgaatgctgcttctgtaaagtgcactggagctgcatttaaagagattaggttccttaagtctgaaggtgccagtccactgtaagcttgaggtgcaacactggaaatcattccatgacttagaggtaggtggctcacctcgttatagagtcttgtctttctagaagttgctattaccgaaatgatcttgagaaagctcctgaaacttgtaaacttcaggaatttcttgagattgttttgtttacttggcaagacttaaaggattgtttcagtttgcaggtcaccttggtttctttagtaaaaagtccatgctttataggtctagctctagacatacacagtttgcttgtttgtttttaaggggaatatttttaacttggaccttatatgcctgccatttttggattacaccacagctgacgcata

SEQ ID NO: 30991 - DNA, 1195 bp, Mus musculus
tttttgtagccaccaaacatactttttataggactttttataatttaatttttaaacagaatttttttaaaggttgttttatgtaacgtatcttaaattctttacattttaaaaatagacagaggaagggagaaaaatggactggtaaaaagcatatgcatggaccaagcagtgattctttttgtttctaaagctttttaacctcagattaagacaagtctgaattttgttggtttattgacttgaaacagacatcctgatgttactggcaagaaggccagtatggagataggattatccccatcttcacctctaccccctcacacagatggtaaataaaactgactagacatttaatttattcatctcatcatttccagcttttaagtaggaaaattgtacttctaggctgaactgtgcctttatcattgttgtgagtggacagtacacttccttcaaaggtcacataaagagtgttaggagaggcttccccttctcccctgggcttggccgtccctggtccagagcgttcctgagaagcagccacattgtcatgccacattggtcttccccgacattctctagacctccagctaagcatggttgtgggaatgagagctatattctacacatgtgctagtaccataaatatagttaaatgcagggactgtagaccaggaatagtctttgcatgtgtgtttcctttctgtgtgtatacaaacactagaaccttagccggttttgtattcacagttcggggaaagcttgctgctgtcctatagagattccatcctaattttctctatggctaattttctacttgaaaatgcagttatcagttgattttaacactggtactgttgtctactatatccatgcttatgatcctgttttccgctttctcacttactgcctacttcatcagtcacaaaacaacactgttgattgtatcggcttattattgtcgttgttaaaacaagagaaaaagatacaggaaaagctgtgtttcccagaggtatcatctgctaacatttgagtgtctatcagtccagtgtttttatgcacatggctcttagcataatgttcacttcgactagtaattacatgctgcttactgctttgtaaccctcaacatgatgatttccctacgtcgataagtagtcttctacatgagatacttttatcatttaatacc

SEQ ID NO: 30992 - DNA, 1133 bp, Mus musculus
cattcatgcaacaaatacttactgtatttcagctgcaagtacgctgctcgttcaaaagacatgttcgtctgtcccctggtactttctctctttctgtttcagttaattagtacaagggaggtatacattacagagatttaaaaacttaggatataacacaccatttttggctaggttatcttttacagttttagagctaaatggtactgtaaaatcataatctagtgttcttagtttccatatgaagatgttgcacacatgtaaactcaatatctatggaggagcatctgcaattgtttttctttccaccttgtctttagagaatagatcatttacattttatcatttcattatcagcagcaccttaaacagaaggaaccacttaccacaaatacaaaatttaggtcaccatttattcagacagacattactaacatttcctgtcattttaattgaacctggttaaacttcagcttttcagagtgattggcaggtcagtgatgaatatctggagatgaaaaactccaaggcaggggaacagatctgagaattcacaggagaggggcataaatgctaattacacattgactttaattcctggcttgccatagtagcctgcaggtgtgtatcttggctgtgggctattctcagagcttcatttgtatctgagattttctttaataatgttgccgccacgaagagctctttaatctctgactcatttgcaattctctttctcttgatataggaaataattaattgaaagatgaatgtagttgttatttcttctggttattgcagattaaagtgtgtgggtgggagatgtgttccctgggtgcagctcctctggctggcctcctgacctggaagcacgagtgttcgttcactctggtttcttgtcattattaccccactgcaaccacaacccctgtggaactagagagagtgttccacagactatttcttggtttgtagctgctttcccatcccccgccccactccctgtctgaggaacaagcttggcattggcagtacaaggtaaatgagattcacatagtttatttttaatcagtggtgatttttttttcccctactgcttcaatttgttggatggggcttgaacttgttggatg

SEQ ID NO: 30993 - DNA, 1146 bp, Mus musculus
agtaatatacacagccatataaaaccaagtaataataaaattagaattatcataaatgaaagcagcacatcgtaagaattgtcttagttccttttgtgttgtggccatgacccagctaagctgagactggtaatgcgtatggggaagaagtggattctggctctcagttctggaagccgtgtcatctaaatcccgagtggtaccagcatctgcttgcttctgtgggaacccctgctgcttcaactcaaggtagaaagttgaagggcaagtgtataactaaaagagaaaaattccgaagagcagggtcacttcctaactcctactcctccagtaaataatccatcccttaaagtccctgcctgccaacactgccattgtaccagttgtatttcactgggatggaggggtgtgggggagggtaatacaggatggcaaacccagatgcaaagcacagcaaaagagcagaggaaagaacaagtaattgagggatgaaaaaccttccagggaaggtagcagaagatgtggagcttttcttttggcagattggctatctaggcagaacatttttgcctgtctcagttctcagaagaattgccttacgaaaaggatgcagtcctcatcgctgtgtctgcttctgtgggactttctcaacaaacttcttctcaaaggactttcctcccattgagcttcagtgctgtggcctcagcgtgaagtctctgcctgctcacgggcaggtgaaagagcaaagcctctaactgtaggctgattgtctaccttctcaatcatgaaccagccccagaatgcactgcctcataacttatgagacattcattggcatggttatttaataatgttttctgtcctctgggcaccatcttaaggaagatagaaatgcatgataaagttggagccttctagcaggaaggaatgtatagacataaaggggaacaaatattttaaggatagggtagctgggctgttcagatcagtcatcccgacacatgagcggctaaggcaggaagattggcatagttccaggccagcctggagtacagtctcaaaacagtaataatagcaaacaaaacatgaggtaggagaaagagaaacacaaccttaaattacaaacagatgagactcacttggaga

SEQ ID NO: 30994 - DNA, 1218 bp, Mus musculus
ttgtggttatgtaaggaaatgaccgagtatttttagagatgcatactgaagtatgtaaagctgaagtggcaccatggctaggatagactttaaaatgctgaagcaaagaaagcggggagagagaacgatgaagactttattggatctctatgatggtttatggagtactcgttagtattctactttcagtggtccagatttctgttttcacagtagtttttgtataattaaaatatttttaagatttttttaccaccactccccctgccaggaattcctatatgcatctaaggttaagaactactggcttatttggaaattaaattcagaccaccttaccctagctgatcatcttagacctaacctagttcatgactttggatttctatcagcataaacttgatccctccagctcataaacagtgcacatctggggacaggatgggcaggcacaaagaacaacctagttctgcctctagactagaattgaggagtagctcagtagacagctctgtgtgttccccacaactctttaggagagttgctgtaccttggagctgacctgccttaccccttgccaatgctccatcctgagagcttctctggccacaccaggggaataatggtggttgcagctattctgtgatcgtgatagaagaaagtcctcatttccttggagcactttacccactgctggtgtgtcctaaaatttgtatccaaccgtcattcccagaagtccatccacattctcttcctcccccacccctccctgtgtgtgtgtgtgtgtgtgtgtgtgtgtgtgtgtgtgtgtgcgcgcgcgcgcgcgcatgtgccccttgtgtcctcaacattgtcccaattcccaagtgctattttgttctggctgcttagtagatgagaccaatagcagctgtgcagccaaattaaatggagttctggacgaaggctggagcttctatcctacatttgcaccatggccttgattaggaccctggctaagcgcttcttcattcaaaggcaagctactgactaatctttattcagggggctttgtgacttacacctaaacattaagctaatctgtgtgttgctatagggtcctaagagggggtgagactacaggcgatctaggtcacttatcagactagaataaatacagttttaccagagtatttactgagagcattgctgccaagctcccagctcctagggcagtcc

SEQ ID NO: 30995 - DNA, 1231 bp, Mus musculus
tctttagcacattaagcttcctgtgtgattttaaagacaaaaggaactgagcccaggggacaaggacaaggcaaggctcccgttcatactgagtaagaaatgctttccagctggtataagcactaacctagacttgcaggtagccttagtcacacccactctgcttccttagcattggtttgagctgcaagagaatccagagaaaggaaagtatcagaaattcctcctcctcctcctcctcctcctcctcctcttcttcctcttcctcctcttcctcatcttctctttcttccttttccagtcattacagactttggcaatttttcaaagcactgctcattttctcaggattctcaatgtgttaaaaggtagtagttgcatattatttaatcatttagattctctgtaccttatccccctctaacagaaactaagtcactataacaagcacgaggagggttgtggctgactctccttttacagaggaagaaatgtggcagcaacctcaggacagccctcaactttttcccagggtagctcactgctagcatcaggactgttaactacataggaggcagaccatagtctatcagactctgcctgagtgacacctcccaggcatctcttcaaacagccgactgtagggagggaggccgtggcagctgctctgcactagagaactcttctagtcccaggctgctggagtaaggaagaacagaaccctcaagcaaaactctcctgtagaggaacatcaagaaaaatattttccactctgcacaatacatggtgtgtttgctgcagggtaagcatagcttcagtcactggtaatggtaaaatattttgcccagtaacatccttactgtaataaaggcctgaagaggcatgtgcctgggtccactctcttctgtactctccgtctaagtggaaggaggttgtgctagtggtgtagggttaagagggctgtagtctggcatcttctctctcatttggtagagaggaagtactctttgtcatagtagaatgccaggaaccttatttctataaagccacatagcagacctcaccagtgagatcagttctgtattctttgtgaggcttgggcctcatcatctagaattagatgtcactttctcttcctgctacaatggtgacttaacctcttaaccataggaaacataatctactggctctttttaacccagtaagtctacttgtgtaaaaatgctggact

SEQ ID NO: 30996 - DNA, 1228 bp, Mus musculus
ggaaatcagaaatcagcgccccaccttgtggtgctgaggcagcaacttcatccccacttgcctcagaatgtatacccaggaagctgttcccaacagcctgagttgtgtccatggcactaggaaacgcagtcatttcttggattttcatctgatcctgggccaagtcccaccctttgctctgctgcggttttctttctttattaggaatagatagtaaaaggaggacagagagaaccagccactgttgcctgcgttttaagtgcataccagtgtttatgtgctgccataggcactgatagccagaaatgatctgtatacctaggaagattcaaaattggccatttcttagccaactgctgcaaagtgctgcctgcctctttcccttttcagtgccagatagatcacacccactcagtcctcattccctgcattagtataaatattcgctgaagaaacatgaggtccttgttcatggaacctccctgggagtcattgctctgtgaacctcaagagccagacccccacctcctccaaacacatcagactattcagcaacactgcctgtgggaatttgcagccaaactacattaccgaggctctcttaaatccaagcctcccagggtcctctggttgagcctgtactgcctgaccatcgggatctgctgaggtggcggttcacttctggccaggtcccaggagctgaggctgacccatttcccctgcttttttccagggcatggggaatttggttatatccccaacaaagccagggactaacacacttagcttgtgaaagatgcactggagttggggtgcatttatttaaactaaagaaaggtggttgacagcttttagcattttcccacacttaaatttaacattgtctccctccccacatcaagcctcttccctccccccacccccttcatttaaatataaatgactcggtctgtgtgtataaggctgtatgtataggttcagaatcttattcaatttaaccctttagggacattgaattaaaaattgaacaatatttattaaaatacaaaaatacacttttctcacattacaatcagtgttcttttgttggcatctcccacccataccaccccctttcaaatctgaacccttaattttctcttaaagctaaaataataactgaaagttacatcattaaatggaccagaataagagaccttgcccttgcttgtaactactggaggtagcc

SEQ ID NO: 30997 - DNA, 1190 bp, Mus musculus
tcgtagtaaatgaagtcggtgctgattagagtaaatgttcccaaattcagtggagtgctacatgggattgctttaccctttatgggccagctaggccacagaagttcctggaacctacagagtagactaaagaagaggctgtcaaacctgcagttcacagtcctcctgacctgaagcagtcttccagcgtcttactgagtttcctctggtattttgcccctcacaactagtagttctggctggtgcctggatctgtagtagtaccactaagaaataagagaaggcagttcacatttaaataaggaacactgcagtggactgagaacatgggcagtttcacataggcactgttaaaagaatgctaaaggtgtgttcaagaggctggccaaagcctgggtcagcagctcagttttgaagaatgggccttgtactgaagttgggatgcctgcgttctggttgttgtttcagattagatagaatgtataatgaagtatgccttgatttatgaaatcaaggagatgggctagaaagtttcacttacttctcagagtccatgactttccctccttttcagacaggcagctttgggaagaaggctgatcctttggggttgtagccttggaattaggctgtggagctgaggagagaatgttcccttcagtttagtataaacatccacaggactggaatagagctgatcacagatcacagcatgttcatttttaaagaatccttaagagagatcatattgacttggcctctcactttattgatgttaaggaaactcagaaaggcatggtaacttccctaaagtcacatgactagttaatatcaaagtctgtccctctgagttccttctatcagtatgctgatatgtggctaattggcctttaaagcctgggcttgaagatattatcaaatgcttgctctgtattctttgtgagcagacatgttctatgcttactgttttgggggtaaaggtggagttttgatagtgctaacatgccatttcatatgacttgggattctgataagaagtcaaaggaatgttcatgtagagggacccagggctgccaggctggcccactccctactttgcaaatatgtctgtccctgaggcattatcctcagcagccactagatgtccataatgcctcatggggtttgcaagtaacagcagggtaccatct

SEQ ID NO: 30998 - DNA, 1154 bp, Mus musculus
ttctatacagttgaacccagacgcagggttattgaactgcgataaacaggaaggcaggatttttacattcagctgaacaaggaggcaggtttagctaatttccgtaggagcagtcttcaggcggtaaacatgggtggggagaaagcgacagtggaggtgttctacacactgtcagcattcacactctgactcaagaaggctttgccatccctctgagcctcactcggggaaggttttgccacttccacagggcaggggcattggggtccttggcatggctgtgcccatgtcagtacattcactcaggacttctctggttctagctgcttctgctacatagaatgaatatagaagtgagcttggtaccattctcaagccttgaacttgcagaactgtgcccgtgagctgacacgtgtaccctctcttttgtttccaggtggaggtagaggtagagagcatggataaggctggcaacttcattggctggctgcacatggatggggctaacctgtctgtcctgctggtggagcaagcgctgtccaaggtccacttcactgctgagcgcagtgcctactacaagcctctcctgtctgctgaggaagctgccaagcagaggaaagagaaggtaccaagaacagactgtgacagtcagtcgctagcatgtgctcttttcttacctgccccttcccatacaccaaagggccaaggatgaggtgccagcttaggcacctttgatcctaagccagacacagaccttcagtgggccagagctgtcagtctggaagatgacattggagcagtggaagcactgtccaggacaccactggtgaaagcctggcggtcaacctgcccttctcaggcagtgtccaccaagggagtggacaacccacctctgaatttccttactactcccatttagggtggcagtccaaagagatgcatggagcccttagaacaggagatttacaaccagtctcagatactgcattgaagagacaagggaggtggatccaaagaagcttttggaaacaaattgactattaaggaactctgtggctttggggtgggagctgggctggacccttcccacactagcctgtctccagtgacttatagcctgcctaatagtaggataaatcagctggccaccaatc

SEQ ID NO: 30999 - DNA, 1225 bp, Mus musculus
atgaggggtttggaagccagctgggtgacagtaacctgggtatctcaggtgtactcagcatcttccacttgtgacctcctgaaggctgcttcactgctgaggaataaaagatttcttcacagtgtgtaaacgtttatacatacgggctaaaccagcaagggaaatgccgagagcctctgagaccaggtatgtgcagaactgtttggacagtggcttgtgtgtgcatgcattagtgagtgtatatatctggaggaacctgatgatgctgaagcctagaagctgcctcctcaggaccttagctgcctctctgctgggtttatttaattccacccagtgtcccatacaagcctccctttcctctatacttagtggttctgggcaggaacaaggagggaatcacgggtggcacatatccacatacagatatatactctctctctctctctctctctctcctcccccacccccgtcccctccctcctcctttctcatcccagcagggccttgaacagggctggattggccattgattagttttattgagcttggccaccctgctgtgtgtttgaaggcctctgccaccatggctccatgccagccacacccttggagcctagtgagtagggatattaaataggatttagacagccaatggagtcccttggcacatttctctttcctgtcaggaggagggtctggggctccctggaaaaagcacaaaatagagaaaggatggagggccagaaaccaggaggagacacagcctctgctcctcgcctattctgacttatacctgtgcccagcacaatagggtccttccctgtgacagctgcagcaacaaggggaccctagtaagttccagatatagtaggaacctgaggaaatcagaaacttgcttggcagaacagcctgcagcagaagcagaggagggaagggtggaagtctgtagctagagctgtgaagggtctcagcagtgccttgccccaagacagatccaccgtgcccccagctttgcagcagaagagaatctttctttagcctggccaccatccgagttcaagaagacatcaccacacaaatgcactcacaagtgacccaagatcaggggaaactaattaccaggctcctcatgtgcctaggccctgctgctgagccaagattcatagctccttggccataaggggtctttcccagcccctccctccctctgccaagaacctgggag

SEQ ID NO: 31000 - DNA, 1200 bp, Mus musculus
gggtggcccagcctctgagctgaggtcagagcaacctgctggaggtgaggaatccagagcacaagaaaaacagttcttcacagagccaagtcccccattcccagctgcaactaggagtgcctcaggaacaggagtggccatagaaatgacctgcagagtgaccttgcagagcactgtgggaagggaggtggaggtttgaaactagagggactgagcagactgcccaaagccaaggcagctcactggtgggatccttacactctactcctgggatcacctggaactcggtttgattctaatttaataagcctggggtgagatcctggagcctgtttttaaataagcttccagtttgatatctgtcagaatcatgaccctctaacctggaacttcagagactccagctttcctgctcagaatcagccctgcagtgaccccagacttacccaagggcaacacctatttacccaaagcccctggttgggggtcctcagcgatgtccccctcagctaccctgtcttcactaccgcacctgcaggtctgggcccactatgaggagcggcctgtggaggaggtcatgcctgtgctggaggagaaggagcgctctgccagctacaagccggtgtttgtgaccgagatcacagatgacctgcacttctatgtgcaagatgtggagactggtgagtgcctgtgtgctgccccctcacagatcccccacggaacttacaactgctactgcccctgcctccatcgcactgggactatgtcacctctgctacccacaagtgagccctggagtggacatgtggcaggccaagcaggtcctctgaggacaggtggcattatagattcatctgggtggttctctgagactcttaggtaatggttttcctctcagacacccctggcagccctgagcgtgaggatttgttgcctaagtgtgtcaggaatcatggagcagattgtctgatatgatcagggggccctcttcttacagaggaccagaagggtacaagcttgtccctctccttgaggtggtttctcctacagaggttggttagtgtagaattgtagtggccagtttccatgacaacaagcagtctctaggggaagctatcccctggcattctttgtgaaggaccttctcctttctcctatgctcagtccaccacccgatggccatctcagtagagaccgttc

SEQ ID NO: 31001 - DNA, 1182 bp, Mus musculus
ccaaggggaaaagagaccacaaaaggcacggtgagctggcggagtgactgtgaggctggggagctatgacgacaatccaggatgctagtgtggtaaagacaacaggtctgatagggtctgtgtgctggagccagactccagagctttagaggggccagtcattaggtaagtctggggcagagaaaagccacttttcctcagaaacaggccaggtgagtgggtacccaaaacttggatataagagtgttttctgtgcaattggtttgggtagaagaagggtttcttcatgtccagggcctgtttgtcactcacagacaccacaggggacagtcacagactctgctggaggtcacaggacaggccttgagacccaggtagctgttgtttgaccttcacccatccccttcaataacatggctccatccatatctaggaggacgctcgcacagatgctgtggacagtgtggtgcgggacatccaaaacactcagtgcctgctcaacgtggagcacctgagcgccagctgcccccatgtcactctgcagtttgcagattccaagggcgatgtgggactgggcctggtgaaggaagggctggtcatggtggaggtgcgcaaggagaagcagttccagaaagtggtatgtgatttggagagggccccatcctggaagcaggcccttagcacataccctgcatcatcagcagtatcacagatgagggactggggactacacccagtgccagtgaggaagcagagaatccaccagcctcctggtcctgctggggaaagataatggatttgggtttgttgggtttttaaaaaaaaaaaaaatctaattaaagcacaaattaattgactgcgggtttggctgagaatgcagctgcaaactagagcagaaagtttccctctgtctgtgccccagtcaacaggctagggagctttgccaggggcgatgcagagggtcaaaacttggctccctcccagtcttttttgttaacatacagtctccaagtcctattacacaggaccacccatagccatgttccaaaagactctatctcaaggctcctccagcctacttggaaagtcccaggacccaggttactgggaacccccactgatgagatgagggttcatcgttgagaagctgggccttaggctcatgagatgaagagactatta

SEQ ID NO: 31002 - DNA, 1506 bp, Mus musculus
atgggggtcattgtacttgacatgaagaaggaagtgttttatcagagagttgaggggtggaatagatagccaggtgggacatgaagggaaaaaaacctgtgaacacatggattagccagtgcaaagttgagcaaacccagagagcaatgtggctgtacagcctgcagcttgctctaagtgctagtctcctctgggggccacccatctgtagcagcattttttggttgctcattcaagagcacctccatcttgaccacttcccatcttcttatgtccctcagatcacagaatacctgaatgcccaggaatcagccaagagtgccagggtgagttcttgcctggggtcatggaggggttgagtttgagaggcgtggcctggtggcttccattgggtaacaggtcccttaagagtcgtgtcctgtctccctctctcacagctgaacctgtggcgctatggagacttccgcgctgatgacgctgatgagtttggctacagtcgctaaggagaacttgcctggcccccagcaccgctgatgccagaccttctcccgctgccaggaagctgttgtcgactccagacctggttgagggagtatagattgggtctagcttgcttcagtgtacagaaacctcctctgtcgtggctagcattgaagctggggtggagaacccgaggttagttgggggcagacccgcacagtggtaatgccgtccagtctctcccagatgattttgtatttttatttggggagagggggctggttttttttttttttttaattgtcttcaaatcaggaaagaaccatgaaagactttgtgttagtgaagggtataaccgtgacacagaggcagctgtcagctggcacccacctcgtcccccagaccacccttcttcccaagtgttgattatgtgacttctgatacatccgttctcaaactccggtgtgcccacatctgcctcctcaccagcctggtctgtatttaaagcttttgagacccaataaaatagtacctgctgtctgcagccttactgtcgtggtggagccagaacactgtgttcctgaccccagccagggggaagtctgaccacagtcctgaaagcaaggctgcgtatagaggtctaggcagccctgaggcctgctaagtccaaccatgccatgctgcaggagagcagacgtctccttggactcactgcatgtgactgtcctccaggacctctgcctcggagtctgcatggctgcagtacccagagtccccaaggctcacccatagcatgatcccagtgaggactctcccagttcctactgtgggctcacattggattgccaataagctgggcttggtaattcggggtataccccaacttcaggagactgagacaggaagatcattaattaatttaaagccatcttggactatattgtgttcaaggtcagcctgagcaacttaaaaaagttttaaaatggccgggcctataccttaatgataaagttgcttgcctaggtt

SEQ ID NO: 31003 - DNA, 1571 bp, Mus musculus
taatatacacaaatatagtatgagttttttctaaatgaacctttttaacatttttaaatcggttacatagtctgtaaggactaagcacagagaaaatgcttactaaagtagtctctgaatgtcagagacactgggaaacgactgaaggccatgggcctggcagcaagtggcacctgagaagggtctgcccccggaggggaatggctggctgggaataagattgcaggctagaccccagcctgaccatggatggcccagatgaattgcacagagctccttcccccagggactgggagctttctggtgagaaagcagcgaacttgaggccatgacctaaagcctaaactcttatctagtcatgttgaatatgcagttaactaaatgctctcctggtcactccctgcactacatactcttaaacattcttacctatactttctcttgcctaaagaaagctgggggtctcagagtcagggtctgcaagaattctggtggtgtgaagagtgggctgttgtgaaagatgaagctcactggaggcaaaccaacccccgtgctggacaactctgacacaagatgtggagtacactgatagattctgccaccgcagagcctcctgtctgcccccttggcctggagagcgtctccttaggatcatttgtttctcagatctctactgaaccctcagcttttctggtgtttccttcagtatctgaaatagggctcctcttacctctccaacctgactcctgactggactctccgaccctgtttgttttctcttggcactcactaatcatcatctcagattatctccccattaaaacatctgccttgagactttctcttgtttgcccttacatagtggctgtggaataaatatttactgaatgaaaaagaaaaacaataacaaaggaaaaggagcagtggtagtctgtagaaaaggctgagaacttagcttaacttgcttgggtccctgacctaatgtgctgatttaaagtatgctgtcccaaaatatcgctgagccaagcagagagctgttttatggcattgtcttgagaaaaccagcgagtgctccagaaagcccttgatggcctagaggtagtgaaggaagaaatcatggaaacatttagactgtactggctggttttatgttgtcaacttgacacaagctggagttatcacagagaaaggagcctcccttgaggaaatggctccatgagatccagctgtaagtcattttctcaattagtgatcaagcggggagggccccttgtgggtggtgccatccctgggctggtagtcctgggttctataagaaagcaagctgagcaaggcaggggaagcaagccagtaagtaacgtccctccgtggtctctgcatcagctcctgtttcctgacctgcttgagttccagtcctgacttcctttggtgatgaacagcaatgtggaagtgtaagctgaataaattctttcctccccaacttgcttcttggtcatgatgtttgtgcaggaatagaaaccctgactaagacagaccatttggatgtatatcccaaggacaggtgttgtctt

SEQ ID NO: 31004 - DNA, 1398 bp, Mus musculus
cctcctagccaccaaggacgatccactcaggtgtggcattggcaggaaggagcacaggttcctttagcactggcatggtttttcatgcagccttggccagaggaagacagaggtccagggccacctctgcctcctccagccccctggctgagaggcaagctctgcggccccttgccctatcccaaacctggggggctatgggcaagaggatgctgggaagagagtagaggccacacatcttctcttagccctgttttctttgtcttcacagttacgagaagcggctgtactgaggacagcggtggcggccaaggcagtggagggggcgaaccccggggcccccctctaggaacagcctccctccagaactaagtggtccatagatttgcactacgggttccccagctcctttccagggagaggagtggagtccttgaggggcctgtggcccctctcccgggcaaccccacagagtcaggtagccccccccccccgtgccaggctgccccataagatcttccgggttcccccttcttcagttccctgagcccagtcagccttggctctcaggccctgtgcctgcctcaggtctttctcactgcagcctgctctggcccaatgtccaactctgacccctggggaaggtagcccctcctggcttctcctatagggcacctctctctcttgctgcccccttcctcccaggaaatggtgctctcctgaccctgcctctggcccgtccctggagtgctgtcctctcagccatgtggcactgtgggttctggacctaggccagggggaggtctctgcccccttcctctggcttgaggctcccatggggcctgctcctcggcttacttccccatctctgagcccagggagggcctgctgatgaccacctgcccttcattcctgattcaccaccatccccaagtgtaccgtccctgccctctcttctcagctgcagttgaaggctttaactttgcacactttggggtcacaattgtgtcattgtatattaaataatctgaataaatcaagcagttatcaatgcctctgtgatcctgtttctgtcctttgccctcggggtggctggcccctgtctcaaactcagaaattcgcctgcctctgcctcccaaatgctggggttaaaggcatgcgccaccatgccaggccttgggcaatctcttgtttctactcttccctgacaacccctccccaccacccacaagaacagggaacaggagacttcaaataggcatgacccaggagttcagaagaggtctgggctagctctcccctgagggtcatttcaacttaggttgccctattgtcaatcaaggataacccagcccagaaagaaggatgaccagctgccattaatccctttcccagtgg

SEQ ID NO: 31005 - DNA, 1165 bp, Mus musculus
gctttcatctcaactgaagtgaccttgcccatgtgcctcacatccactttcttttcaagtggagtgatcagttccccaagagctgtactgctcactgctgggcctcaaagcctggcctatgcaggatatagatgctggcgaatgtttgtccagtggataaaacccttcaatggactgtgcttctatccttaggacctgacatcagccctgacccggaagatcacactgaagacaccattgatctcgtctcccatggatacagtgacagaggctgatatggccattgcaatggctgtgagtcgcttgcctgggtggggctgaacaggaacggggtgtgcagagggaagaggaggctagcctttgctcttaccatacctcccttctataccagctcatgggaggaattggtttcattcatcacaactgtaccccagagttccaggccaatgaagtacggaaggtcaaggcaagtactggactcaccctcaaaaacatgcagtctacttgatcctctaactgatgtgggacctaggttcccttccttacaatgaaatatgggcttagccccccattttcccgttggttctcaccctattgaggactctcacttctcaatggcccatcagggtcccctgtgtccttggtggccaggctatgtgccacctttgggtttctttttttttttttttttttttttcgagacagggtttttctgtgtagccctggctgtcctggaactcactctgtagaccaggctggcctggaactcagaaatccgcctgcctctgcctcccgagtgctgcgattaaaggcgtgcggcaccacgcccggctcacctttgggtttcttgcagctcttttcttcttctgtctacagaagtttgagcaaggcttcatcacagaccctgtggtcctgagcccttcacatactgtgggtgatgttctggaggccaagatacagcatggcttctctggtatccccatcaccgcgacgggcaccatggggagcaagctggtgggcatcgtcacctcccgagacattgacttccttgctgagaaggaccacaccaccctcctcagtgaggtgcctgcagggcagggaaggcagagctgcatcacagagggaactctacccccgggggccccagactggtgcctgtgaccag

SEQ ID NO: 31006 - DNA, 1366 bp, Mus musculus
gacttgccattgtccctgtctccctggccggcagggcctcctcttgctcctgagaaaacaagggttgagagtaactcagactctttctttctttcttcacaggatctagcagcagaaagcagctctacttccctgcaaaggagctgggcaccgtcgccatgaagttcatgctgaacctctatgtgctgggcatcatgttgaccctgctttccatctttgttagagtgatggagtctctgggaggcttactggagagcccactgcccgggagctcctggatcacgaggggtcagctagccaacacacagcctcctaagggcctgccagaccatccatcccgaggagtgcagtgaacctccctccctgcaggcatcacagcttcagcatgtccaaccacacgttccatttctcgggaggcagcatcaagtgtctccaaaggactcttactaggcctggaagggctgttcccttaccctggaaaagagcctatttcccctagagctgtgagtgggctgtctgtggctctgggatggaggtgtaccagttccagctgttgggagaatggattttggtttcgtttgtttcagacctctgtcctaaaggactcttttggacctaagtatcttctgttggtttaccattgagtctcttccctgagagttgtttggatggcatcaaaggggttgtggtttgactgtgaagacagagggtggactatccagtgtccaggtcaagttgtacatttaagttctttctccagtgtaatgcacatgtgtttgtatataatgtctaaagggctatgggatgatcaggcctgcttagggtatgggagttccagccactgtgtggcttaaacatgaatttttctaatgcaataaatgtgaatatatatgtttccactgtttgtcctgttgacatgcctgcccttgaaattagtaaggggaagtttaaatcctaaatctataataagtaagctttatctctatttttatttttgaggcaggatctcactgtgcagccctggttgtcctggtagtcactatgtagaccaagctggcctcatagagacacctggtgcctcttttgcttctctagtgctgggatcaaaagtgtgcaccactacatttggccatttttacatacatacatttatttatttatttatttactccagaagagggcgtcagatcttgttacagatggttgtgagccaccgcgtggttgctgggatttgaactcaggacttccggaagaacagtcagtgcttttaactgctgagccatctctccagccccctgtttttactcttgagatagtctatggtagctaaggctggccttgtcccccggattcacctgcctctacc

SEQ ID NO: 31007 - DNA, 1193 bp, Mus musculus
cttaaggagctctggtgtccttttctgacctgcaagcagtagccacatacatgatgcagtgttttgcaggcaaaacactcatgcacataaagtaatcaaagaagaaagaaatgccccttgtccaaggccacacagctagaggtgctaattcacactcagacaatgtaacttagagtctccactgcctcccagatagacacaagacattcaagtcttctactaaccttaacaccagtagtgctgagaccgcacattctgagttaggtagtcaggagccagttctgtgttgagtggcagccctttaccttcagcttggacctgatttggaggtgtgatcaccaaagctttagttcaaaacaaagtgtctttcaactgctgcttctgaaatcaaaagccatttcttcatgcttggtttaacttcacctggatattcattgtttgatttatcgtttgtgagatctgcctgttccctttacttttttgtgttttcgggaagttttttttaagatttttacacaatttttgttttctagatgatccagatcctgatgatggatttaattataaacagatgatggtcagagatgagcggaggtttaaaatggcagacaaggatggagacctaattgccacaaaggaagagttcacagctttcctgcaccctgaggaatatgactacatgaaagacatagtcgtgcaggtgggcgaggcgagggtcccggcagctacggctgcagcccagcttctcctgtgcccatgcgcttactctgctctgtgcttgcaccgtgcctggctgtgcagtggccgcacactgaagctaaggagcattgctgcttttcttcagtaccctaggtttatcataacactgtctatcaaataatgtatttttccacttcattgctatgtcatgaagttaaaaattagaggaaatcttattccaaatatcctgtgattggtgttcagaagccaagtaatgacatgacacttaggagttctcccagaaggcagaatcatctccctcattagcaagagttcagcatgactagggccacagtctttgtcatttggtagtgtcctccaaaggactcagctattctaggtagaagtaaaagaaattgctagtatttacctattttctaactaaaaggatatgggtttccctccctcctttccttcatttcttccttcctttg

SEQ ID NO: 31008 - DNA, 2951 bp, Mus musculus
ctttacacggaaccatatcctcagctcactaatgactttcttgatgaagtgtgtgtgtgtgtgtgtgtgtgtgtgtgtgtgtgtatgtagaagggataggggatagcatgtttacacacgtagagggaactaaaaccttaagttattacagtctctactattttatagcagtctttctgaatttggaatggcaagtatatggcctcaattcactgttcactctggtttcaggatggcaagctcaccaaggaggagattgtcgacaagtatgatttatttgtgggcagccaggccacagatttcggggaggccttagtacgacatgatgagttctgagctgcagacagaggaacctacatttcttcaaaagtaatttatttttacagctctggtttcacataaaattgcgctactgagactgttattacaaactttttaagacgtgaaaaggcatattgagatagtgaaatcacccgtccccactcctcctccctctgaggggctggagggaacccgagcttccgaggaacaactctgattagtacacttgtgtctgtaggtttacactttgtataatgtataacatggtgtgtttatttttgtattgttctctagttggggctatactatgaaggatcgagatcctccacccacacttgtaggcagatattagcatttacacgtcctcaatcctttaccatagtttttataattctcacttaactaatttttttaaagcctgagatcaataagaaatgttcaggagagaaaaagcaaaaggaaaaccatgtgtgtcaggatcgatgcttagaggagaatgctttctcttgcctgttgaaaagtctcattgcatgagttgctgctcggttgtcataggcccagccactgagcctgccattgtctgggcaacgatagagtcctgtgctgtaagacagcttgacacaactcgatgtcattctttttcccctttaggactagctgttttctaattttgtcagacacagctgtgctaggaagaattagggccagtgtcttgaaaaatcaatcaagtagtgtgtatgatgtcttcacggggctatttctagctctttatagagctgtttccaactagaaacagctggaaaacaagaagaacaaagtgtatgcagggcatgcatcttactcttacttgaaatcactgtaaggccccatccagcccctttctaagaattaaccttggttttactgcagttaaagttgattcttttccaatcatgacattgaaagtgcctttaacaggaaaaatgatcactgaatgggaattggactaagataaacaatttgggcaccttccatgaaagcattgaacttcctgatacagtggggtttccccctttttctcttgagaacaggagctaaatagcagtattcattacaagcttgcttgcagtgttcttaccttgtgggctggttcctaaacctcaccctgctgattggaccagggatcctcatacctcagaaggcaaaccactcttctcccaggcctctgctcaccagggcttgagctttgcctcaaggatagaaggatgtacagagggggctcttggtttgaggaccacttgagccgttttctcatctccctttctctctgacacaaaaaggtggggttgtaggagggttgtagatcatcatgttgccatccttattaaaaataatcatcatcatcatctgttgccaactccattcacctgttttggtctcgagttgatgggcctcttaagaattattgtaccccaagtctttaaccctcaggttactaagatgaatacacatctgtataatctttattacttcctatatctctgaacaacacattcaggtggtgctgggtgatggccatatctgaacctagacttccctttggtcttccccaatccagttgaggtgggcggcctggtgtggtaaaagcccagttgtggtgtgacttcaccttagccattgcatcaagctcttgatagcagatacactcttacgtttctaaccccagtctaggagtaatgaacatcactgccttccaggccctcaactgtattgttaaggagaccagagataatgaatgccaccaaccctggcttagaaagggcaggtcacacactgtgtggcaagagggcattacagctcattaggtgcacagagcctaatgctagcgtgaaagtcacacacttatccagcaagctgagtctgctaggatggcatcttctggacctgggtgctcagcagcaaaaactgtgctctaatgtctatgagcccctcatagtgttggggtttgggtgtgggtttctggtttaaatcaagtctgaggcagtgagcagtggtctcatgtctatagagtgtgccctgtgaatgctaagctctcttgaatttgagtattggttcttttttttatagagtgtaaaccaagttttatattctgtaatgcaaacaggtacctatctgtttctgaataaaactgtttacattcatcaagggcttatgtgtcttttattctcttggaaatgtgattatattccaggtcagccaaggctgcatagagagactctgtctcaagaaaccaagaagaggctgaagagatggctcagcatttaagagcactgtttgctcttcctcaggacctgggttcaatttccagcacccacatagcagcttacaactgtctgtaactccagtgtcaggggatccaacactcacatagtcacacacactggcagaacgctgatgcacatgaaataaatcagtaaaaagaaagaaccaaggaagaaagacatgggtttagggtactatgataaaatgtcagaaaaggaattttcccaactccatttacctatcaatgggcctctttaagaattactgtattccagcctttaaccctcaggttactaagataaatatacatctctgtgatcttttatcac

SEQ ID NO: 31009 - DNA, 1128 bp, Mus musculus
ttttgcaactgttccaggctgccagtatgaggaattcctctgctcttctcaaggctctgggagcagagaagaaatgatacttctccagtttatatgggttttaaccttggattcttctctctttccctttgttttctcatcctcattatctgttgggtttgtgtgtgtgtgtttccatacaatcacgtgtctcccggtctctcctgtgcttctcatttgacatgttgcagccatcccctgcccctgatccccccatattctccttgcctcttgtaggcctggtggtcatatcagctctgctctggtgctggtgggctgagacatcgtcctaacccaggtactggtattgcttcctctcttccctctcagcttcttacttctcccattatacaataggtgatgctcaggtctgagttttagccctggcttttcctttttttgctgtaaaacctacaagcttccttgagcatgccatgattgatgtatgtaatggacaggttgttggagtgctttccagaagcacaggttgagtttctgtctttggctgcgtaaaatttggataagaacatctctgttgctactgacagagctgctccgctcttctgatgagctgatgtttgcttaaattctagagccaaacatttgccattgtttgaacttggaaggaattcctccctgtgtttaaggtgatagaggaggtctaaagagctgtggtccttctggtcctctggggagcatttggatgagcacactctgaattggtcccatctaccttgaaggaagtagaactgaatccccattgtactatgttgctcaccttaaaagttctcaaaagtttggaacttctggttaccagaaaaatgtcaacaaaataccagggaattatatacattcctttgggtcaccagattccattgtcattggcctctcaagccagacttctggagagggtgtgatgttgctgaaaagtttctaatgattagagatgaaaatactctcaggaagtcaagagcgacgtgttctgggcacctctcccttggcccagttcatgtaatctgctctgttgacagaattgccagtttaggatggagattgttccatggtctaaggtaggaacccgaggtgcct

SEQ ID NO: 31010 - DNA, 1205 bp, Mus musculus
acctgtacagtaatgagcttcttctctcggggtttgacatcaggccattcttctccaaagcaaaagaagatctcaaaaggtggtggggtattagtctggcccttctggaacaggatgagctctgcatcaagatgaaggcctttagttagaggttacaacccaatcctgagtgaggggcagccaggaggagcacagaacagacctcaccattgagaaactgctctaggctaaagagcttcgtcttgacttcccgctgaatggggttggggcaggagccatgggccaaggcgcagggcccactccagaacaccttacactggcacagacggatggcgtacaggtcctggccctgcagctgcaggatgagcccacggtccaggacatctagcagctggttcgtatagaaacgctgcttgtcactggggatgtcctctgggctagggaagcgcacttgctccagggtcacagggccaaagagttccacttgctcctgggtagcctctagctggctgtagaagagcctgcagccttgtgggttgctgatggtgagggtccggggtgcgcgtccccggtactggaacttgatctctaggtccgtcactgtggagcagagagtcgggttgccctgactgtgagcctcacagctactcagcagccgggtggtaggcccaacttccccagcctccccagttcagccttgacccaggaagactggcctaaaggcttattttcttcgccatcctcctcccgtgcaaccctgccccatccccacgactctgccctggcaacccgcctggcctgtcaaggtccttacaaggcaacatgtgggggctgatcagcaggtcaggcaagagtggttctgtagggggctggctggaagccagaggtccaggctccaggacctcagggagaagctgcctgaagccagcaggatttccagagggaggggccaggagatttgggtctgggacagggggacccagccctacaggtggctggagagcaggtggccacttggtgtcttctttgggtaaggaatagggtgcgttgggaggcccaggtagcgcaggctctgcagagaatggggtggatacagctgctaaagccacctctaagaactatctcccaggcctgactcccagacttgcctcccacagcctctctctcagtgccctctcaagtacctagaatacccatcacttctt

SEQ ID NO: 31011 - DNA, 1624 bp, Mus musculus
gagtctagatcagtgcttgttaaaccattgtcagtaaacagagtgttctttcagcattaaatcttacatgaaaactctgtatttactaacagactaaagtggagcttttcagatggttttgcattgtgttggcttcctcccaacctttccatcatccttagtgtctgcagctcagcacaggagccatgctgcaggcagtgtttcagcgaagtgaatgctaccttggagttgcaagttggaaaaagccagtttggttgtgcttatttgttaaccagtgttctgtaacggagtccacagcactacctctgagctggctctgtccctgctcaccctgctcactctcctctggagctcattagactctctcttctcttttgtcaggaatgtctttttttattagaagacaggaagaaaacaacccagactgtgtcccacaatcagaaacctctgttgtggcagaggggccttcactaccaccagaccatcccgccacacagggagagacttcaccctccaaggcatcctaaggagtccctgtttgggatgtgagggagaaacagcgcggtttttaaggatggctggagcctgtccgacgtggtgggaggggaactagtttcctggtgaacttctttctaaaaggaaaaataatttaagaaaagttaaaaaaagaaagaaaatttttaaaaaggaaagctgagatgacaccagaactgaaatatgcacctggtagcagatgatgcacacacatgatagacacacaccagcatgcagtgcacacactgagacacgacagtgagacagacacattaccttagggaagcgcggggatgcgagtaggtaacatagttacagttggaattaaagaggtagggtcacctcctctgctctccttcctttaaacacaggtgaatagaggaaacacccccccccccaactgttcacctttagaaatgtccagacaaggagcctggtctgcttatatcatggttagggatgatagtccggactagccagggtcaaagttgcttttaatgtagagcccaaccctgatcctattgagttgctaagtccaatccagttcatgggcctttgtcatcagccttggggagaaaagccaaaactggtgggtggagaggacaaatatggattaaaccttgctctctctctcttttagtgaattattcatccacaaacatggggtgggaagggataaaaaagagggtgagagtctggagggaatgtatttacagggctacctgtattttgctaaaaaaaaaaaaaaagtgtgaaaattaattgccttcaagggcactgttctgtcctgtggtgtagccatcttatgaataaatcaacagcaccaaaaaaaaaaaaaaaaaaaaaaaccagaaaaaagaaaaaaataaaaccaatttttaaaattttaccagtgtttttatttcccttcactactcgctgttcagcaatgacttggctgatccacctatgaaatcagctttcatggaacctaaaaggcgtctaagcagagagcttaaaacgacgtatcttgtaggagtaatcttgctcactgtgtaaagagatccataaagggctcagcagcccacagcaaggcaggatagtaaggtgg

SEQ ID NO: 31012 - DNA, 1173 bp, Mus musculus
ttgtaatatcacaccatacaccagcctgtgctaggctccttgccctccatcctggcagtgggaaaatgaatggcatgagcttgcacacatacttggctgcttccttatttagcacatggtttactttgaaatagactcaaaaatgtaccattattagtaaagcttgttaagtaccagggatatagctcagatggagggtatagttgatccattacatgtttatggtggagaaaacctaaaagaaaataccctatcatcaactcctggaatcccagtcaaggttttcatcatgattttggacctttatatttgttgaatgaattggtagataagcattttgacacttttctgttggatagctcttaacagttatccccttgggtgtttaaccagcacaggatggcaagtctgctttcttggaagtttgagttctaggctatatccctgtgcccgagtcccttgtcaggagagtgtgaggaagtgccttttccgtttgcttttgcttagcccggagttcagttagctagcctgctaggaagataccagaagaattaagtttctcaattggtttctaagtgggtttcagacaaagggaactttgaaaaaaatggagtcagatgtacattacttccataataactggacatctcagcatttgcggagaaccaggttctgcttattcattctccatttctgtgtgtgttaacccttttctatctcctcctcctccaagaggaaatcctgagcagcctgttcagctagaaaatcaatggctgacagactagttaccagacaaggctttgtaaacagaatctgtcacagcagaaaaatggaaagctcgggaccttagtgagccatgcgcacagaactaaaatgctccgagccttatggaacctgctggccatccttcctttgagggcatctgggtttcttctcctggtgtcaggaatgtcaagtagtactatagacactcacaccttctgagtcacttttgctcactgcccctttgtcataaatgttttttaggaatgggtttgatcctctgagtaacatgaagtcgataatagatgaggagactaaggcagagattggtgtcttgcccaagaacacaagagctagaaatcagccctaaacagtttgtctctgagcccattccttcagaaccaataagct

SEQ ID NO: 31013 - DNA, 1099 bp, Mus musculus
agatctccagttcctttcagctttgttgattgcaaactctccctcccccctcctttcccccccctcccccccatgattccaggtgtggaccctgttagcagttttcctctgcaggtatcacctgactctgacatctccaatatctggggtctccaacacattccatgcttcacctccacagcctcatgcagtggcctctctgggccatcatccagggacactcctcacagatgtccggcctcaatggcttttcttaactgaggaggaagattccacaaccccatcttgtatccttgagtctaaagccagatccagctttagactcaaaagtggtggttgaagctgccaagtgttgctagctggggctggtaattgattccctaattcaaatgcatttgtatcagctttctgttgatggtttccttcagtgctaaagcttttctttaatttcttttcccaggttggaagcttagctgggtgggctcttgtcctgaggccaccactccctttattccgtttagcatctggtttttctttaaaccttttatctcttgagcattggacttcactcctttacacttcctgctgctctcttttgtcctctgcttaagggggaccactgatcaccacccacagtcaatagtaattttgctgataatccaaaactccccaatttcatctcaggcagacttttttggacaagagaagaaaatagacccattcttaaccaacatatcacaagagcattctttaggccacttaatactctcctcctctgaaacctcttgagccctgctgtcatagtctacatttctctcaactgtcttccacattcctgctacgatggcccattaagccctgcttaaagtgtccaaccaattttcgtcttctaagtcccagagtcttccatattcttccaactaaggttacacctatcacagcaatgccccactccctggttctatagctgtgaaaagacaccatgaccaagacaattctttctttctttctttctttctttttttttaagtgtttacttgctggttagttcattatcatggagagaatggcagcatgtaagcaggtatggtgctggaga

SEQ ID NO: 31014 - DNA, 1135 bp, Mus musculus
cttttcttagtttcttccaatcttctcaaagttagagcaggaacatgctagcaccacctttcttaccatctctgttttccttggtttctctggtgtccagatatttactttgaattgcttttggcctttaagctcaagagtttctggcacacagcagttttttaggaatagaccaagagtctcatccagaagagacttcacttggctggcttctgtctctctggagagaagctagatctgcatttgcagagctcatcaatcaagaatgtttgaaggcctaagatagcattttgtttatttagtccaactaaagggagttctgtggagttggttggtgtctttcgggagcaaggtaagtaatcctaaaactcactcaatttctctatgcagactttctgtcggtggctagagaattccttgaaaggtttgccaaaagagaccacagtgggagctgtcacagtgacacataaacaacttacagatttccacaagcaagtcactaggtgagtgatcctggggccttgtgaatagaagacagtggctgtgttatgtagaaaacgtgtctgcttagatttgaattccctcagttggcatagagtgtcaatggatagcaacatcaccatgctctgtgtatgcacgtgcgcatgctttgtggtttccacatagtattcatggcaataactttctttttagtataaaatgaagtttgttttggggcttaagaagggagtagaggcagagatagagggggtacagagaaggacagagagacggggaacatcatggcagtatcttcctttgtagtttataactgttagcctttctctggtaggtagaacctttaaaatcttggctaaatgttaagcacaggcttctactctttcattttactgtatgtgtagtatgtgcaggtggcgcagtgtatgtgtgggtggtacagtgatgtgtatgtgtatgtgtgggtggtgcagtgtatgtatgtgtatgtgtgggtggttcagtgatgtatggcaaggtcgatagtgtcaggggaagaaacctggaaatacagtaactatccaccaatagagaatggtgaagtaattcatcatatgtccacactagtgaatagtcaccaaaaaagaaatacatgtgc

SEQ ID NO: 31015 - DNA, 1173 bp, Mus musculus
gattcacttttgatgttgtacattctgggttttcagaagggtccaatgactatttaccattataatgttattaaaagtattctgtgctctattttagcctccttccctattattcctagcagccagtgttttttgtcctgtttcttggctgcttttgtagcctaatcttgttgttaatgcctaatctcctctcactagatttattcagcgaagccctgtcaccttgctgaggagccaggttgtcatcccaatcttacagtgggccattgcatcaaccactttggaccaccgagatgccaattccagtgtcatgagatttctgcgagacctcatccacacaggagtagccaatgatgtgagtatatatttctactccatggccctttctcttgtttgtgttcttgatttgttttagttgacctataagggatcggccactgatgatccagttactaacttctagatctcatgtatctgttcagtgctgtaggctgtgcaaaggaacattaagccatctctgcttctagttatctgttttcttacagcatgaagaagattttgaattgcggaaggaactaattggacaggtgatgagccagcttggccagcaacttgtcagccagctgctccacacatgctgcttttgtcttcccccctacaccctacccgacgtggctgaagtgctctgggagatcatgcaggttgacagaccggtaaggctcttcataaagtagatactttatagatctattctgaaggtccctagcctaataagctttgcttccttgaaattggccctaagtttgaaccagctatactgtgtatgttcttggaaccaaatttattgctaagctccatttcaaagtaaaggagcccatagaaagccagtaattatttcatcatggggttcctgaaagtgtgttttgtcattgccgtgaggttcataatgtatatcaccagaagtaagtaccaggctttgggctcactcacttgtgtctagtctgtgggaaatctgtacatttatgagagatacctgcatattagttatatccagttagattattcagtatacaatcactctggaatctgtagtggactataaattagtgaatacaaatattaaaagtaaaccacagtatatacacctggattgatttcccctttgggtctatt

SEQ ID NO: 31016 - DNA, 1242 bp, Mus musculus
tggcaaacctcttggtaagctatagttcttagagccttttagcttttccttttttgagagagtgtcttacaatgtagctttgactggtttggaactcattatgtagaccaagctgacctcaaacttatagaaatctgcctatgtctacctcccaggtgctgggattaaaggtgtgcaccaccacacctggctcagctttttttaatgctcaggggcggttcagacagtttctatatatcgttactaatttggaaaaacaatgcagttaggtttaaaagaaaaataatagaaaagtagtagtatctgtcctgctgcccacatagccagagttgcatggagtttgcttgttctagtggaagtgaacaagcggtagtttaatatttgtgtgtttgtgggatggcttcaattatatttgtatttgcttgaataggctagaagaaacggttgatgtaagtaaatgactctaccacttgattttatgagcagagagcatggtctgggttcttagttaatttttctttcactgtttggggcttttgtcttttgccagacacaccaatcctattgtagaaaatggacagactcatccatgccaaaaagtcatccaggaagtaagtactgatgggcgttctcttctttttcttttagggccttaaggacctcagttgaagagacactgtgtcatttgttcataaggagatttaaactattattatggcttgattttaggtttaaacttgataataaaattggtttggaaatgcactgaaaggccaaaaaggtagaaattctaaaagtaactaattgctagggagcttaatcagccctagcacaacctttttgtcagtgctaatgacattagctcccctctacgtaatatttcccttagactttattcactcaagataatgtgaggatcaaaaggcatgggattttttgcttgttagattgcttgcttgttttgtaaattttgtgtatgtacagaggtcaaaggacaacccataggagttgactcttcccttgcgctgtgtgtatctcagagatttaacataggtgtaagtttcggtggcgagtgcctttactgttgtgcagtctttacagccagagtgatggtttttagaagtgcattaaagacttcagaagttgcataaatactagataaccttagttgttcactgtagcagatattgctatttataaccctgtacttttgtttgtcttccacttccctgaagctgcctt

SEQ ID NO: 31017 - DNA, 1207 bp, Mus musculus
taagctacacaattactttggatctttgtgagtttaaggccagtttagtctatgtagtgagttccaggccagccaaggctacacagtgagacttcatctcccaaaaaccaggcaaaaataaataaaaagaaaattttatatgagtctgattgaggaaaaaagacttttcattttcttggcatgtctggaagtaaggaagatgatgtcatggtgaggtctgacattatggggctgttcataatgtactctgatcacactggcatgcatttctgtaatcctagcacggggaaggtagaggcaggagaaacaggaggctagttgctgcatagtaacttcaagactactctacactacaggacaccttgtctcataagacagcacaaaacagttttcagaagaaggtttaaatgtttcccttggactgcagtggttctgatttctgcttctgcattccttctgttttccagcaacaagataagacctcatctaacctacacgaagctgcttcagactgtgtatgctcagctctctatgctattgaaaatgtagagactaacttgccattggccatgcagctttttcagggagtcctgacattggagactgcatatcatatggctgtggcacgggaagatttggacaagtgagtaattgttggagtctggagctctgggttacctacagcctgtggtttttcaaatctttgttagttcacccatcgtgttttgattctctgtggctttgtgaatataaagtgcatgctatctgaagtgccatcttggatctgggagaggattaattactaccagttagtgattgtattttcttaactcttaaaatgagaagactataagaaatagtcataaactttaaagcatctagttgaggggctggggagatgactgagtggttaagaatgggctatgctcctgcagagaacttggctttggcttttagcacccgtgtctggaccctcacaactgcctataattccaacactagggaattcagtgctctgtaccatgaacatttgcattcacacatgcgtatacccacagagagacatataacctaacaaaaacgaccaaggtaataaacatttttgaaatgtctgattaggaattttagattttttaagatttggttttgtccttttgtatgtgtgtgcgcacacacacatatgaatgcaggtgtctgcaaagaccag

SEQ ID NO: 31018 - DNA, 1226 bp, Mus musculus
agtagtgcagattatagtttagatgaagctttgagtctgggggattttcctatgtagtttatatttctggtgtaaacataaatgtcagaattttatcccttacactatagttgccgccatcttgaaattattttttaaattgataccagttgattattggcactcaattaagagacattcttctgtgataatggatacggttctggaagtccaactgccagatgtcagatctggtgaataatacactacaggatatagctctttcctctctgtgtcttgaacctcatggcagctaggatgtttcaagcctacggcccataagctgtcttaaaacattctcgtcttgaagaagttgcattgtgttttactttgcttaatctagcacaaaggctcagataaaggcagtgagtggcgacttttggtctgacttgttttatgccttttataaaacttccctttaatggtgacttaagtataaagatatttttaactatatttctcttctatttagatgacatgtgtagagaaagcaggaaccgatgagaagatgcttatgaaggtcttccgatgtttgggaagttggtttaacttgggggttttggacagtaacttcatggctaataataagttattagcactcctttttgaggtcttggtaagtaaggctgcacctgccattgccacttttaataaccaaccttctgggacacctcagtgttttgttggagagaagcactttgtgtgtgtcttaagactaacgtaaggagaagttgagattgatgggaactcaggacctctggaagagcagtcagtgctcttaactgactgagccatctctccagcccccacccttcttttcctaataaaatgtctttactcttgctactttaaaagcaggggtggttgtgatggtagagagatgtagtggttaagagcactgattgctcccagacgacgcaggcttgattcccagcacctgcatggtggctcacaactgtctgcaattccatttctggggggtctgacatcttttggcttttgttggcacctggcgagggcatgccacacacacacacacacacacacacacacacacacacacacacacacacacacacacacacacacacacacacgtaaaacaccgtacacataaaaataaatcttaaaacaatactaaaaattgagatgatttacatgttagctttccaacttcagagtctgtt

SEQ ID NO: 31019 - DNA, 1191 bp, Mus musculus
tctgtggaggcttctctgttgacctgatggagcatggttgtcaagcagttttcaaatgcttgcttttagggttgtgagtgacaggagcctgtcttgagagatttctgtcacatgtagagaagtcagagcatatacacacgaagcactagaagcaggaagacagaggggtgcaaggcagtgtgggttggaagaggacatctatagggataacagaatgatagtgatactaattatcatttactacatacaaataccattatgagaactttagtccttttattaatcgaatccttacgccctatgaggtaggggctactctctcagatgagaaaaatgaaatagtcaaataatttgtccaaggatatagagccattgagcagcagtgggcctccagtcagtgtatctgctcttgcccagtttcccagacccccttaaccctgatttaatctctccccgtggtattttctttttccttccccgtgtcagaacgaggtacaaaacatcaagttcaacagctcaggccaatgtgaagcacccttggtgcgaacagacaaccccaagagctggtatgaggacgtggagggctgtgggattcagtgtcagaacccgctgttcaccgaggccgagcaccaggacatgcacagctacatcgcagccttcggggcggtcactggtctctgcacgctcttcacactggtgagcagtgctttatggacaagggtataggattgacagcccaaggagcagggacttggtaggggacccacagaagcttatgaggggggcttgggttcagatcgaggcatctgcagcagaacagaccctcacttcactgcatggccgcttctccctttaggccacctttgtggctgactggcggaactccaatcgctaccctgcggttattctcttctatgtcaatgcgtgtttcttcgtgggcagcattggctggctggcccagttcatggatggtgcccgccgagagattgtttgccgagcagatggcaccatgagatttggggagcccacgtaagtatcttggggacccagaggtgagggtgggaggagaaagcctgtaatgcacattttccttagaaggaaggagttggacttgaaggcagccataatgggtaggatttagcattgccctgttgtgttcagtgttgagacttgtgattctccagagatgat

SEQ ID NO: 31020 - DNA, 2168 bp, Mus musculus
ggagatgccaaggcttgggaagcctggagggacgggtcccagaacccaagaacagggattctgggagggaagggtggaaagaacagaacaaagccctaagctgtgctctttgtccccctgacagtgccaccagaagaacaagccaacatgtggctggttgaggcagagatctccccagagttagagaagcgtttgggccggaagaaaaagcggaggaagaggaagaaggaggtgtgccccttgaggccagcccctgagcttcaccactctgcccctgttcctgccaccagtgcagttcctcggctgcctcagctgcctcggcagaagtgcctggtagctgcaaacgcctggggaacaggggagtcctgccgacagggagcctggactctagtctccaaccccttctgcccagagcctagtccccatcaagatccatttctccctggtgcctcagccccccgggtctgggctcagggccgcctccaggggctgggatccattcattcccgcactaacctaatggaggctgagatcttggatgcagactcggacttctgagcctgcagggcaggtcctaggatgggaaagacaaatgtacacctttctatggctcttcctgagagcacacctctgggtctcatctgacagagtctgtgggccaagtgtctgcctagaagagctgtgtatgtctggctagaagcagccaggccatggaaacaagttgaatacagcgattggtaggcctcatgtcagaatcaggaccctgcacttcaggacccttgcttctgcccaccaatcagagtctgactggcagtgttagtctccgacagagcttgtactagggcaggaatggcagagacagggatgatggtacccagagtgggctgtggtggtctgtgaggtaaccaagcccatgtctggcagatgagggctgtttgcccttttctgtgccaatgagtgcccttttctggcactctcagaccaaaagtgtttattgtgtcatttgtcctttgtctaggagaggacaggactctctttttcctcttcctggtagttgtaatgaccactcccataagggctataactgttcttcacaggtggccctgctcaaaatacatcctctcttttcccgttctatccctacattcacatctcagttccactaggccaacctcttcctggttagcaccttaaaactgcagtgagcacacacagacacacacacacatacactctcacacacacagacaggcatgcacacacacacacacacacacacacacacacacaccccttacttctgagctctgtcttaagagactactggttcagctccaggcctctgaaagacatgttatttcttcctcacatccatccagtggggaggaccctctgacttaagggaccaccttgggaagcttctgtagcttcagccaggcaagaaagcttcttccaacttctgtttctggtgggagcggggggactcccactttttacaatgtctagtcattttcatagtgccccacattcaagaaccagacaacaggatgccttagaagctggctgggttttgggtcaggggctcagtatgagaagaagaaatatgaacagcaaataaaacatttttgtataagctcatgcgtgtttcttttccccagccccagctctggcttatgtacctggtccagaacttccatgaactcctgaggtctttttcaccagtggaaagcttgctggtgtggtcatgactgacagatacagggctgattcagcgtaatatgctggctgctctctctggctacttggcagtaaatgaacaaaaggtgcttgttggccacctttgtatccttaagttccaagcataaagagaatgaaggacagacatgcaggatgcccttggagtggccatgggaagcgagtgttttcctggtggtatacagacgggcacagctactgccagtcccaggtttcaccattgcagggtggcatgctctgcctccttccagagatgttaggtcgggtacattctgatccacagcttcctttctgggcagtcaaaggaattcaaacacaaggagagcttgttggttttgcttctttaaaataccagcagaagattgggaactgaattcaagtgactagattatgtagcaaggtctgtggagaaa

SEQ ID NO: 31021 - DNA, 1145 bp, Mus musculus
aagatcttctcaaaattaaacggaccaaactgactttggtcacgggttagcaaacttattttaggttttagactatgtggttttcatcgtagctgtttcaactagtgtcatacaaatgtagccataggtataatacacaaattctaagtgtaactctattttaaaaatacctttatttatggaatctgatatttgggtttgccataactgccttgtgccagatacagtattcttttgtatttttcagctattaaaaaaaaagaagaaagaagatcaaacctatacattacctttcctctcttgtccttttccccttcctccacagatacatacacagaaacttacttttcaagttataaaaaaaataaatattataagaaaaaaatccagagtctgaagagatggctcagaagttaagagcactggctgttctttgagatgacccagtttgattcccagcacccacgtggcagtttgaagcatttcataactccatttccaaggaaattcagagtcctcttctgactgagggcaccaggcatacacggtgcacagacaaacatgcagccaatacccatccataaaaactaatgaagcggtaaagagtcactggggtcaggaagatggctttgtgagtatacgagtgtttgtcttgaatgtgaccctcagaacccacagtggaaagaaaactggtgcatggaagttgtcttttgcctttcacacactgaaagaaagatcagttgtcatcagagttaaagcaacataattcattttaaggaatatttgtgtttttccaattttaatatctctgaaattgggatgtcagtttaattggcaacactcttcctgaccatgtctgtggcttacctggccagcatcttcgcctttgttcctctcagatctttctctatgtttaatttacatctcttcctttaatcctgtcctttgacataccctcattatttacacgttaccttgggattcaagacatttttgaatctttcccaatctccagcattaagatcctgccatgtctcctggccttgcccttgtgcttcgatgacattatgtcacatgttcccaagtgtactggtcaacattctttgcctttgctctggaatctctccctgacttgaaatgtcctc

SEQ ID NO: 31022 - DNA, 3786 bp, Mus musculus
cacatttttgttacttattttgtaattgtgtatggaggtggaggtgggtgcttgttcatgatgcatgtgccctggttgcatgtgtggaggacagaggataacccgtgggacgaagcttcccttgtaccgtgtgggtcctgtggagactggcaggcttggtggcaggtgcttgtctccactgagccttctcaatagcccatggccttttttcactgtatgaaaaagagccacagatatctatgcttaccatatacactaggaaagcccttgtctccctcttacacctttaggcaggctccttatgttccagtcccaccagcagataacatcagtttcaactttctttttccctccaggtattaagttcctgtaatgcaagccagaagacatgttaaagaatagaaccaagccttttctcaaatactatccaaggaagaacctagcaagctgcttctccaatcagagctgcccgccgtgctcatcctgtgtgttaggttatttatttattaaaatctagaatcctgtgcctgtagccttggcccagagtgtggttactaactcgtggggccgtgagagccacagaggacaggctgaggaaggaaagaaatgggctagccattcctcgtgcatcactcgcattattgcccattaatggaatccccagcgatgaccatgttctctccaggctcaggagttagttcagggatgccagactccttgttacttagggttttctgaatacatttcagcagctgcctttctcaaagctttggtcctttcccaggtgaggccttttggaagccactgaattaataaggcctgaattctcagccttgatagttactgtcactgccttccttataaaaaggctggggaggcaggagtggtaaggtcttgtaagctgcaccaagaactcagctgtgcctgtgtccgtgcctactgggatctcttctcttacccaggacttctttcttctccttgactaactatatccatttcaatgctttctggctctaagagggttgtgactccatgatcttaacagctctggtgttggtcaggcatttgttttactttctaaccctactaaactctgctcaggaagtagccagccagctccactgggacccatagttctgctttcttcccatttaactggactgtttcctaggaagccccctagatgggcactgtcagagaaggagagccccgtatgaacagtgcttctgttgtgcctgaaatgatgcttggagctgagttggcgaaggtgtttgctagagatttgggggcttcagactttagagtgggctatagcttgatatcctaaagaaagaagtttttccaggaaagactttgcagcctggctgcagaagacaggagactttgtaaagtgtgtcgagatgatgaaacctagtttgagggctggaggttagctcagtggtaaagcacttgcctggcatgagtaaggccctgtgctcaatcgctgggaactaggggaagggatggggcactagtttgaacctcatcagacattcatccctttggctgttagccttggtgaaagtgagatctgcagtctgatagcttatctttctttgctgctgctgctgctgccgcgctgtatcgttattatgatctggccccttctgtttaaggattctgtttcagagagtttcttaagtaactccagcattataaaataataatgtaaacagtgtgaagtttctcattctacccaagagtgatatcctttggagatagactgagtggtttcgaggtttccactgggatcatttgatttcaagaattaacctggagtgaccctaggaatcttgagttgaatgagtccctctcatggccctccctatttagaagtctcctgtttgttccccatgtgtcttttacattgatacatcttttacattgtatcaagagcaaggtcattccaacagaggacacccagaatcactgaaaccttcctctagatcttctcccctggctccaccatctctgctgtcccttggtctttgtgtgtgccctggaagctagtctggaagtgtccttattttctaagatagggaaacagaacttgggtaggtggctggtttgccttatggtatacattctggctcaccccagaagatggactcttgccaggacagcatctgtggctgtattctgttgtataaggaagatcagaaacactgaagaccttaccgagataggccgttctgtttgcctcattctgatttctgtattagcggaatgcatcaatcactctcccactaccatatctgttttgttttttgttttttgtttttttgttattgttgttggggttgttgttgttttgagatagtcttgctctgtaacccaggctggactcaaagtcacggcagttctcctgccttggcctcctgaggccatgtgctactatgtctggcctcataattggatctctttagtgaaagattcatatctctgtgcctcattttatgtccagagcagattccgttaggcaggtatctggcttgggccccaagtcatatcctggtgattttctgcaaagcctagctctctacagagcttcttatggctgccacaccatagggaagagatcccctccaagtaaaaaaggagccacatgggtttctaagttacgttgtacctgactgcccatagtgaggtatctgcctgtgagttacagatgacatctattcccttctctctggagacttctgtgtcatcaaccattaagaaagtagccagaaataggatgtaagacagtgataggacacttgattagcatgtgccaggccctggggcgaatgaatcccagtacagcaggcttgtggagagttgggaagaaagaagatagcccaggttctgccctaatgctggaaccaaatcattgtttcctctaaccttggaataagagcaaatttcttcttattccaactcttccttttacaagcactctagctacctggagacaaggaagagaagactggttgtctctggttatgtggccctgggcagagggaaatacaccacttgtctacaatgaatttgtgctacttcaaggtcttcttgctgttttagtggaaatattgttttctttttcttgttaaacaaaaatgcctctaatctaccttccctctgccctcctccctcctcatgttcccctcctgggagagccaggctccccacggccacacactcctgcaaagctttttctgctgcttggcttttctctgaaaagatctgaaattgctgctcctgtgcttttcctcagaattaacttttgtcatggtttaaaataaatcagaatgcattgttgcattaagcttttttaataaaggaaaattatggaaagaaaataggtaacaccagcaaattatatattgacattgacaagtctaaacatatatatacttatatatgtaaaacacatccatatctatacaaataatcatctagttcttactgtcatcttactgaaaggaacaaagcctctaaggatcaccagttctgagaagctcttggaaatctctatgtctaagtgattgtattagatcagcaataatgactatgtaatctcaaaaaataaagtattcttaaaactgatctgtgtcctgagaataccacttaattctgtgaactatgaattcagagatgagagatatgtgggcaaaaaataacaaggatacctgccgtaggatgaagatgtgaaaagctgatgcagttaccagcaggtgtgttggagtgaccatcaccctgagagtc

SEQ ID NO: 31023 - DNA, 1148 bp, Mus musculus
gccttatattggagtggaaaaatgagcttgactcttctataacttgtagaaaataagaaagggtaaaaaaaagggaggaattagtttttggggagggaccatgacaaagggaaaacaaattagggagggttatgtgtattaagtagagtctcaggacttacagacaggagggaggccagcagtcatgcaccttgagaaacagcaagtggatttaacttgtacttggagtgtggaagacaaagttttcttgggaaagtttgggaagttggtaatcagcactcacgagtgcagcataggtctcatctctaggcctgcggcgggggtggggggtgctaaggcattcaggagatctagcattctgtccataactttgtactggtggtgctgagtgttgagtcctagcccttggacctgctggtcaagcactgtgccactcagcagcatctctagtactcactgggtttttaaagattgacacgaacattagattggaaatgtttgagactttggggttgtactgtcactggagacaattgctggggactatgtgatttgtgtgaccattgactataaggagttaggtctgtaatccagttagtggatgttctcccttaaggtagagaacatgtaagaacaactagattggaggaagaatgtagtgtgctgagctctgtgggaattgactgtaactcaaggagatttgggaatggagcagattgatgattttcactcatcaactaatgtcacagagaattgtgagatgtacaatcaagagtgaagaaaaaaacactttttaaaaagacttatttattatatgtaagtacactgtggctgtcttcagacactccagaagagggcatcagatttcattatggttggttatgagccaccatgtggttgctgggatttgaactcaagaccttcagaagaacagtcagtgctcttaactgctgagccatctcatctctccagcccccgggaaaaaaaaaaaaccaaacaaacaaacaaaaaaaacaaaacacttttaagaaagatttatggggctggtgagatggctcagtgggtaagagcatccgactgctcttccgaaggtccggagttcaaatcccagcaaccacatggtggctcacaatcatctgtcatgggat

SEQ ID NO: 31024 - DNA, 1163 bp, Mus musculus
ctgtagcttgagaaaacgtgacttttaactgagaagcagtggacttctcccactggctccttcctactgctgttacctaaaatttcatcatcttttcgtttgattctgttcaatgtggtgtctttggggccagcgggtattttctccttctacttggaggagtatttgttcttggagttctgcagtggctaagggaaccagccccacccactgtcttgttgcttggcaccagctctccctggctgttgagcatcttgtttacttctgcccttaattccctgcaggtgcgaaagtacaagagcatgatcctggaagacctcgagtctgctctggcagaacacgcccctgcgccacaggaggttaattcagagctgccgcctctcaccatcgatgggattccagtctctgtggacaaaatgacccaggtacaaggcgggaaaggaggaggagatgcaaagataagagatgcagatgtgggcggcctctcttcactcctctagctttgtggttggcgatgtgaccagagcttgagacccagactggagtgtgtggcagccttgggcaaggccaagtcccaggaggagtctcctgactcagcacacactgtcacctctgcccgctgcccacgctctcctttcaccaggtttctgtgctagggaagagaactttctgcttggggttagtctgacctggagactgttcaaagtttgaggagacaagtttagcaggctaggctgctcctctgctcctccccactcttacccccaccccaggtttttgagatagggtttctctatgtagccttgagtgatttggaatttgctgtgtagaccaggctggcctcaaactcagaatagttgcctcagcctccaggtgctgggactaaaggtgtgtgctaccacacctggcttaattactaacttttagttttgttctgtttttctaggtagaattttaaagcaatgactttttttttacacttggtcttagccaaaaggctgagaaatggtgactttttattttattttttattgctgctcagtttagctgctcaacacctaaaatagcatgtcatgtaaacaatagaacctgtttagtaaatagcctaagagtattggaacaaagctaaattcagtatagcagggatcagcttgaatgggtct

SEQ ID NO: 31025 - DNA, 1161 bp, Mus musculus
caaaacaaatcactagagagttagttgagtggttaagacagcttgctgtttttgcagaagacctgagttcaattcccagcactcatgtcgggtgacttacaaccacacgtaactctagttacagggatccaactctcttctggctgccatgggcaccgtcacacatgtaggatacactcacacagacacacccagataatatacatacatacaaagagacataatacatacttcttgatcagagtgttacctcttatgagaaattggagagtttggcctcagtttggaataggacacaaaagcaaaatccgaacttggttaggaaggaaggacagaaaaccatcagttgctttgctccagaataattctgtgggaagtcctaaaaaactaactctatacgaggtttgataaatacatgcctgattctcctgtggtggcataaatccccaatttctttgtggcttattatgctttcctgttgttttgatgacaggtttcatggacccaggcattacggaccatagttaaaaattgctataagcaacatgggcgggaggatcttttatatgcttttgaagatcagcaaacacaaactcaggccaccaccacacacagtatagctcatctcgtaccatcacagaccgtagtacagaccttcagcaaccctgatggcaccgtgtcgctcatccaggtatgtaagcctgatgtctcaggggaggtggctcggtgctatctcacctctaatggagaagtttcctgtgttcatgctctcttctctgcacatcctaacagctgctctcgctctcgctcttcctgcctagcagtcgcttccaaacagtttcatttattttttatttcattttcttgtgctgcttggaatgggaaagtcctcacccacatggccacatcttatctccagcctttgaaccatattttacattgcatgtgctttatttaattcagagctataagtagcttctggaacatttccaaacaaagcacctgaaaattgtttcttgggttagggtccaattaaatagtagaatgctcgcctatcatgtagaagaccatcaccttcaatccccatcatctggagagagaaacagagaggaggattttggaggaaggaggaagggagaaagacagataggtgtgtacctg

SEQ ID NO: 31026 - DNA, 1200 bp, Mus musculus
cgcagcagccgtcggagcacttactggagtccaagatgctaatggtaagagatcatgaatattttattgactgtattccctgtttccacttaaaccttcctgatatagccagcaacaaacccgttagaaagacattgagcttggtttgagtttttcttcgtaggtaggcaattaatgcctaggaaaatctaggggcccccgattccttttactaataggattcttgaggttccctgaaggaaaatgctataataatggctacctaattggagtattttttaaaattagctgttttgctaagatgagaggtgctgaggcatacttaagcattcgctttggagcactttcttcctttactgtcctacggggtagggtaagttgttgatcttaagccgggcgtggtggcgcacgtctttaatcccagcacttgggaggcagaggcaggcggatttctgagttcgaggccagcctggtctacagagtgagttccaggacagctaaggctacacagagaaaccctgtctcgaaaaaaccaaaaaaaaaaaaaaaaaagttgttgatcttgactgcagtagagactcccacgggtgggtggaacgcaccgactcaggccaaaaggcacagcaaaacaaaaagggtaaagttcatacaagtgcggtggcaaaaacttatggctccaacccagatctttgggtccacttcagcgggctctggagtcagtggggaggccctgggctcccggggtgtctcagaagaccgggggggggggggggggggcagcctgatctgtggcactgcctgtgcctagcaggactacttatgtcttatgtcctggcaagagggtaaatagataacatctttttatctaggcagacagttccttagtggcattaaatgtctgaaagagaagtttcagctgagtgtggtggcacatgcctttaatcccagcactgggaaggcagggcaggctgatctctgagaagtactatagtgagactgtctcagaataaagagagcagggtagaggtggagggaaggaggcagaggtttctttgcagcactatttctttggttttattgtcggcccataagaactaaatactctgcaagtcaggaatgtctttgggggaagacacaatgtgtcctttacagtaggaaaaggtttttctgtagtactaggagagagagcaatgtagggac

SEQ ID NO: 31027 - DNA, 1566 bp, Mus musculus
atgtataaagtatatatgtacatacatacatatgtatgaaacctgcatggaattacctgtatgaaatcaaggtgaactgtgggaacaagaacccacccagattcgtgggtggtagggtacatgaccaaacacagtcacctggttttcgttcataccagggtcatgcattgagctactgacagactcaggcggaggtgaccacgtccttcaccaaagctgcctcccagtggccgcctagacctctgctagattcaccgaaggaaggaagatccaggacacagcgtggtccagagagtgcttgtgaagtccagggacagagagtgcgtgcgcacatgtgcgctttgccagcagagacacacggcagctggcccaggtgctgaccttgccacaggcaggtaaacgccctgcaggctcctggcaggggcaagaaatcgttcctcagcctccatcttctcccttcccaggaaccctcagtctcacgactattcaagagttgcttggttgtaaggtcagtcctgttacaaactgaaggtgacagaagtgttaagggtctgaggagtgttcatggagcaggcgggtgtaagtgcagggtgtgtgtgtgtgtgtgtgtgtgtgtgtatgagtaatggagaaaatgggaagattataggagagcaaaataggaaggagggagaaaactcttcataaatcagggtgcgccgtgggaaccgtgttctccagctgtctgcagctgtatttcagcagaggagactgcctcacacaggacctctgcgcaaaggctggccgtcacagatgtgtcagaagactctgtgaggacttttcccaggcacatcctggcggcacaggcctgggacagctttcctgctcacagtgtggcttgcactgagcagtcattgtcactgtgagcttctgtgctttccagccacaagccctgagtctcccgtggctcattcatctgatgtcttgacaagccaaatctccactcctggcgtgcagggactcttcctccttcctgccagccctctcccgtgcgtgatagtgtatttaatgtggtgtttttggttttttgttttttaatgagacattaaaagattcttcatgtcttgctcagcctttgagaaaagtttccaattcttatatttgcttgttttatataaaactattcaatgttctttgtatgttcttttctgtatgtgataagggaggggtgggaaatttgcatatcaatgtcctggttctacaattggttactttttttttttttttaaactgtgaagctgtccaggggctttaaggcccgtgttcctttgtggtgaaataagcctcccgatagtttgagaaattgccaagaagataaaagcaagatcccagcagcagagcatggaatctgtgttgttctccattctgtctaaactgcctcattcaataaatagtttaatgtggcgacaaaaagtgcccctctctctagcagccttggccacttgggctacagggctcttttggggtgtggctcattgtcctttacaaaagacatgcactagaggtctctagcctggaccacgctct

SEQ ID NO: 31028 - DNA, 1211 bp, Mus musculus
tggctgtcctggaactcactttgtagaccaggcctgcctctacctcccaagtgctgggattaaaggtgtgtgccaccacgcctggctccctgctcattttttgagctctggttcccacagaccaagggccccatgaagtcacagaaagaaggcctttcttggctttgaccttccaaaagcaagtcgtgtgccagggctggcagctgagtctaacatgagggctaaggatagaggttccccaaagcagctttccagagagggaagctggggcctggctccagggaaggctctgcctggcctggcctgcagctgtgtgggcatacactgggcttgcaatgcttacagcattgctgtagggcttcccctacacttagctgggctggggaggtaggccaagcaaggggttacttgtgctgtgcagggaggacacggggcaaggcagccaagtacagacaggctcagcaccttggtgctgggctggtcctatggctcctgaatttaggcagtacgcaaattgggccttagaggagagacaggatagaaggctgtagggggagcagctgatggccacatgactgcatagccacaggatgttgctgtggagtggggctgagtactgttacccccagtcagttggcactatgatagagcaccaggctggcatgggtcagtgcatcgcactggaggtgagctttacccttttttagggatgtgcattgtacccggagacatgtctgttgtcttgactacaggggatgagccactggcatcatggcagaggccaaggatgtggatcagcatcctataataagacaacctgaccctgtcagtagaagccaggcacactggcagacttggaatctagtaccccataggctgaggcaggaggattttatgatccaggcagcctggactatagagtgaggccttgtttttttgttttgtttggtatttttaaaatgtcagctgagggtgggaaatggcacaggctgttaggttacagccagcgagctgatacctgagagcaaagatgcaggccagttagcggagaagaaaatcaatcgcacaagggcaagtccttgagattcagagatggaactgctgaaggactccaggagacctggtgactttggcagagcatgtacccacgtgggacagcactagaggaggtggaccatccctgtgccttggtaagatcctggcaccttcag

SEQ ID NO: 31029 - DNA, 1940 bp, Mus musculus
ccctggcttgttgaaaggtggctttagctgtgtgctgtgtacctgcttacgtggcctgctgtcctctgtgtgattaggagggtttctgctggccctgcagcttgcttccctgcggattaggcctttgctcatgctatagccttcatgtgggtgctacctagagcaggcgtgaactgctgggtggtgattgtgagttcagacaataaaaaaaatgtatttttttcaatactgtataaaaatagtattctgattacctccccctcaataaaaaaaaagtccagataattgcttttgatattgatggaaaaactacaaaacagacacaacaaaccagagccaagtttggggaacgggtgtgagcagctctggctcctgaccctcaccgggtccgctttgccccagtgaagagacagcattccttcctgtgcagacctgagtgcagagtgtgtccatctcggcgtatggtgaaggtgtcactgggttctgcagcactggagtttccatgaccgctcccacatcaccccaccctcgactctggcaccagtatggttctatgcatgttgcagctctctgggctgtgactctgttaagaaggtttgccagctttctggcccttccccgctcctagttactagatgaccatactcatacttgcaaaggagaggagagagtgctaaagcctggttctgactgagggctctgcgtccctgcagtaaacaggtgagatctgcagcagggcagggctgctttaacaggcaggggtggcagtaagtcacagctgctgctgctgtcgtctgcccgccattcagctaaccgttctgttgaggtcctgccttgtgctttcctagtggaagccgtcctttgcccccgttgatgacttgagcccttgccaaacaaacaccgatgagtgaagtggctgcaacttggcagccccaaaacctgccacacccctgcacccctggaagcccagcaccggggccagcaggctgtgttccgtgcttgccaacctagaccctggcattagaaattgttttgtcagcagtctctgccctctcgagagagatgagcagcctcaactgacgtttctattaatgagttatcagaagttgcaacatctctccagcactaatgtgttttgtccacttcaaacgctgttctaattgccaaccggctgctctaggctcctgaggagtgtcccttctcaaaggaactgcgccctggaaagggctccccgaagttctaggtggccttgacctgacacttgcattttctaggccactctttggggtggctgagaatcatgacagaccctctgccagtctctagtttctctgggtcaggtttctgagtactggcattggattttaagcggcatgtgaccctttgtgttttagtgactcagaaaagtcaagccatttgcaaaagttagcagtttgttttgtcaacttgtaactgggtcatagccttgctgagtgaaaccaactcatttctgattgggcacaaagaactgcattctttggacgtgtgaatccatgttcctcttcctctggccactgaacacctccaccagctctttgggaattggatggaaaggcggcccctgggggccaggggtgtgcagcttcccactcacgggaggagtggccagggctcttggtttagcaattacacagctctaggtgcgggaagaaatggcctttaattactgattgtatttggtacatattgtgtgatacttgaagagataaaagggacttaccagcccttaattgaaatctaagctttttaccgctttcccctccttgccctctctcctcccttctgccctccttgcattgtgatgatctagtgggcatgtctgtcacctggacaattgcctcttctgactataacctcttaatagttgtgtataatgaaaactgtaaacttttttaaataaa

SEQ ID NO: 31030 - DNA, 1099 bp, Mus musculus
atattcccacattccattttggtagcaatatgcagtccgaatgcatgcattcataagtccatttggccaagtcagcctgtgtgctactgaactgtcaagagattgccactctcataggtaaacatgaggaaaacaggaaaagtttgcttctttttattgatggttccaaagaaacaaaccaaatctaccagctcttggatgaagatagaacagtgcttttccagagtgggaaggaaggggttgagacgcgtgctttgagagcctgtgaggctgctccgtccttgccagctgctccctagtcctgagtggtccttggtgaggagcagcaagatgcagcgagttgagtgagacttagggcttttgattttttttttttttttttttgactcggatttaagtgcatttttctaggtagactcctgccctccttgctaccagacctgcagccaccttggttttgccttggagaacatttggggagcatttcctgaacccatgtcttttgggggtacagcttgtcatccagcaggaattattgagcgagcaggactggaggagacgggaatgaagacacaagagtgacatctgatcctagcacggggcctgttgatccattgcctggactgagctgtgaaactggacgcggttttggttttttgttttgtgtttcttttttcttaatttgtgtgaattgtacctagacaggttacagatttaattttcacctaccaagggacagtctcctccctggacaaggctcagtggaccatcagatggaggaagactggccccattgcttgagcccctgtgcgacccttgacctccagccttagttctcctggaagctgccaactgcttacgggagtgggtagattgggcgtctgagacccagaacatcctaaatttgcaatgggtaacagctgaaacaaacggaagtttttgtaccaaagtggccggaggtggggaagaactactttcgagaattgttacggaggcaggttgaggggacactttgaccctccaaggtaacagccagtcagatggcttgaggtgcctggcccatgctgccggctaaatgccatccagtgtgcccagcagt

SEQ ID NO: 31031 - DNA, 1159 bp, Mus musculus
tgaatcagggagtccagattagcctgagatacatagtgaagctgtgagtcaaaaagcccaaatcaaaccaaacaaataaaaaccataaataatggtcacagaatcctatatcaactggtttacaagcatgatctcattttttttttttgaagcttacaaaacctttatttttattttttttctttccattttttattaggtatttagctcatttacatttccaatgctataccaaaagtcccccatacccacccacccccactcccctacccgacttggtcgtttctaaaacacacacactcaccgggcagtggtggcacacacctttaatcccagcacttgggaggcagaggcaggcggatttctgagttccaggccagcctggtctacagagtgagttccaggacagccagggctatacagagaaaccctgtctcgaaaaaagaaaaaaaaaccacacacacactcctagaatagtgcctgctgtacagtatggtttgttgaactaaatcagtgtattgaccatgtccagtactgcttaccataagctttggggactagagctaaacctaattgggtggatttaaaaaaaaaaaacacacaaaaaccgaaaaacacccctcacagacacacatttttggcaagctacctgaactatttggtaatgatgtgtttccttaaaatgtattcacattttagaaatgtaaataacaaaatatcccagtctggttccagtcacattcaagtaagttagatacagtctcacgaacttttgtacaactgaccagaaaacctttctactgattctcaaagttaacaacagatttattaattgtaattcgtatgactcagacaaagtgatggtttttgtctgtcagtggtatgcaagctatcaccaccacccccatcctaaagagaaagacacttgctagccagcaccacacacacacaccaccagccagcccacttcttatgtttatagagccatctgctctgaacattcttatcaactgtgtgcctgctgtggctggctcttttcagcttgcatggccttggaaggctcacccttgtagtcttttttctgactaagtagtcttagcacattttattgatgtgtttgtcagacagtggtcatttgagtagtgctttggtaactgtg

SEQ ID NO: 31032 - DNA, 1210 bp, Mus musculus
tctgtaattctgagaactataaaataagtttttacatcttaggcttaaaaaaatttttaagtattttatgtgtaagggtgttttgcctgtgtgggtttgtctaagtgtcacttgagtgcctagtgccctgaaaggccagaagttggcatttgtatcccttaggactgaagttagggattgttgtgggctaccctgtggatgctaggaattgaagcagggtcctctggaagaacagtttgtgctatgtacccctgagccatctctccagcccccatctcacagtgtttagactatcatctactgatggtaaaagaatgctctggagctagaagaaaatatcaaaggacattttcatttagtgccgtcttcatggcagactttgtgcagtagtaacacggactgtgtgtaaatgatgaccacctgccctggagcaagcgaaaccgtggtttgtagtggtttctaaggtgtaaatactgtactgaagcaagcctgtctacattgtgagatctatcgggaagaaatggatatagtcatctgatttggattaacctcaaatgattcttttcttccttccccttgtgtgtatatttgtagacagacacacacacataaaccccctcccaacctcccactgtgccacagtgtgcacgaggtggtcagaggacaacttgtggagtcagttccccttttctaccatgttggtcccaggtattgaacttgggtcttacatcctgacctctcatgctaactatcctttattttccttatctcttacataagtatgtaatttgaactaagggcaaggtaatttctttggccttagatgaacaaatctcacaaatctgaaagttaaaactggaaaggcagtatttgtcagtgtggacaagtgtcttgtgtgtctgtggtagacatagcagggagtcagatgccacagccagagggttatttgagaaagagctggcacagaagctgcgtaaggtgatctcattaatctgcgcatgtccagcactcttctcctctcgggggtcttggtggccatggcccctgccagcactccttcctgatgtttcctttgatgctaatagttcttccttttctggcagacacctgttccttggtatatatgaatacacttagcctggccgcactagagccttgctatggaggaaagccctctctttctccttcagatggacgctctgtcagtgtt

SEQ ID NO: 31033 - DNA, 1195 bp, Mus musculus
attccccaagtcaaatcattattattctgaatttttggcatgtataagagaaatagtatggaagtgggcaaattttcaaaaagtaggacttctttttgccgggtgtggtggagcatgtagatctcggcctggtctacagagcaagttccaggacagccagggctacagagaaactgtctccaaaaaacacaacaaaacagaaacctaaaccaaaccaaaccaaaccaaaccaaaccaaaaatgaacaaaaccaaaaatataggactgtttttatcttaggtttttctttgcaaattcacttgttttttgtttttttttttttcctggtttttcgagacagggtttctctgtgtagccctggctgtcctggaactcactctgtagaccaggctggcctcgaactcagaaatccgcctgcctctgcctcccaagtgctgggattaaaggcgtgcgtcaccacgcccagcatcacttgttggtttttgttttgtttgttttttgaaacagggcctctctgtagtcctggctgtcctggaactttttatatttatcaggctaactttgaactcagacatctaccttcttctgttcttgggtgctgggattaaaggcatgagctacatatgtacaccactccatcccattgctgttttatgcatagcatttgtgactttacacatgtgataagtgtgtttgcatatgagctcccttgagtctgacactttagccaatggtttctgttttaggatttaattgctaggtatttgttttggtattggcagttaacctgtggttgaatgcatgctaactgataacattctctcctcctgagctatgtcccagcctgtaggtacagtgcccttccccatctctgtatgtgtgcatgtgtgctcagttagagaaacacagttgtgtgcctaaggtcatggataattcccttctgttttgagtttttctgtgtgtttttgtctggccaaaaactagccttcaacttctgatcctcctgtcttccaccttgcaagagctggggttatattggtagatgtctcatcagttactcttctggggttccattacacacgtcacctgaaattaataggaatggtcattcattatttgtcttttgtgctttactaacatttatactgagggtacaaaaccgatggcaggggaatctgtataccttagtgtgccc

SEQ ID NO: 31034 - DNA, 1192 bp, Mus musculus
tgatgatgcagttaccccagctggggaccacatatatcattgtatgtgggaaataactaggtccaattagtgcttgtgctgcactcagcgtgggtcaggagtgcccttgtcacaaacagagatgaggacaggacagatgcagatatgctgagggacaatctgagcgaggctttggaaattggcagtgttggcagtggtctggcaatagaacacaggcttcttgattttgtttgacttaagctgtgcattatgtatgtagcataacataaaatgagttttaattctttttattgtttgtttgtttgtttttcgagacagggtttctctgtgtagccctggctgtcctggaactcactctgtagaccaggctagccttgaactcagaaatctgcctcccaagtgctgggattaaagacatgcgccaccactgcccagtgagttttaattctaataataagcttttctacctacagagtctctctgaaaaatcaaggaaagtgttccgaatattccggcagtgggagtcttcatcctcatcgtgaagatgctccggacagaactgaggggactttgataaacaagtctgagttcctttggtcagctgctgctgctgttcttcattctggtttcactgcacatgcgaaggcctgcatgtgatgatgaagaggagacccgatagctctgtgtggggtgtggacagggtaagacacagcaggcccagttccgtcaggggactgcagggttagaacacccattcagcggctttggttcggcagtgttctgagcatgtagctcagcaatgtgacagtatttcttaataaagtgtttgctaagattcctgctgctagagaattgttttctccctccctggttccccaagatttcataaaatttagctgtggtttgtcattggaccttagaaagaagcagtatagctattgcatagtcatccccaagagaatgttcttgcaatagtaatattctatccatactttgcctcagttgatagcactaagaaatatgacttctttagtgtagattatgtccagcaaaactcatccctgaatatcacttaactagtctatattcaaaatttataatgaaggggctggaggtgtggcttgatggtaaaaagtgtttgtcgtgaacaggttctgggtatgagtcccagcctgccctgaccctgtgcttt

SEQ ID NO: 31035 - DNA, 1098 bp, Mus musculus
aaggtccttctaatctggttagttaaaaagcagggcaccaacaagttttacactaagtttaaatatgctttataattaacttatttgtgtattgaacctgtgtatatctacaaaatattcagccctagtaaatttgtaactgtcacttaaaatatttaaagggatttaatttattagtaataaatattagaaaaattatgataaaaactgtaataatcggccagttcatagtggcacatgccagcagcactcagaatggataggaagattaggagttcaaggccaccctcagctgcctggagagcttaaggcctgcctagacgtaacaaattatatttattgggagtgtatagtaaattaagccttgaattataaataagtataggtattcctttttctacataacagttacctgaatattaaaagcaaaactaacacatgatactattggaagctgtattgagatccttgaaggaagaataaggacaaagttggtaatgaaaaaacatctcatctacagacaaaccaccctgaacacgcccaatcttgtctgatctaggaagcagggtcgggcctggttagtacttggatgggagaccatctggaaatactgggtgctgtaggctttaaaaagaaaaagaaaagaaaaaacatctaaagctatgtatgctagctcactcctgtaattccagcacttgggaggttataacagagattaccacaaagtcaaggccatcctagctacatagtgagtcaaggcagactacatagtagataatctgagcttcaaaaaagactctgcttcaaaaaaaaccataacaaaaccaagacctagctggtgtagcacatgcctataatcctagcactcaggaggcagaggtggaggaggcaacagcggaatgatctctggccagcctagtctacgtagtgagttcaaagatagccagagctacatcgtaagtaagaccttgtcttgaaaaacccaaaccaaccaaccaaccaaccaaccaaccaaccggacaaagggagtggttatggcttggaaagatgattttgcagaggaccagggtttggttcccagtcccacatgatgggatc

SEQ ID NO: 31036 - DNA, 1152 bp, Mus musculus
ttatgcactccctctttcttgatggagttgagggaatgtctgaaagtcccttaataatgttaagaatcaagagagagaaattgttgccttttttttttaattctgagcatattgaccatgtcaactaacactacagattaaaatatcatcaacaaacacaaagcttaaaaagccagcaacaacaactcttggtctgggagatagagcgagaacactagtcttggtagcctagcaggttgttcttaagtctggatgttgagttagtgtttctgagatgtgcggagtggctggactcaacggtgcttcatgacttgctgtaaaaatgcctgaccttgacactagcaggcagctcagtgacgtctgattagcgatcccttcaatcctgtaacgctccggtggttagcgttggcctgccaatgtttagtgtgtctgtcatcatcaccctctgttgttgtctctcaaattaaatgtatatggcatcaagttctttccaggcagttctgaacttcccttgtgcttattaatggctttaaatatgtctttgacttcttggtgggggattgtagactcttaagtgtgtgatgtaaatgtctacggacagtagatagagcacagcacccgcacccttcaggcttaactgtcttaccttctgcttggggtgctggctttgactagcatagcagctgctgcttttttagaacttgtttctctttaagtctctggaccatgtccctgcgttttcttaaactgttggttcttgattgcctcctgagcttgttgcctcctttgctgtccgcttctgtgttcacgatgctgtggttgcctagtgactggaggaaggtcttaagggaaaaggtacagggtctccttctcaagaagcaggggtcattggagagccagcaggaggaaggggtgagacagggtgattcgcttctgttggtgagagattttgtttcctcctttctggagagaaaagtaacgtacgtttttactccttttgtcctcaggcagctagaagagctgaggagtgacttgtgtaagcctatgggtgtccataggtgcagtcaggatgctagaggcctgcaggagggtgcagccagtcccccctgcaggctccttgcagaggagacatgtaggagatttcaaacacat

SEQ ID NO: 31037 - DNA, 2579 bp, Mus musculus
ttcttttagcccaaaagagatctctttagttgatatgaaataaaagtcacctttgagttacagtaaaaaaacgttcctgcccggtgtgcagtcttagagaggtctcctccctttggctcccaacaggccttatgctccatccgtgtgggttaagttagtggagcctttgctctgtggtcctgagtgaagcccttatctctgagtgaggggatggacctgcgtttctggggtcttaacccccagctctggccacttcctgttggtgtggcttttacttcctgccaccgataggcgcactcctcataagacccctctccagagcaagtcagcctgagccactgtgtgctcaaaactgtgactctgggccaggtctcctggacacatggtggaagtgtatcccaaactaaataagccatgttttctagggtgacagaaggatatttgtcattggtttatatagggaccaaaggcaatgttcagcctctgtgctttgactcccatggtccttggacaactgaggctgactctggttctgttacactagaaagctgtagaaagggggctgattcaagccaacacttgttggcatcctttttaagccagttgaaggcagtctctttgagatggatgttggaggcctgacatcaacgaccttctgtatcttagaagtgcatgttgggtctaaagtgtctttgaatagaacactagcgaaagtggtgcaggaagcagctgaatgccgcagccactcacgcacatgttctggatgccaaatgactgtggagaaggacttaaaggaaggtgactggatcctctctaagggtcaccagcattttggtttctctataaccagcactcgggattcccagtggcatcacctggtgtgggaaggttgtgatgcctgctgcccccctgcctttttgaggtgcgcccagacatcttcctgcagtcctggaagtagaagtgcaatatgtagaaacatatggtctgtacagattatgtagaatcgacgagtgtaaagcagtgacaccactctttgtacctgtcttgggcaagtcaacttattaccttagagtagaattatgccaagaacttttagtgtgatcataagccaacttcttggtaaagctggatttctttcaggtccatgttttcttattctagttataaaaaaaaaggtctgttcctcagtttgctaggagctgagggtttcccatccctgtttgtactgcctcccatttgcatgtcttgcccaggaataaggaagtccacttgaaagtgttgcccaggtagagaattgaaacctaatgttaatacagcccccccccccatatacgctaacttatctgggaatgtaataccttattaaatgatgttttctttacgataaggtattttccactttacagaaaactgcaaaccagtatataatagattgaaactttacctgcttttcaggacaaacaaaacccttccttcccactggcagaaatcatctttcagggcctaatgatttgatataaaagcttgctttatagcattcatgtccagtacagagctagattttaaaattatatatatgatgaaaatattaacatttctagattaaaagtatgactgatctttcgttatccactgtagcaaggtgaaagcacacacaatcgaaatccatagataatcagtgtttagccttctccttcaaacagttgatttacatatcttgtcccttcctgtccttcttccacacacatccccttttcaagggacgagaagtcagagaaggaaaagaagctcaaagaagggccagcagctagccaggccaggctcccagttaacttagacactggtaggaaaatgaccaccggtgggaaccttgagcacagcctgctgctgagttctctgctgcttcctgaccagagagaactcttagttcctgtgggatgaacaggctgtgttgaacagaaacagaaaccccactgtctgagcacatttcctggctcttggcaaagcttgcttttttgtttcctcctttggagtcaccttctgcagtctgatgtcctggtgtgcagcaagggtgctctgtcctctcggactgtgttggttttgtcccctgtaaaagcagtttgctgttctgtggtcttagtgatgcttagagagtggccctcccaccaacactctgacgtagcacaaaaagccattttcctttttgttttctgttgtttcctggtgttgggcttcagggtgaatgcaggaggatttattgttacagccacgcttttcaagagctggttaccataggtgtaaattccattggtccccaggtaccttagagctctggtagctttggctgggcctgaagcaggctcagtgggggttctgggacctatgtctatatgttgtcacccgtccataagtttgtgagatttggaagaaaaaaaaaatatcttcccttgtctggtgtcaaaagcagagctgtgcttcgatggtagcgccatctccttggtggtctttccatgttgttaatcttttttaaaacttttgagaagtttttttaaaggccccacttagtctgcagagggcga

SEQ ID NO: 31038 - DNA, 2561 bp, Mus musculus
tgttttgtttttgacacatgctttttaattccagaacttaggaggcagaggtaggtggatctttgtgagttggaggccagcctggtctacagagaaagttctaggatagcccaagccacacaaagaaaacttgtctcaaaagacaaaattaattggcactgtgtaatactactaaaaaaatttttagctctctttgatgtagctctctaaatctactgaaaaattaatttttcaccccataaaccaatttattctaaacatagattttaagcacagttactgaagtagtcatcattacttgaactcacctgctgagctgtgtgacaggctgcattgctgagtcacctcagctgccaccagttaaacagatgtccctcctattgttaattttattagaatcagcccttagatacttcggcaagcaattctactaaaactgttttccttcctttgcaggagagttaaccttgggctctctggcgtgaacattttgtggatctttggagagtagttcctcatttaattccaaacatttggactttgcttttaactggtctggaagaagttggagctgagcccctccgagtgcgcacctcttctgacataagatgcatgttttgcagacttgttaaatttaacaggagacaagctgtgggagcttcttgtgagcatagcaaagcctgcaccttctagtccacagaaaagcattacactggatggctctgagcgagctagtgccgctcccttcatttggtgagggcaaggacgcctctccattttaaccccagtgagaacctgcacctcatcctgtaccatcagagactgctttcattgttggatagtagtgtaagttctcagatgaaccttgctagttctctttgttgtatctttatatttccccagtgttctacaagtcagcctaaagctgaaatgaaattaatttctaagtgatgtagtaattaatcctgctgagccatctccccaaccccctattgttttttttaatattaaaagagatttgataatattggcatcttgaaaggtcaatgcttgcattaaaattagctgataaaattaaacttttgggttttagttaaatgtctaaggacacgaaaaaaacggttcactgcttttattagcactgcgtgtgcgcgagggcctgtgtgctggcgcctgtgtatcatcagcaggcactttatcactcctttaagatcccaatgatagccttcctgcttctagtttacaggtagaacagagtatcagctctccatctattcttctatatgtgtacatagatagggacctatacatatctatatgtatatgaagtaattagtagtcacatttttttggtgggggttattttcgagacagagtttctctgtgtagtcctggctgtcctagaactcactctgtagaccagactggcctcaaactcacagagatctgcctgcctcggcttcctgagtgctggcaccaaaggtgtgcaccaccaacgcccggctagtagtcacatttgtaatgaacatgtctttataaagattgcttccatcacctgaatgtgaacagatgggatgtgccgtccatttttgtatggtttgagggtttttttcttcaaaaggtcagaaggttaaccttaagtttaaaagctaatgtccacaaggaaggaactgtcacttaactaactgctcttggttaccctaaaagaaaatatcatttaaccatgctaaacttaaggacacgttataatttaaacctgtaatttttgagagagattcggggtgccatggaatcagttgctgtgctatttaagtatccagctgcacagactgcactaaaaacaccggagaatctttaacagcacataagacaccaccaaccctgtcttttattataactctgaaagaatatagtatagtagtaaatagatgtaaaaacacttgactatgtaaaaagaaaagttgttttgcctgcatacttagtataggttgctgtagagttcctataacaatgtctacaagtgtttgagctagctgtacttactattatcttgtatttaaacagaattggcacagacatggtgggaaattgccaggaacctcagctgctcatgaggttgaagtgggaggatcattagttcaaggccaaactagggtaccttgtgataacctttcataaatataagacattaataaaataattatagtaattctgccttggtgaaatcatttgaatttattctacagaaagtgtggtgcaaatatagcatcatgttttgttctgtttgtttgttttcattactaggaattgaatccagggtacagcttaccgagtaccactgagctgcctccccagcctccaatatagcagtttcttgtattaaagtgagtcaatatctactaacaccacaaatcctcctaggatgtgtgtcacgtgttccttttctttgcttggctcagatccatgaatctagattacgttcactgtgacatttatctttttctttatcaataccagcctttacttaaaccaaatttgttttaaagcatactgaaagtgtt

SEQ ID NO: 31039 - DNA, 1291 bp, Mus musculus
ggtctgtaaccagtgttgttctgtaaataattcagtcacatctgctggtgtgttcttcccagctagcttttttcattcactgttgattcatgaaagattctccaggtgggcctggaattggccgctgtccccacaggtgcagatgagttcttggtttctgcagcccacagtcctcacactgagtcttagctcgctctggaggctgcaggctctgctgggcatttgaagctgaggggtggtctgtgagcatgggtgcatcttgctggtttagcagagaggctctgtgcaaaatgatcctctccttaaatggtttcctgggaccacaaagatgtgtgttcagctttcctcaccagaaggagggcccagtacaggaagaccccagcaacctgcgggtctgtgctgagagccttggaaggccaccacagctgtccccttcataatgagccttatatcaattaaaatttcccattgcctgatgtgagtccagctatgttaaagggatagaaatcacagtcatttgaaagcatcagcttcacacggacaaggggacacacaggtgagggggactcaggagtcctttgtcggggctgacaaccccttaagcccttgcttaaaaatacagtattagtctaattgagtaattagtgcaatttcctgcttgcttttcattctcagactgagctgtgattaggaggctgtgattatagattctggttttggccggaattttgaatcggcattaattgaattgctagatgactgacatccattctatttaattgggggaacaaaagacctcaggtaaggatgaggcccatgaagtcagagggaaggacgagccttgttaatttttatggtctgtgatcgtagctgtgataagggactaaagaataaattgtgctctttgtcatggcaaccagcttctgaaaagccagctgaaaattgcctacccttaggttactgctgctgggtgagagtcgccttaacagtgctattttctcaccactttaggaaaaaaagaaaaaggcaaaggcccacagtatttctagcagggaggctgtgtttgtaagagaaataaacgtaataaatatctcatggagacatatggaaaaataactcagtcaacccagccccgcttcagagtatgtttattcttctccacttgatttccagagtgcaacattttccaatgctttagaaatcaaacaaaccagggacattgttcagatgtcaggccgtgcccaaatttccacaagattcaagaatcgtgtataaaattcagccaacgtac

SEQ ID NO: 31040 - DNA, 1174 bp, Mus musculus
tcactgcagggttctgtaaaaatgctaaaacttgagcaaacaatttcctatggaattctcagctgaattccatttctagtttatttgttgacacagcagtaaaggatgatttcagatctctagcctggtggtgaagggctagaagacacaacacacaggcctcttccagctttgctgtggcctcactatgttaatcctgcctttcctggtgttctcctatgataggtctgaaagtcttagctcagaagttcccagaaggactggtcactggttccctgccagcctcttgccagcaggccctcccttttggttctgtccggaaacgacgtggccccaaaatgccagccctgccagctgagaacaagtggagatttaccccagaagacttaaaaaagatagaatgttacctggaagaggaccagggaccagcagacaaccctagtaagagactctgacctttgtttgtgtggagctgagctgtgctcctttgaatatcccttgtcacgtgaaaaatagctttctatccatgctcttaaagtgcttggggctctgtgcgtcacacaggtactgggggaggggcggcactggtattggcaagcattgggtgttgagaacaagcatggggagcctgtgtcttaggcagagaggacacacgaggtctgggcactcaggttccttcctgggagactccctccagtctctgcttctgggtttgcttaaagccctgcccagaggccctgccttgccttcctgtctttgccttctgcctcctcttctctctctctcctcagtcacccctcaagaaaggggtgagagaccaggtttgttgaggataaggaaggggaagaaagtctctccgtccccacccttgttcccagcaccaagctgatctcagggatgagcaggaggtcacccctggcccacaggggatgctgcaccccgagggcttcactggcatagcagtggccacagactcagcagcaacattagcttaaaagtggtcttggctgactttccttggagacccgtcttgcggccctgctccctctctctctcttgctcctttcaggccgactgaaccagaataactctgctggaaaagactcgaaggtggctgcttgccgcggtggccagaacctgcccaccagctgtcctgccagccactcgagccccc

SEQ ID NO: 31041 - DNA, 1099 bp, Mus musculus
taatttcaatccagtactgttggcaaggtattttattgtttgaataatctgaaatatgtcacatacagaaaaagttcccatcactattagcccatctttgtaacagtttgattttttgagttgcatgaattctgctagtatatggacaaatggtataagctcaggtgatccactgggaagaactgtcacatcttagatattaggtgtgataaatattgattagggacaaagaagttttagcttgctgtgattatagtattttaactgtttttcctttttatttaaaaatttgagttttatattaatgtcagcgaaaatatgaggatgtctacacaactcttaagtgatgatgaacaaactgttttaagggttttcatgtaaagcatgccattacgatttaaaagcgcagattaggaggaagctcctgaagtcctgtcagcttgctttctaacacagcatggtgatgtcattcatttagtctgatccttttgactggattagattttggtgtcgtcaaggctgccttgcatgcagtttgcctcatttctcattttcctcctagattctgtcggtgtggtcggaagccctgagatagttgtgcttttacatggctttccaacatccagctatgactggtacaaggtaataatgtttctaggtctggcttatgtcctaaaaaaaatactcaaaactcaagatattttttttgttgttgttgttgttctggtcagccctagaattcttttgcagatttgaactgtttgataaaatctcattaaatgtagaattgctttttatgtactgtaaggggagtaaaatactgactgcagaaagggacactgccaaattaaagctggagttacgctctccgtacagtggcatgcaggcctgtttgctgtggggctgggcagtgggagcagagtgctcaccatgcttgctttcttaacagatctgggaagggctgaccctgaggttccatcgagtgatcgcccttgatttcttaggctttggcttcagtgacaagccggtaagcagcagctgggtgtggtccgtgatgggggtaggtgggtgggtacaaatgagggtctggcaggcactg

SEQ ID NO: 31042 - DNA, 2035 bp, Mus musculus
ttgtgtttgccagatgttgtctgttgggttctgaacaactgaaaccactgtaagtggagttggcaagtttatctgcctaaggtacagtttcccagtaggagatgagtaatgctgttgattccttccagtgtggtgtgtctgtagggcatctgcggggcttcccatgccttacatcctctcatctccagcctcaagttcacctccatgctgttctcttccactaggaaaacgctgccgcggtccacagtgtcgattctggatgaccacattagccactacccacagctagaggatcccatgggcttcttgaatgcatatatgggcttcatcaactccttctgagctggaaagagtagcctccctgtattacctcccccattctcgtatctgtgtgtattccacttagaaatgcccaaaagaggtcctggccatcaaatactatcctttcatcaaagtccatttccttcacattggtgaacaaactacaggaatcaggcagctggaactctatagggtgacacaatagtccacctcatctctaagggtgacatgataatcctctcatttctgtgacatctgaccaaataaatagagctgctgttgttttgtgttattaggacattctgactaataacacttttcatttatgtagaaaaacagcattagatattcttttttggtgttaaatacctcaaaaaacccccaaaacataataacaacaaaaacccagtttctgtggactttattaaaatatttagaagtgctcccttccggcccaatcctaactggaatacagagtgagggaggagcttgctatctccctttcaggatctgttacagtttatgagagggatcatcttgtcactcctttacatttagtttcatcggctgcttctaacagacatttttgttaaaacagacattggcttagggggctggggaagtagctcagtggtagtgtgcctgcctagcatgttaaagcccttgggttcagttcccagcactctccccaccccagcccatcgaacctaaatagacattggcgtaaatacagtgttctgagtatgagtctaagactgatttgcatactcatgtatatatttacaaacagttggcccttgctaagaagaaaacctcattatatatagaatttgtgaataaacaggttgaaattatttgcagaatttcctaaaactgccaggcattaagaactgcatctgtgccagagatttactgttactgtttagaaagtccaagctgaatagtaaataacagcctaggggcagctcctccagggctgacgtggaggggaagggacatgtaagtgcggaatgaatgtccattggctcctctatgatggccgctcagcatcccgctggctgttcagaaaggctttctcatataactcctgtacttaaacaggcaagtttccagagacattaagaacaaattctgaaagacctaagagcaaatggtgctgaatacttttttaagccacagttttaacttagttaaagcagcattattgattattttaaattcgttttttaaattagaaatttcaagtatagcaactttgaaactggaatgaatgagtgtttattttctattaataaaaacaaactgtgacaaaaatggattccggcttcccctccccctccacccttctgggataaaattttccagcattgccaagagtttttcacacattaaatagaagcatataatgaagctaagcagctgtagaatagcataagtagtatctgattttcaagcccactcaaagctgcattgtcgcaccgaggctgagtgagtgagacatgagatgagggaagaaactctaaagctcatgctcaaagacagacagacagacagatgtttgatctgctggcgcagggccaaacacttggatttgcttcttcaaagtcatcattattaatctttatgtgtgattcttggaagatcatgccactagcctaaaaaccaccaatagggagggcatagcaacatcacccttcccagcaagaacttatcc

SEQ ID NO: 31043 - DNA, 1322 bp, Mus musculus
gatgatgtaggtagtagtctacgttttaacataggaagttgttctcttaaattccctcgattgctgttaaataccaccacagtgtttttgttgttattgtttttaactcacttcttcatggtttgtatcattatttttttctttgatgttgtaatgcatatattcaatgtatcttaataatgtccacccctttcctgcccctggaggctctccaactcaacccaggacctcccattagtattttaagcatatttctttatcatgtgttaaatatatttctttctcatttctgtataccatgcaaacatatacagaattccaactgctgtatttattacagctaattattttcccacttgaaggggaacaactttgtttttattgttatattaaataaagttagttgaaattttaatattataagcatgaatcttaaaatataagcatttctttaaaataaaattctaaaaagttccttaaaatgggaacaccattggtggtgggtggtggttagattttaaaaaaaaaaaaaagtctttagaacaaatagcagttttatcttctcttttctcagggaggttttgaatacaaaaaggccattgtggactgcataatcagcattgtggaagagaaccctgagagtaaagaagctggtctagcccacctctgtgaattcattgaggactgtgaacataccgttctggctactaaaattctccacttattgggcaaagagggccctagaactcctgttccctccaagtatatcagattcatttttaatagggtggtcctggagaatgaggctgtcagagctggtgagtcattagagcacaactaatgatgtcattgctggtctttgaatataggtgattcaagagagtagtaatgaagttgcaggttccctaatgttgtgatatgatcttggaggacaccctggttccagatatacagctcttcttttgtgtttcaacttccacacagatttttgcctttaattagagacctacagcccttgtctttcagtgtgacaggaatactatagtggggcctctattttttctttaaaccataagtaaaatgtataaggatttatgtatgtatagatgtgttcatatatacatcttaagtgactctttctagtctattacctagaatcagtaaattctcctgtgatcccttctcttataaactattgaccttatctatccttatattttgtttccagataaactcaaaaatgacatcactagttgcctttatatgctctttgtccatttttttttcagctcaataaaatttggccctctttaaattctttc

SEQ ID NO: 31044 - DNA, 1227 bp, Mus musculus
catttattggcagtcatgaaagtccactctttgatttcattgagagctgcttgcgaaataaacacgaaatggttatttatgaagctgcttctgccattattcatcttcccaactgtactgcaagagagctggcacctgctgtctcaggtcagttgtgtttgaaagctgtcctttgtttatgctcttatattttttttaatcagtgggcttgcagagtgggtattaagggtagcatttagggccaagattgctcagtgaaaaaaaaaaatgcttgctaatggtctcagcttcctctaatgtttagaaaacatatttgctctcagaactagcacgctttctcttacttaaatgcaaatattaattgggatattgatttttagaggaaaaaagcattttgttttatgtgaagtttttatagctgaacaaaaagtgctttattttttatttgtgatgataactttgttcacatggaattttgatgctgtgattaatttcccgacacacagaatgaacatgattattacatactataattttcatctatctgatgaacagtatccacagtgatttttctgtttttctttttccagttcttcaacttttctgtagctctcctaaaccagccttgagatatgcagctgtgaggaccctgaacaaggtaggtatccctttgattaacaatagacatgcatgtttacttcagaaacatgaaatgcaaagcatttggcttcctcttcaagcttagagtatatgacctgtgggcctcacatctgtagcaccctgcttgtacttatggccttcgttgaagctgtttatactgttagtccataacttatttctgatgtctgagtactttatgttcaggtgttagactgttcaatatggaggctgttcacaagtgtccaattaagttaattaagattaaataagggattcagtttcttagtcactccagtaatcctacctatgcgtatagccacttgtggtaaatgaaaatcatacaaacgagtgcagagattgagcagttttacaattcctcgtctctaatcttgcaaccagttgtgtcttaaaatttatgtgtttgtgatgctatgtcgtatatattaactccagtgggcctgaagttgtgcccaaccattaaaatacacaaagattctccacaaaacataaaactcttttgctgcatggataaagactttttcattagtctgggtcatcttttcctgt

SEQ ID NO: 31045 - DNA, 1189 bp, Mus musculus
ctttccaaatgctaggactggaaatatattttacgtccatggctacaatatagtttttatataagttttaagtaaaagtggaggtggtggcaaatgtctttaatcctaggagttggcagatctgagtttcaaggccagcctgatctacaaaatgggttttagaccagccaaccaggactatacagtgagaccttgtttcatacaaataaacaaacaaacactcttttaagaattgatttctacagtttagggtccttttaagttttctatctcttctggagacaattttgttaatatatattttcatagaaagtcactttcttatttatttgtttatttattacttattcactttacatccctttcactccccccctcccagtcaccctctctcacaatccttcccacatccccctctccccttctcctctgagcaggtgggggcttcctgggtatcccccaaccctggcagaacatcactttcaaacatatcccaaacttatttgcattaaagtttataaaatattcccacaataattattttacttcttaactatgtcttattatttctcttctgttctaattttgtacaatatttctttttctgaattaagtttatttcagtcttttaaaaaattagctctttggcttgtagttaagctttctatattatattcttatagtttctgttttatctttattaatttctttcttgtttatttgcattttccccctaattttataaatagaacacttagttcacagggcttcctgaactggacactccaggtagagcactgaatactattgtgaccagagccctatcactgctgtccatttctgactagagaactgattcaaggttcctaaactacaggcagagaacagacagaaccaggcagatttgaagttattaataggcaatgcaaaggaccataaggtctggagtcaaaagctgctgctgtgcccagcacagctgccacagagcagtgcctggttaactgagtgtagtccagtacttgatgggcaattggagcagcagctgctggagaagttctggggtgtgaacatttttctgactgtcttctgatactgtagggcgtactcttgattctctatagactttcaaggacatccacaaactattgtcaactacagaaaacatccaactactatataacttacaggc

SEQ ID NO: 31046 - DNA, 1237 bp, Mus musculus
ctacccactgtgtttagatgctcattctgcccccgattcaccctcttctcttctctgaatgatacgatcatccagtgtgtgatgtttccctcagcgctctttgtctcttcctagatagaacatggcctcctctcaaagcagattgtacctactgtgtgcctgtaaaactgttcctggcctatttacatgcacactgttgaaagaaggcagttgtccctctaacccatgtctagataaggattgagaaccaggtgtgctgtgtatacgtctctctgccgctttgttcttaatcccctcacacaaaaggacagactgtgaaagtgaggggaacatcttttaaaaattaaccacagtggtgagccatgtaaaacaccaggcgtccagttaagaagtggcaattaggtgtgcggcgtaggagcggcgcttgaggcctggaagcgttccgcggcctgccgggtcagcaccatgagctccatcggcactgggtacagctattgggatcagatgtaaagatggtgttgtgtttggggtagaaaaactagtcctttctaaactttatgaagaaggctccaataaacgtctttttaatgttgatcgacatgttggaatggcagttgcaggtttgctggcagatgctcgttcattagcagacatagcgagagaagaagcatccaactttaggtccaacttcggctataacattcctctaaaacatcttgcagacagagtggccatgtatgtacacgcctatacactctacagcgctgttagaccttttggctgcagtttcatgttggggtcttacagtgcgaatgatggtgcacagctctatatgatcgacccatcaggtgtttcatatggttactggggctgtgcgattggcaaagccaggcaggctgcaaagacagagatagaaaagcttcagatgaaggaaatgacttgccgtgatgtagttaaagaagttgcaaaaataatttacatagtacacgatgaagttaaggataaagcttttgaactggagctcagctgggttggtgaattaactaaaggaagacatgaaattgttcccaaagacataagagaggaagcagagaaatatgccaaggaatctttgaaggaagaagatgaatcagatgatgacaatatgtaatattttcttccccatccgctggtttacatttctgtaacagttgcatatggctagcaccatggactatatatacccactgaccgattt

SEQ ID NO: 31047 - DNA, 1163 bp, Mus musculus
tgtctttacctgagcttgtatgaaaagtcctctgtgccactcctctgccagcctcacaggaaaggaaagcctccctgggagggtcagctaggaaaggacagcgtgggaaacccgaggaagcggcctccaagcagccagtgccggccctgcgcggtcgggttcccggcgcggcccctttaagagcaggccccgtccccgccctcctcctggcggggctggcgctcggtggtggccgctacggtgctgacaagatggcggctggcggggctgttgctgtggcgccggagtgccggcttctgccctacgcgctgcataagtggagctccttctcctccacctaccttcccgagtaagtgcggggccccgcgctcgagctgtcggagccgctcggtgagagcgcggcccgccagagcgtgcggtgtggggagcggagccgagagaggcccaggcggggcctgtgacggggaacgcgcggcctccggagcttctcagtgcggcggccgagtgctccggcctggcgggccgaggccgggctgagggcccgggagcgagctccgggtggcggcggcgaggcgggcttgcgcagcgggaggtgaggcggagcggagcggggctccgggcccgggccgcgggcgagcctcccccgccgtcggaggtggtcagggcgacgacgggggcccggtccttcccggacggctcggacagcgccggagttcctgagcccgcagtaaaagtgcttagctctgcacgagtggcgagagaagttggggagtccatccgcaccctggcgagaacttggaggactggcagaggggtgtcttggctttttttggacgggggggggggctggaagttctgaaaaagatagggaaggagggcaggtctgggggcgtgcggcttgcccgagggcaccaccaagtcagcagaaatggccttaggaacacaacgaggaacgggtgcagttttccgttgctattcgaataaaattgctacatctccggagtgtcctgaacagggagtgtgttccattcgtatttttaaaattcctcccgtttgttcagattggatttctcgagtccagtcggtcaggactctggaagttgaagctgcgggtgaagagtcagcctccgcggactgcccacctgccctcctcctagtcacca

SEQ ID NO: 31048 - DNA, 1149 bp, Mus musculus
ctagatacatagctagtctgtgagtctaaggaagcaagtttagtttataacaacttggttttgatgtgacacattggggtcttttaaagttattatgtgagtgtatgcacacttacatgtgtgtgcacactgtggtatatgtgtggagatcagaggacaacttagggaaatcagttctgaggagtgaactcccctcagtaactgaggtggtgaagactctgcctactgaggcatcttgccagccttcacacatttcatagggaacggtaaggagctctgcctgccacagacatcctgacagcacagttgtgtctatgccacagggcatttctgctgcctctctgcagagctgacatctgtacgctcttactctggatgctcaaaaacagttttttagatatccagaagagatcatctctaagcagtatacctttcttcaaaccttaaggccatttcttataactgaaagtaattgcttcccttgttttgtgttttctaggtttgaagaaaaggcccaaatggatccccttagtgctctgaagtatttacaaaatgatctttatataactgtggatcattcggacccagaagagacaaaagaggtaaagaaagatggataaatgtttttcttgtgtaagtgcttaaaggaaatgaagaactatgatgcactgcccttaaggatgctcagttggataaaataaaagtgaacagctgtagtgctaaactgctgcactccagcattgggaaggttggtgcaggaggatcgatcactaattaaaggctagccgaaatgacaaggtatctcattacaccatctatctgaggggaaagaaagaaattgaacaggcacatttgattcattcaaaattaatttttaggtataaaatttcaaattacgggctggtgagatggctcagtgggtaagagtacccaactgctcttccgaaggtccagagttcaaatcccagcaaccacatggtggctcacaaccatccgtaatgagatctgacgccctcttctggtgtgtctgaagacagctacagtgtacttacaataatgaataaataaatcttttttaaaaaattaaaattacgttagttctgtatttatggaggaatttttaaagtctagtttttataaatcaccaag

SEQ ID NO: 31049 - DNA, 1281 bp, Mus musculus
tgttgtagttttaaagcttattttgattttcccattgtacatgactaatatctaagtcagtacacactaacttttttgttctgtattgaatttttgaaataatacataaatttgttttattttcttcaacaggcttttcagatgtggatcatacctatgctcaaagaactcagctctttgacaccttagtaaatttctttcctgacagcatgactcctcctaaaggcaacctggtagacctgatcacactgtagactggggagtgggattgaagaattactgggctcagacatggagaaggaaccagctgttctgtgggcagaggtgacgctgcaggtactgaggacggcaccagagttttgaaggatccttattatcacaagttttaaccctcttccttcatacctgacctcaatccccttttcctcttatttctgcattaggctaataaagtgaaattgatatacttcccatttaattatgtatatttttctttagcctttaagaattagtaagtattaatgaaaattagccttttttctggcttccaagttttcaaagtttatttttagttaggagaacagcactactggtagacttggtgctgtaggaatttggggttttgctgctgggtgtttagcctttgtttcccttttcttctcttcccccttcactttccccacatcaccgctgttgtggtgccgactctgactccctccctcatccttaactggctctgtgtggctctgtgggacacacacaggtggtgtatgtttaggtgatgtgtggctgttgacttttcgtgtattaaacatagagcagttagagggcttgaatttatactttttgccatactaccaaaagcaaaactcaagattggcccagacacctgatcaagaattgatatttctgtattgaaattctgtagtggacattacagtagccattggcatagaatcacagaaacctgaaacccagcctcctacccagaaataagagtgttccaggtgaccagcaggagaggtgctgtccttccccctatttttactgatatctctgttgggattttaaaggaaatgactgctggtagagctatgcagaacctacgctctcactctcctctgagtgaactttttgtcatagttttatctggacaataggttccagagctgtgctttcatatttttctgatatgtgaccctactattttgaagagtaatagtttgtggttgtcttttggcatacaatttacaggcattttagtaataagcatgtgggcca

SEQ ID NO: 31050 - DNA, 2440 bp, Mus musculus
aatgggattctgctgcctgcagcctgcctgtacatgcttcccccagccgccaaggttttttctttcaattcctctgactctattatttgggtgaaattcagttcttaaccttagtgattctttccccccccccacccccgccccttcttttctctgtttttatagtgcctgctttaattccatcccccctcactgtagtttagaatttttcattttttactgccaagtttaaatgattgaatcctaggaaaccactcagagctgcctaagtactaagatgctttaggtactaaggaggtggatgacataactgactcaggcaggtcagagcctgtgccttgggcattagtggggcactccaggggtacctttaggaagtgtagggattacacatccagaaccaagattggcatgctgctcgccacatccccatgacagctctgattgagaacttgtatagatgtttataaggagtaacagcagaatattataatttaaacaataaaaggtagtatttaatgaaccaaatatgtgtgctttcctaaaaattcctttcatattctagcttagccccaaattaatatacttagctgtagatacattcgttagtggagaactgttccttgacagaatccccagcttctgcctcacctccatctcccttttttagcagaatatatggctttccatcagaaataagctattgataactgatgctactttcacccttgtgttctgtaagaatttagattgcaagtcacttcacaaatgcatttacattttacttatgaaataacatgagaccttacttggccagtttgtttgattcagagttatgtcatgtttttacacacaaagtaatttagaattggatttccactcctgtgttaaaggtgacaaacaacattaacctttatcaaagtcaccttttttgatatggtttccatctctactaaaactgacctttctgtgttcaaggagtaaaaactgacagaaaacattggaaagttgggtcagtgtttgttgtagtaaagtgtgtcagatttagcatccagtgctttgtttgtttataaacaaatgaatgttgagtgaaatatgtattctgtgtataaatgttggcagcttgccattctactggctccccacatctgccttaagaagtgttatatagaaatacacagtaacagtttcatgtaacaaaacaggcttaaagtcggtctgtagatagaagctggctggagaccctaaccatctagtgagagtctgagatggttgcttaataagtcaacaagcacttaaaaagtggtcctgattgctattctccgcgttatattaagtcttatggtaattatataaagacattacctcactattgttttgttgtattggaaaattgtgaatcatttatttcctgtgaaacaagtgtgaaacccttcactgactgtcatgtgacagctgggaattctgctatgaagtgacttcgtgggtggaagtcatgatagtgtgcactttagacaaagtcacaaagctctttaaagatgcccttcctaaaacttgctttcttaaaattcctgttaatctacagtctcaccatctgcagaaattcttaccaattttcaccaagttttagctagtctgtggtttaggatttacaggctctacaagaaaaaaaaattctatagttgctggagatgtgtcaaagaggtctgtatatgacagtatttacagattaagatgttgggctctttaatgcagtttttgttttctgtattaagcaaattctaatttttatatgtggtttttgactgtgggggttgtctctatagtttgtcttactgttgaaatgacatggttatccaaagcctctagtgtccgtcaggtgtgtattctctatatagatgtatcagctggaggtcagagctcccacttgttttgaagttctgtggagctgactagtaccgcgcagtgacaggaatcgtttacttgttttcagggcgggggttattgcagtggattcttttcttcatcaaatgcgcttcttgttttcttattaaatgctatctcagattttatttttagatgattttttaaccttaaattcattctattcacctattactgtgaattgtgtttctatttattttccttggctaatttaactttattcgttacttcctagatttttctatggcactgtttagaactattgtattgcttaaaaaaaaaaaagtcaaatcattgtaaatcatatatgcttctgtttatgataagagaataatgagattaaaaagtgtatattagtaaagaagtaataacatttagatattgctatacaatgtgtgtgccattttcttttggggatagtgatcattactatggcagctttaatggagacgtctgatttagcttcttttcctggttctagaaactgttgtcatag

SEQ ID NO: 31051 - DNA, 1177 bp, Mus musculus
agacagtatcatgtctaccttttaaccttagtacagccagttagactttctagtactcagggagaatgccttctggaaaaaattcctgctactgactgtctttttcaaaagtcacagatcttgaagtggaatccagttcacaacacagaaagcacaggataattctaatttctcttctgcattcaagagctttgtaaatcgggctggagagatggctcagcggttaagagcactgactgctcttcaaaaggtcctgagttcaaatcccagcaaccatatggtggctcccaaccatctataataagatctgatgccctcttctggggtgtctgaagacatctacagtgtacttagatttaataataaatcttaaagaaaaaaaaaggaatctttgtaaatcatatctgcaaatgtgcagttcccaaacactgccaggtttggaaccagaactccgtgtggatttcatctgacagctatggaatcaacaacaggaaaggccgtagtgatgggtgtttagtaaggacgggaaccagttcagaggcttgtgaaatcgcgtgtctttctttcctctgctactcagagagactcagtagttgctatgcgtgcgtgtgcactgacccaagaattctgactacaacgaagaatgagcgtgagctagtgcatgttcccaaagctaagcacggcaaaaagctctccattgttaacctagaataagtctacaggttcaatactaggaaaaaagttatcaaaggagatcaaagcttgtgcttttctgaacggccttgggaaagtagcattttttttttaggtagttaccattcttcttgaaaatacaggccttaatacaaagcccagttttatctttaaattttaaaacttggtaagtagtttcgtatgtatggccagttccctgataagcccacagggaaaagctataaatgaaagatctcaccgtacagcttggaggctcccagagagcttgcttactcatcgtctctgagctcttactgcagcatagccctgaactgtcgtgcgtgtgagcctcaagcccagcagagagttttgatacttgaactggctgccacacagggagtcagccccattacatcatcagtcttcattttcatttactgcttagtggatgccaagttagttggccaaaaggaaatacagtgtg

SEQ ID NO: 31052 - DNA, 1227 bp, Mus musculus
catagagtaatgttatgcttttaggtgttctacccattcctatagtgatgaatgagattggagaaagaacctggagtttttgccagttccctttacagctgcaaagcttttcagattcagttgcagccaaagactagaaaccatccagaccatgagggcctgcatctgcaagtgacctttaagttatatttgctgtgcaattgctgcattggagcagtggccgctgaaaacagatgtgtgcagcttcttgtatcctttctaatgcgtccatttctgaagtcacagagcacgtgcacctttgcagagtcttggcttatttttgcatctacatgtcagtcatgcttgtgagaacacatggaaaagtaagtttcagcccagcccacttactggtaaatgtcaaactccaaagtaggtgatgtgtgagtttctatgggggaagaatttttgtttgtttgtttttaaattgggatgaggagacacacatgcagcaagcacacagtgaggaagactcgggaaagcagaggacactcaggaggctgaagccccaaacatgtctttttgttgttgttgtttggtgagagaaaaagaccatgtgtttgatgcgcttcagaggtcactcatgaacagtgctgctctttcctaaccagccccttaccctggacagactgctgctacactctgattaaggtggtctgccttttgatatgtgtgcaatgtctttttaaaccaatgagattgtatagtattagttacccttcatgtctagccttctgcttatttagaggttgcaaaatgatgggttttctttgagcagcttttgttcaggggtctgtatatgcactttctcttttagaagcaaaaacattcctcttgaccaccactctgaagtcacgcacagcagggccctcagcctcacaggaggagtacagggaggctgaggaggacttttttcttatctttagttttgagaccatgcagtgttccatctctgaaaaagacatacttgtaatccacacaagaacaaatgttagattttttttttaatgtccgcttttgtgagttcgaagtacttagtaaccagaaatgaagatgtcttctgataaagagcttcgatccaaagcttgggtgggaattaacttcagaaagttaacagcttgactacagagtacagcctcatcttccaggcctacctcagtctgtactcatctggcctggacacacccttgg

SEQ ID NO: 31053 - DNA, 3407 bp, Mus musculus
tctcaaggacaggtccccaatttccatctcctataacatggcctcggctagcttgttgtatcccacctctcatgagttagtctttagtcccattatttcccagggcatggctttgaacttcttgttctacattctgatttccttgcctttcttagtgggattgggactaaactcacaggcctcactatctaatggagtctgcctaaggggtgggtgggcaggcaaaggcatctcatgctctgatggcttccccaatagcttcctcatggcagctgattctgtactgagactggcctatcatttaagacactccctagaagacacttctcaaaaatctcctctggccgtctgcttctgctccttttttgttgttcactgctcagctgagtgggtgactcctcaaaacctagtgtcacatagcagttgtctaggaacagatatgtcctggggtcccaactggtccctgattggcaaatgtgtctcagtagacaatcgatctaacctaccaggcattattattattccacaggaagctcagggacttttcaagttgctgagagcttgggttggtgtgctgtggtgtgttgtgtgtgtgtgcgccagctccttactgccaaaggccaaagctcagatcgtggagactgtgagctaattccatcggtttgcaccctcctttgccacatggagaaaggcccagattgtgcagttttaagataccttggcctactctcccagcacggagccaggcttttgtgtctggtgtgctttgtggcattccagctgtcccatttctgatggcctctcagggaacataaaaccatgcctagtacctagcacaggatttgtccaggctcagcggtgtcaggcagccatgtccaaggttgcgagggcccagcatagtgatgatgggtttcctgagaaaggggaaggggccctgtgtggagctttgaattaggcccatggtttgtattcttgtggtataagttcccaggactgtctggtttggagcagcttatttgaaaggggagctaggggggcagacaggtgtcctctgcctgagtccatctttaccactgtctctctgagatacagactagagagaaagaaaaggctgacagaagtcagggaaggctcctagtgagtttcacaggagcttgaaaaaaaggctaagaagaactcaacaagccccttggcatgcttctctaaggtttgcaggggagtgtggggaacagtgccaactggggggggggggggaattaggtctgtttgatccctgcattaggttctgccacccagtgggttcattctgtcatggtccgagaggcagacaggatttcttcttctcaatggggcaaggccatttgacagaccgcaaatgctttttctgcaaactggtcacagatttcaaccctacagtctgtcagctatgattgtaatattagacaacagatagtgtgtctgggctggaggaacagccatggctctgaccagactggcccagtgttccttcttgtgcactcaaattgtgtagccttttattacctggccttcacttgctcttacggctgggacatctgttcagcaagacatgctgctagcatctataaaagtcatcttcctgtggttatgaccgggtttttagagctgttaactcagaatctcaggcccagtcagagaaaagggagaggaagggaactttagagccagctgtaccaaagagaaaccagagctcttcatttcagtggcaaatggttctcccctagctgcaaaccccaagggcccgatggctgtgcctgagcacacccagcagctcttgtgctcccacgtgcatgtcaagagaggcaggtgagcatggggcactgagcagtctgcccggcagaaaaggacccagactcatctaggacactcacttctatcttccctgatagagtgagccagcccactctatcagtgtttgagttctattggtctttgcctattttttggacaatacactggtgaaactttggagagtaagttgaagttgacaagatctatgcatatttttgacaatgtaaatacaagagccacatgtttatttaccttgtactactttcagagagtaaacttggggtaaagatttgatagctatgagagatagctaagcctccctccccacttctgaacaagaatgtaaatgtctatttagtagagatgacttttttaaaaatgaagaaagtaacaagacaggctggtaacaaacgtatttgccttggagatagtggatttacacctcccctgccaagtcgcagtcctactgcagttcaggctggagttgagaatggtctgtgatggtcacggggaaaggtttggagatacagtctagtctccctacaggaaatcacatctgaagacacaaagagtctccccagggacagggacaagaggaaaacacgcatcccacactgcccaccctgtgctgcgtgtttctcaagaacagggaattaaggactgcaacttctaggtacaaggttataggagaccgccagccttcctcacgatgaccctggaggggctgggagaacacaagggacaatagcagccatatttggggctctggaatcatgtggtccgaggtgtaaataagcattctaggggcttgggtttttgtttttgttttcctgtcaggaattaattttgaaaactccttgaggaatgtccagcagaatgaggctcaaagggactgcatagatgaaggcagagggggagaagccctgtgtagaacagcctgtgtcaccgtcaggtgtctgatgcttccctcggtctgccgcaaacccaccactggccaggatcactgttttgtgggggcctttctgtttgtgaatgtcaaccagcttgcccaggagattgggggagtgtatgttgtagtggacaggggtctaaagtacactggaatttattgagagattatagttaactattgcattttcttataaagtctattttggaaaattgtacactgtcaataaaaatgcttttgtgtaagctggttcaggccctagtgttttgctttggcttaaaattctccacctgagcagggacattagctccttctcctgtataattgggcagcatcccctgctctcatcagcacctgcagcattccgccagtagagggggaaagaggagatgctggaaggagtggaggaccgcagggccagcgcctgagaggaccatgttccttgctgtgcaatgtttacaaatttgtcaccatctaacacccttcttacttctgcctggagtgtaaagatatgtgaccatcaccaatgaaagataccatgccagttgggtgtgaaaacaccaccaagagataaaaccaagcgctagaatccagctcgggtctgcacagagaggtggtgcttcccctc

SEQ ID NO: 31054 - DNA, 1179 bp, Mus musculus
gacatttggtctcaagtcagtacctgacactagagggctgctgtctgctcctttctgattttttggggtctccagagtgaaccctaatcagcaagaaggtggaagggagatgatgggaggagggatgtaatgagggaacaaggtgagagtcaagaggtgagtgagtccagattttacaggctcccgagttctcaaactgcaaaaatgcatctctattaagccttcaaaacacaagccctgtgacgaaaccctccctcttggtccacagtttgaccttttaactggccttcttgatttctcatccctcagagtggacccgagaaagtcatgatggagtagcttcctcctcagccaaacacgacaaagttgtgtcatgtcacatagcctcctcctggatttctatgtatgtgaatatttcctcaatctccaatgggctgccatcactttttgtgcagagtgtatataaataaaagcatcaggggcttgaagattatccgattcgcccctctcctatgcgtgcatctggagtctgtgtacttcctccatggctctcccctccctaacttttccattggcacccacgatgagcactggagagggctggaaatgcagtggcatttctgtgcctggggtttgagggacaggaccagaaggactcttatactgctccactgtgaatgggctctgggagggtcctttatgtagtctattcattcctttaccgaacagtaagcatcgacagtgtgaaatcctattttggtccattaggaatgggctttgggggtctctttttgcctggtttacatcagctgagcacctactgtgtcaaatcctgatcagagacaggaagatctaaagggaatttagctggtcaccttcctagtctccttttctaaaataattcattttcagggaggggatttggaaaacagtttcccatttgttttccagtttggttcatgctggtatagtaggtgaacagtgagcatttgtacattaaaatgagccatagcaccatgaaggtaaaggggtagttcttcccccccatttttaagatgcttttatgaggcatcttgttatagcaagaaaagcagggagtgcacagcctagcacaccaggttagtaacagaacacacggcagtcgtgctttattcctgttgtgataatgtgacttcaagc

SEQ ID NO: 31055 - DNA, 1405 bp, Mus musculus
cactgtttcaacaaaatgtccctgattccagatgccacagcaccctcctgccattttccaggccatggtcttacccaggccgttcctctcagatgctgatgggtgggtcatttggagattcaggcgggcgggataggtatttcttaagagtattttgagatgggaaagcatatgctttgtccttgggttggaagttgatatttgaaaagcactgaaatcatcctaaacgcttcctgccgtttgtttgccttgccttctggtagtgggacttacactttctgtttctcttgcagagcatgctggagaagggaggctaaagttaccctgagaacatgcaagctccttcaacgttaattccagaggtggaacatttttcttttcctagtatgaaaatgacccatttaaagagaagaccactaaagacagacaggcactggaaaatggactcaactgaatcataacgtgttttgatcaacagtttaaaaagccatgttctagatcagcgatcagtcatcaaagaacactgttaagtgttaatgaaaccacaaaatgaataaaagaggaaggcagtccaccccacctttttgtactctctttccagcttccactgatataaaacgttctcgtcactccaggctccatccagcatttagtgacttccactctgacaaagctgggaggagggacattaaactatttcagatggagagacagcaagaaagcactgggctggggcaacagtgtagacttgccaagactgtggagcctgggtgtgctcttctcattatatagaagctaattcattgtaacttatgatgatctttcaaggaagacagaaaggagagaaaatgtacctcttttactggaataatgtttatgattacaggtaaaataaggcatttttgtcaatataaaggcaaccttggcttgttcaaccaagtagtgaatactgacaacttcactcactatcaataataaatctattttctgactaagactggcattttctgactaagactggcctcatgtgttcctctggctggagttgggctgggtgactgagtcacgtgactcgaattgcttttagtttgcattttcactacagctctcctgttcagggccagtcatgcagtgatgcctgcagcttgcctctcacataggtgcatttagtaagattttacatgttgcatgaaccttcctttctttggcatgacttaaagtcttctgcatggggccagagacagtagctataagacccttctgaccctgccatactatgaaggtgcttaaaaaacagccaaggaccagagcctttcttttcccagttcattgccacttcctgattataactgcttaatctaggattggggctccagcctcaatgtagggacctggaagctacatg

SEQ ID NO: 31056 - DNA, 1540 bp, Mus musculus
gtgtccaccagggagggtctgagatactcttcttccttcactaatgtgtgaggcttcactaataagtgtaatttccctagactacagttttattattcctggaagcagttttccaaatcatggctattaaaactttcacaggtaggtcctcatttcccagtagtcagagatcacagactttcccgttagtatttggatagatgagactataaactcttgagagtgttaaaaacctcgtgtgtaggtttatggcccaaagggagctggatgagtatgactcttgcttcagagaccagaataatattaactcctggctgacagtttgcccagaggaagcctggagcagtctctagagaaggttgctcagtgttctcacacaactggcctaagtcccttgggcagttttttctgttttcacaattttattggtgtataattaattgacacgtctatactgcttcacagctctcaatgataactgtacattatataataattgtgattaaatatgtatgttgttagacacatactatattttgtctaattttatcctcacagtaactgtatgaagctgcccactctgtgaatatcctgaagctgagagcagcttgcccccagaatacaaagccagattattatcagtagatctggttttgagtcggctgcctcaacagtgctgggggccaggacactgctgtctttaaaatgtatgagtttatgcttaagttgtttagtctatctggggacagtattagttctttgagtgccgagttagcacctctagcttctagtacaactcttgggcatcagatctcatcattggatgattgccttctcataacctgaaagtattgagctaaacactcaaaaatgtgtcatgtcctcctcaggatttggcactttcaaagaaacttttacagaaaggaagaaagaatgttttccgtacctgaacctgccgtacgctgcagtccccaagttccttcccggtctgcatttggtgctttccctttcagtgaggactcagtagccgtctgagcagttggacaccctcgaggtgtctgcacacttttactcttgtaggacagtcaggtcattgtgcctcctggaaagaaaacatattttttcttattaaacagttctgactgataatttgtttgaagtggattgttgacacgttcttaaggaaaatgtatttttttgccaggagtttattggttctaaggttgtcaccaactgaagaacacaaaggttctcctatctagagtctttccaggataaaagtccctgtatcccaaggacatcgtgaacacttgattcctttgagggttccaatgtcatgcatatataactttttaatttttacagtgaagttcaattaattctttttgctgaatcaaccactttgttcttggctctgtcaaggatgatggggtttggcacagcatacaggggaagtgtaaaagccctggtggccttaggagctgagggtgaacagagagcttaatgaggtgtaggctcagtacaaagatcagcctggtcg

SEQ ID NO: 31057 - DNA, 1672 bp, Mus musculus
aaattgctaacagctttttcctttcttccttttcttttttctcttttcttcttgttcccttttaaaccttttattcccttatttgaaaagggaacctatgaccaggtgacaaaaaggaatgaaaggtgaagtcagtttataaagctttttcttagtgaccagtctgaggtcccaggctacatggggaggaaggtgttgctagagtggacgtgatagaccaggagggaaatgccagtgggcggactgtggtcagcacattgagcattctattgagtggcgctcagggaaggagggtcagaagggaagccagttagtttaaaggagaaacaaaggaatgggcagctcacttttgattctgcctgccgtctgacctgcagcatgtcttgaagtaaagtgtcaggccagttgtctgagtggtcgttgcaatcacagtaaagtctcacaacctggaggctaaagacaggagaggacagggttaaaggtgctcatgttttaggaaggcactgggggcatttctggtgagcattttttctgtcccctctcttgatcctttgcacctgatacctggaacactcttctctcaatgactaaagcctttacccgaatgtgggagtactgccttgtttacttagtttaagaattaatgattccttacatacacatgatgaggcatgagcggtttcacagaaactgtgaaaccttgatcctgtaagccagtggcagctcacacgtgcgacatggttggcatgggatagtatgttcagcctttgatttgtcttaaccacctgcatattgcctgtcttcacgtttacttaactgctcgagtgtaagatactcaagcatatgttctgttcgtagctttcttactgattgtggagttgtgtggcatagatggccaattacagcactcacagctcctctatttcaccactcatcacaatgttggctaaatccagctctcagagcattagggagggagtaggattgatacagtggtgactcggggtcttctcctgttcacagatacttgagtgttgtggtcacagaggcataaccactgctgggtaattcttgatgcgtttaccacattatcgctgttattgtagaagacttaacatattcactggataaagatcagaaaataaattcagtaatgtgttaaaaattaatacaaaaatcattatccatagataactattaatattttatttgtgtatatctgcatatgagtatatgtatacttatatatttgtctgtttatgtatacatgcatacacttaagttgtgaatatctttatgtgttttggggtaaggttgtgtgtgaagtcagagctcagtcttgagtattgttctttgtgattagctcaggtgttgtttacctttttttgaagcagggtctctcactgggctggaactgtgcagttaagctaggctaactggccagcagccctggagatctccctgtcagcaactctccagagctggggttattagtgtgaaccaccaggcctggctttttcttgtgggttctagggattgaactcagctcttccatgcttgtatggcaagcacttaacggacaaggttatttcctgacctaaagtctattttttaaagaatcgtgtttgtccagatgattatggttgcatggcaggcacctaccaaccagact

SEQ ID NO: 31058 - DNA, 1232 bp, Mus musculus
ggtttgagattgtggttggtagagccctaaattgttcatgtctttaaagaattattgttgtgtgagctttccttttccaacatatggaaattagtagtttctgaggattctctaggagcatctaaatctctaaacaaatatgttaagattgaaaattcaattgcccattactctgtattgaaatggacactattataggtagtggtgaatatcatatgccatacataaggcttgaattaacaaatagcactagttagtagtagaccaacttaaataattaagatgtcatagaaatttgcatagttaaaaatgaaagtcctttataattctgtcttgcagaaataaccactttttcatattttgttctagactttttcatatgcagctactcccattttgttattgccattattaacactataagagaataataggcaaaagaatgctcactggagtaattgagttaaagcctggaagcagctcagtgtcgtctggggagtgaaatgtgaaccacatacaggccttcagtgggcagcagacgtcagtagatccttgtgtgcgctttcaatcatgtgcaagagtcagactgccgggagcttgggggggagcagtgtgtaaaacaccacagagaacacatgtacacacatttattttgagaaggtgttaaattttaaagatctgaagtgtgtacatagaaatgtgtgaatacattttaacccaagataaagagtcaactgcttcgccgcctccttgtgcagattctgaaagcctcacagagcatagaacactgtgtcatgtggtcgtgtggaatctttccactgccagcagtgggtccatgctcagacagagcaggagcttagagcctacttgtcattcatttgacaagtgagtagaaggaagctttgggttgggttggtgtcctccctggccttcagcataggatttgaatttttttgtccttcatcccccagctgatgattttgaatttagtctatccatacaacatacagaaaaagaatataagctattgattatgtccaccatttttaaggaactagataaagcgttatcacttaaaaaattgagatataattaacacttccagaagactgtgtgtgtctttatagtgacttcctatgaaacactttataattatttaattactttaggttgatggagtgtatataattagtgaagtttaaatattaaaaaaaatccacatcagtttcatg

SEQ ID NO: 31059 - DNA, 1161 bp, Mus musculus
tttgttgtgactacagtaggatatacataggtacttcacaagaaagaactgtatttagcacacaggtctggatgttgaagggcacaatactgtgcatcaactcagctcataaggacctcatgtcgggaacgcatacaaggcaaaccggtcctatgacaccaggaagccagagccagcttgggaagggtcaggcttgctcctctgtaacagtggatgatgtgtgcatcctgactgttcgcatgctatttcagagttatttgtaatgattgctacctgacagggatgctaagctgctgccctcctgctgatgaggatttgagggttgtctggagctggaggaggcacctggagagagggtgctttcttggctttaagcctgttgaagtctgttccatgcaacaggagataactcagcagtggtgtttgtggtacttatagaggaacccgggacaggattatagatatggtttgacttaccctcggaagatttttgtattagaatcttggtctctatagtatggtggttttgaggggtggtggaacttttaataggtggagtcagaggtccttaggccattgggaaactgccctgggaagagcttaaatacatgttatgggatctcagagtatctgtttccagttgtgaggtgtgacctcttcccagttattagcctgccattgtgataccatctaccttttaggcccccgcaagggtctcttcgggcatccccagttttggatttttttcagcttccaaaactgaactaaccaaacctcttttctttgcaaagtttgcctgcctgaggtgtttcattataagcaatgaaaaatggactaatatagatagtttgagagaaccttgaaaataatatgacagggtgattaagagaagcatttttaagattataaaaatataactattgctcatttaaaatatgtattccaactaagcttgctattaagagaaatgtttaagtgggttatagttctccatttacatcttttataaaattggacatgctatattggaaaaaaagggcccctggatataatttgcatttcttaagaatgtggtaaatctgtcattgcacgcatgctttgaataattattttcttacagaactttatgttaaactctgaaaacattactgcccctgtccc

SEQ ID NO: 31060 - DNA, 1196 bp, Mus musculus
ttatgtctgctaggcaagtgttctactattgagctctggtcccaacagtacagagttatgtagaatatattgtaacattaatatattgttatgaaatatatgctacatatgaattaaatgtattatgtatcggttaatgtaatatatatcatttaaactagccctgagcttcagaaatgaagacccatttcctcccatgagagggaacagtgtgctctcaatgtatctaggaagactgatgggttctgatgcttccagagctgtgactagaggttggggcagccagtgctgggctttgcacccctgtgactggatgttactcagagtcactcgggagtggggagcattggagtcaatgttaacaaagccttttcagccttgtagatgaatttcagaaaacatgaagccatacttggggcacatgcttctctttccagtacatgggaagtgaaggcaggagggtcaggagttgagggtcattctcagctacatagtgagctgaggctagccctcaaaaaagaaagcaaaacaagacaagcaaagcaggcaaacaaagcagtaacaacaaaaaaacccaaccccttcccccatatgtgtgtgtgtgtgtacacacatatgtagctggctctgctggggatgtagctctgaggtaggcttggaggctcatgttcaacccctagaatcacaaaacaaaataaagcaacaagaaaaaatgtagctggctctggtttcaggagatgaagcctgttgctattcccttttctcatttgcctggtggtctgagagaggagatggcctttgtctccagggagcacagttattgagagccatcctcccttccttatctcacttctactgtatttgggccctgagacagaagtaccggttaaggtatagacagctcatacaagtgtcccaggagtcatgaggcagcacttggtgtttggaatatttgttgagtgaatgacccagtgatctacaggagctcagcgccatgagaggtagctagggcgggggttctctgttagtggggcatttgtaatgggtgtagtggggacaaggaaccatagttctgctaggcaggtatggttggatggaatgaagaattaatttggtgagtgattgcttttggatgatcaaaccaggggtcttgaggcaaggtaacagtagcagaaataacactatagctacctgtg

SEQ ID NO: 31061 - DNA, 1125 bp, Mus musculus
caaaaaaacccaaaccagtttataggcacatttggatttcttggtatagggcttagcttgtgctgtggaatgaaggcagactaatcgtccttacctttatttaacaccagctcgaagtgtgaccggttgggcagcatttgtacctgttaagtctagagtggtgatacattcatgtagaaatgtttgtgggtgttttttgccatcctttattgtagcttggatatagctggtgcctgggtggcttctattctgattattttaggtagattatgtagtttaaaagactttagtataatagttaagctgtctaggctaagattcaacaagtttggaccagctatacacttgattttaatcttgctcatgtgcctcttgaatctttgctgttcctctggttttcttcagggctttagtggattgagattggggtacaactgtattagttgacaagtggtggctgtgtagagtatgacaaagtggaaacaattttggaaaatgtggaaacctgggcaaagggcttcaaagatgttccagattctcgtcctgcctcagtaagtctccagtgcttttagcctagagaggtgaatcactttctgtccctgatttttagtgtcattacctataaaaatgataaatattgttgaatgggtatgggaagaagagtgaaatattgcaggtaaggtatgctttgtcaaacttaaagcagtctaaagagttacaccatcattgtcatcatcattaccaagtgcaaagtaaaaaggatactagtcctgagcctgtttacacagagcaaacagcgtttctagcctgatgccggtgtcactagggcacacgttgttcagtcaggtaaactacacgagtgtttgcacacttgattttagaggaaaaatcgtccagaataatgccctagttatttgttgttatccattacattctggtttcagttctacctagaggcttctttgaacagatatttgattagttgcttttcagccaaatgtgagccagatctttgtgccagtttgaatgccggtaacctgtgttgatagatgtcagtgtctcagcctgactatgatctaagaatgcttagtagtttttacttagcttgacaggatggagttaagt

SEQ ID NO: 31062 - DNA, 1261 bp, Mus musculus
tggcttctgtggttatttaatacctcatcactaacctttttcccctcaaactcttctcacatatttatgttgtcttacatatacttcttttcatttctttttgcttgctgtagtcatgttcttttgcccctacatatatttataacatcttttattctcaccatttatcacatctcactaatgagtaggaagttgaggcttgggtttgagtctttaaagttctcctgaaatgccgtgtattgtactttagatacagcttataccatggacttaatttatctacagactgggtctgagtagtctgtgtacgcctggagatttacatcttcctatagaattgcttgtagatttcatttcctactaaaacattaccaattggtttgaattgtgggctgtttcatattactttgtaacttaatttaacataaaaatttcctgattccttaacagaataatcaaagcagtgattatctgctgtgctgttgaattaatatggaaactggatctgatatttagctgttgttttcctttgcagtgagggagatgaacctgcaagacgtcaaggaggacttggagtgtgacccagaggagaacagcactcttttcatgggaattcttattcagggcctggccagactgaagaagatccctgagacagttaaagccattaaagagcgtctggagcaggagctaaagcagattgtgaagaggtcaaccacccaggtagcagacagtgcttatcagaggggagagagcctcactgtggacaatcagccaaggtaggtatgggtatagtctggggttggtgttgttttattgtatacttcctagggtggagagtaaataacttattttcagttgggctcatcttcttgaactgaggttactatattctatacatacccaggccaggcattatctgtcttgctatcgatttattgagaagttttaggtttattgtccatattcactgacaaggaatgagagatataaacctgtttgttatggagagtgttatcacacatcttaataaatcactggcaagaaagaatgaagcaattgtcagttaccaagctgcttttgagataatttatggatattgtttcatttagcttttcctattacttgtgagctacttctgagtgtcaacatcttatagttagaggagccgaggctcaggggtagtgattagcccaagcacatgcttgccggctgacgagtcttggatttgaatacgagactactttgattgtaaagtctg

SEQ ID NO: 31063 - DNA, 1198 bp, Mus musculus
ctcctagaactgctggaactgttgtttgataagtttaatgccgtagccactgcacactcagtggtcctggggtacctccaggactctgttgggacccagctaacacagcaggaggagatcaaattatatgacatggcagatgtgtgggtgaagatccaggatgtgctgcaggtaaggcctttgtacagaggctgccatcttgactgggacaacagtgtagagaaatagaaaacagatgcctcagttactaccgtaggaagcacaaactggataaggaagtaacgctttcagagaaaggggatgatgtcatttctgtcatctttcaaaggacttctaatgttgttattattgttattattttacgggggggtgtcaggctctaagaataatcgctgattctcaatatatagcactcaaagatatactctatgaatatactctatattcatttggtttttttttgtttcattgaaattagtcatatgtttagctaataagaaacttgcgtggttaatataggaatatcaagagtttgaggccattctgggatttatagagagtgaattgctgactgtgcctatgaaatgagaccttgttttaaaagaaagagaacaggtatatgtgggggagagataataaatattaaaatgttttaaagctattttatgaacatggctgttcttaattttagtattttcttacaaccaccttttcaggcattgggttaatgacaggtcaggagcttattctgagagatgaaaataagtccacggttgcaagtgcatcactctcatttgttgacagtcaaagggatcgcaggactgtttgatgtggtactgctgacatggcatttagaaactgcattatatttttctctctgccgacaaaatagatttgatttggctagatgaaaattagaaatgcaattaagagttagccaaaataagtttgacatagctaaatagaaatggtaatatctacttagtattaaaaagagtaagtacatgtggagaattgaaaaatgtagctgttggaatggaatcatttgcacagaaaataggaatgtttgcagtgataaataaatcatgaatgcaaattgtagtcatttttgagaatatatgcacgctcctggtagattgaataagattgattcttagtaactcattttctagacttatttttgggagtgaggtgatgt

SEQ ID NO: 31064 - DNA, 1159 bp, Mus musculus
tcatttcaaggaaattagcagttctactaagactttgcaggtcaggagtaccttactcagccccactctcttggcctttattgataggcttactgtcatgcttatatatagtgctggcagaatgatgaagggtctcagcatgggtcctgtcattaattcaccagggaccacttcgcttctgaacctttctgaacccacaccctaatacatctaaacagataatgtcttgcctagagcacagtaagtgctcagtaaatattaggccattgctgctaatgctgttgtactttggaataatgaggattacatgctaagtaaagatggattttgacgaattcactcagcatgctacctggcatattccaatgcctataaactcacgttccctgtgaattgctaacagggatattattttatggttgtaataaagcttttcttatatctttgagtagaagaatgaacatctaggttaatatattctggaagtctaggatgacgtacaataaattgaactcctcattgtgcttatatagatgctgttgactgagtacttggatatgaagaacacacgcaccgcctcagagccatcagcccaactaagctatgccagtactggacgagagttcgcagccttttttgccaagaagaaaccacagaggccaaagaattctcttttcaagtaggtatcacagagtggagagctagcatgctgtgatgagccagctctgaaaaggtgggacccttccccaccctccacagccacacatttactagctgaaactgcctagagcaatttgtaggaagtgaacatattttatttttgtatcccgttgccttctgtcaggtaaagtggctgttttggaatggctatcagactgtctataactctgagtacatttttaaagcttctttttaggagttttatacaaaatcaagaaaagtgaaactttccaagtgtttctagagaattttatatgaaattaaaggaaatgaaatatgttatccttgaaaaggcccaagtgccaaaaaacaacctttgtttttaatacagaaacaatccaaaagtttttacttttttcttaattaccatcttagtgaattctgccaagctgtgtgctcagaatgtacatctcttggtgacagttaatagttcataagt

SEQ ID NO: 31065 - DNA, 1211 bp, Mus musculus
agaaacagctctcatgttcatcaacgggaggatggttatgtagagtgcagaaggtttatacagggtgcagtgtagtggtgaaagtgaatgaattattgtacagtgactcagttatacacaacaacataagaaaactcatcccctcccccctcccttgccccccccatctttgtttctctctgtctgttggtatgtctttgtcttcacacaaatccagtacctacaaatgaatttagatggctgtcagaagcggatagaaatgaagagtatattacttaggtggccatctttgagtgataaaatgtacagaagctaagctgaggaattacacacaaactcagaaatattccccactgaagccatagactctgtaggacctgtgctgtcttttttattctttttttaaaatggtgcaaatgtcataggcactattttatatgttatactctcacataaagtacagaatgaacaagtaattaaaaaggcgtattgtaaggccagaatataacatcatgtatcttatttgatgtttgtatcatcaaatctggactttcctaacagtagggtgaattttttggcctgtaccatctcattgaaacctgattccccccacccccaaatctgtgacttcctcctgagctcttaactaacttaactagctccccagaagataatgtctgtgtcaggtactttcctcgtgtgtcacctgtgttgctttccctcaagctccactgtgcagtggttaccaaggctgagttggagtcactggctggaatgtgtttacttcttatattttccttccctgtgtattcattggtcctgtacaacttcgtgatatgtttacttgtgctaggcgcttttctaaatggcaggattcaataatgtgtgaaactgagataccaaagcttttaaattcagactccattttagagaacctggcctaactttgaactcaggtagactaacaggctggtagcattagtttccaagttgcctcccaacaaaacctctaggctaatccccaacaagaccagtgtctccaggtcattcccccaacaaacctgcaccccaggttataagcccacctcttgcctattgaccaccaaggtagaggggaaccgaagttaagttcccagcaccagccaattgtgttaaaggccgcagtagctttctgattagctgcacagatattacctgcttgctgcttacta

SEQ ID NO: 31066 - DNA, 1156 bp, Mus musculus
tctaaagctaagcctttagccaatggtttacagtaaccacagggctcatgtaaaatgtggctaattaagattcttcatgtttgagcgccaccatgtaggtacatggtatcttacacccactagctgtaaattaaaacttgcagaatatgagcctcagcccatgcaaaatgaagttatgtataggtgacttgctctgtttgaattaatgaaggggctgctggtatcgaccagctgtgctctctgatgacaaaaacgagtcttgacattttgggtaatgaaaattcagttcagcacctcttagagatatgtatgataatatattgtcagtcagaaaagacagaagagaagcacaaacctggtcttattaaaatggtgtgacatgtggacactgctcgatctctgctttctagggggaatgtgtcaggggaaacctctttttaagatgataggaataactctcttgtggaacgggggagaggatttgactttggtacatgacctctttgatagttgcctttgttcatgattcctagttttgtggcttgttttactgggtacagggtgagacatgaaagctctggaaaggatactggcctttttggcttgacagtattaatgcaattgtctagttcataccttgtaagcccactcattatttcctctgcatgtgtttctctagtttagcggattagctgcactgtctcttcaaaggctatccaatcaaggaggggttattaaaaccagggcgatttatgactgagaattaattagagaagcattttcatgcaaaacatccaattttttgattagcagtggagcagggccgcaattagcactctaggaagcttaaatttccagctttttgattctcaggaaatgagattatcaaaccagggtcagacacttgacagcaaagcgagagtgggggagtgtgaaattatatcttaaaaaaagttctttgattttgattctgagattgctattcaggaaataaaaaattcagaagaggagaaagacaagaaaatctcagagtgcaagggctgcaggcctggttcttcagtggcctgtttgttgtgcagactgtcagttataaatgtgtgtgcagagacttgatagatgtaaactagtgggctttgtctctttattattatttatt

SEQ ID NO: 31067 - DNA, 1137 bp, Mus musculus
aggataatttagacaattatattaggcatgagtaagggcagtttgctaaaaatgcggttaatgttaaaagctagagatcatctctgaatgtagtttcttttctgagatttcagtaggaaaattacatggatggagcatgacccagaaacaggcctgtcagtgattgccagtgggagtaattgaagatttgtgcatgttgattgactttcagtatctgattacagacactcagggcagtgcatcttgtcctttttatctcttttgttacctcttcttagaactgcatgtacaatgtgttgtgcttatctgtagattcctagatccatagaagttttatctgtttctcttgagtgtgtgcagaggggagtatttcaatcaatttcattgctaacacacagcatctgaattcagctgtactagaatactgagactaatgtttgatgtgtgaatactttattctcataaagttccatctatgtgagtgtttgaaatctctcatgatcttgggttctgagctattgtagctgtgagtgaccactttttttttttcctgtaagatgtatttattatatataagtataccattgcagtattcagacacaccagaagagggcatccgatctcattacagacagttataagccaccatgtggttgctgggatttgaactcttttttttttttttttttttttttttgggggggccgaatgacaccttctgccacattgaaatcttgtcagcagggtagaattttgtagctcaggtccagcatgctttctctgtatctcttactaccattcaatgcagagaaaggctttttttttttttttccattttttattaggtatttcgctcatttacatttgcaatgctataccaaaagtcccccatagccacccaccccctctcccctacccacccactccccttttatggccctggcgttcccctgtactggggcatataaagtttgcgtgtccaatgggcctctctttccagtgatggccgactaggccatcttttgatgcatatgcagctagagtcaagagctccggggtactggttagttcataatgttgttccacctatagggttgcagggatttgaactcttaaccgctgagccatctctccagc

SEQ ID NO: 31068 - DNA, 1098 bp, Mus musculus
gaggaaaattgttttattttattgtgtctttctgtgaagatggagttgcatcattttggacattttaaaaagtaataatagtaatggatttaaatatgttttcatggtctgcgagtaatggtattgtgaatggcatttggcattttgatagaatataaaaagtaataaaatggttgtatcgtgactgcatgatattgaagatgttttatatcattaagaaactttgatttcagaaataggaaagaaaaagcaaggttctattgaacaatgggttcaatcctcataaaaatgtgtctctaagctcgagtcagaggtgctggtataagtgtcagctggtattgttttttattgcatttgaaatgctttagtctctttccaaagcagttgttttattagacaggacagaaatgattaacaatgaacaatgtctttttgttaatgatgttatgtaaaaaacaaaagggtacttcttgcttccattgaacagctcttttatatttatttattctctcatctctgtctctctgtctctgtctatctctgtatatttatatgtatatgtctctctctctctctatatatatatatgtatatgtatacatatatatatgtacatacatatatatatatatatgtgtgtgtgtgtgtgtgtgtttgtgtatgtatgtgtgtgtgtgtgtaccattcacagtaaatatatgggagagagagcacatcttgcatgagttggttctctctctttctaccatgtgggtcttggggataaaaattcatgtgttcaggcttgattgcaaacacctttacccattttgccatctcacagtcccatttgagacctttaactcaggtatttaactgataactaaacctgctgggaaaatagaggcataattattggattgttagtgcttgagatgacattgatggtcatatattcagtggtatccacccagtggagtaaatggcagaatgggcagttcattaggctcttttttactggggttctttggggattagaataaaggtagaagaggaatgggaagaagttaatgtaaattgaattataattacataggataaagtaagttcttatgttat

SEQ ID NO: 31069 - DNA, 1067 bp, Mus musculus
cctattctgtgccttaatttagaagatggttaagactcaaacaacagagttgacatggagtactcataacattattagatggattaagatagcatgtcacagtatatgtgtatattatttattactctcactgccctaattcagaccttgctccctcagattgaattatgcctgaattatcctaaatgaattctcatgtcttttactgaatgtgttcagtattcctaccatagctcatcttttctcttcttttcttttcttttcttttcttttcttttcttttcttttcttttcttttcttttctttccttttctttttaattggatattttatttatttacatttcaaatgttatcccctttccggttttccctctgcaaacatcctatccccacccctaccctgcttctatgaagtgcatccccacccacccactcaccaacctacaccagtttcaccgccgtagcattcctctgcatttccagactagtgtagtaccacctgtctaccctgcagctcttatcctctgcatacagctcttccctcagctatcacctgtttgtcctctgtattctttccattggtgtgctttggtgtatgctataatatgtatagtctttgcattcatgtgacctgttgtctctattcaataaaatttgatacttctatctttcaagacttgagtatgactctgttccttagttttcttttatagaattttttcttttataacaatagataatagactctaaggataaaaggtgttgtccaggagagggaaggtactgaccaggagacagaggagttatccagttttattcctgttgtgtctttttttgctgctgaagcacttattcatggagggtagttacctctcatgtgtcctggccccattcgttccacacatgtcctttctgcttccacttttcacatgtgctctgtggtggttcaattttatttttacccggtaaatagattttatgtaggcctataatcacctaatttttataatagagaaactaaaaattgacaaatataatataaattccttaggaaattgtctatt

SEQ ID NO: 31070 - DNA, 1099 bp, Mus musculus
attttcagaacattatgggtgctcattttgtagcccccaagtttgtagatgcagatttttgccaacacacacacacacacacacacacacacacacacacgggggcggggggggagagagagaatgtgagagcaagagagacatacacacaaaaaaattgtttttttttcttttttttttatttattacgtattttcctcaatgacatttccaatgctatcccaaaagtcccccataccctccccccaacttccctacccacccattctcattttttttggccctggcgttcccctgtactggggcatataaagtttgtgtgtctgatgggcctctctttccagtgatggccgactaggccatcttttgatacatatgtagctagagtcaagagctcctgggtactgtttagttcatattgttgttgcacctacaggattgcagatctctttagctccttggatactttctctagctcctccactgggggccctgtgatccatccaatagctgactgtgagcatccactatgtgtttgctaggcccctgcctagtctcaccagagacagctatatctgggtcctttcagcaaaatcttgctagtgtatgcagtggtgtcagcgtttggaagctgattatggggtggatccctagataaggcagtctctagatggtccatcctttcgtcacagctccaaactttgtctctgtaactccttccatgggtgttttgttcccaattctaagaaggggtttatcattgctaaatttattcattttctataatgttattgtcacctaagaattgaagacaagtaggcttctcattttgcattgccctttggtctcatctttccctttttctataggtttcatctcttaaatattctagtggtttttattatttccctttagatttaccttagtagatataaggaaaattgttttttgtgtttgatgcaaaaccatgattgtagttctcaggttgctaattagtgatcacctatatgtcaggtcctcattctccatttgcatatagggcttggatctttgtatattattttcatgtctctaatcaataaaatatatttctccttga

SEQ ID NO: 31071 - DNA, 1130 bp, Mus musculus
aggttttgctgtaagatatacataagaatggacactcctgcagtgttactccccctacctgaaagactggatgtgaatcaaagcttggatgatggccttgtcataccaccctcttgtgcggtccattccttcaaattcttgtcaccaagaccagtctgtgacagaatgatgatccattgtcactgtagccaccaaattgcagaaaggacaaaacaggaatgtcatataccagttatttttttcaggaagattttaaaatggaagcgcattgttgtgtatgtggtattggccaaagctaaccctatctaacttcagggcagagccatatatacagttgtaattcaaagatactcaagcaacaagcaaagtaatagtctctgttccaccttccccatttagtcatcaacaaattcttttagtagacagaagaccaattacttaatatttgaaatttatttacctcaacttgaccttttgaaagctgtggtattctcagtagattaatgtccaatatttcaagactgcagaacttaatgtgcatggctgtttgcttagcattatagccgtgggttacacagtgttattgactacttaaaatgtcgctgatgtactgactaacagaatttgaagttttgctcagtttaaaatatctgattcaatcactagaaagtttttatcatttctggaacaaatttagcatgtgactaatttttaaactaaattttatggaatttaaaaacagatgagtacttctgatgaaaatttaacatctgagtctatttttgctttaagtataaagtgggaattggtttttaaaagtcattataaaagtataatctctcaatttttaatcttcaactacagtagatttggtcattataggttgaagacaatactcactaataaaattcattttctgcttctattcagctactgaaaatttaaaattatatgtggagctcacatcatatttccaatagtcagtactttggaaagcttcacattttttaacagaggacttgacttcttagcatatttggtttctgaggcaccaaaagtttctctattttaaaatctatttatttatttatttatttatttatttatttatttacaacccactatcagcc

SEQ ID NO: 31072 - DNA, 2271 bp, Mus musculus
ggtaaagcatggtgtgcatgtgtgtggcctctctacctgctgcatttcagttgagagtagaagggtaactgattttctccttttttttttttttttaatctaatttttttgttttgttttgttttaaggcatttttaactaggtattttcctcatttatttcaaatcctatccccaaagccccttaaaccctcccccaaccctgctccccatcctaacccactcctgcttcctggccctggcattcccctgtactggggcatatgatcttcacaataccaagggcctctcctcccattgatggccgactaggccattctctgctacatacgcagctaaagacacaggggatgggggggggggagatactggttagttcatattgttgttcctcctatagggttgcagacccctttagctccttggataatttctctagctccttcattagggccctgtgttccatccaatagatgactgtgagcatccacttctgtatttgccaggtattggcaaaacctcacaagagagagctatgtcagggtcctgtcagcaaaatctttctggcatatggaatagtgtctgagtttggtggttgtagatgggatgggtccccaagtcgggcagtctctggatggtctttccttctgtctcagctccgaattttgtctctgtaactccttccatgggtattttgttccccattctaagaaggaatgaagaatccacagtttggtcttccttcttcttgagggaaactgctttctaatgagttcaatcctgtaacttagtgataatttggggaaagtttcatggaaattggagttgagaaaacaattaaacaatatttaaacactgtgctgaaaagtctgtgagaagctgtgtttagcaaacaagaagatgcctctacttacactgagtcttgcaaatcttcatgctttattgccagagaaatatgtttatgtttgttttgaacacaagaggatggctctaaagaggaagatagatagcttaaagcaagatccttcaatcttctaggtagaatgcctggagatcccctgttcactcagaacttccttttttaaattattattagatatttctttatttacatttcaaatgttatcccctttcctagtttcccctccaaaaatcccctattccctcccctctccccctgctcctgaacccacccactcccattcctggtcctggaattctcctataggggggcatagagccttcgcaggaccaaggtcaccccattgatgactgactaggctatcctctactacaaatatagctggagccacaatgtgttttctttggctggtggtatagcttcaaggagctctgagtttactggttagttcctattgatgcacttagaacttcctaaagggtgtcaggagagaacactttctgaggtaactttgcaaactgagatcatcagtcacacaaaacaggctctgttgcccactaagccatatgccactcacagctccctaatttggcattgcactctggttgtatatgaagatttcttttatttgttttaagacttaagtttctggtgaaatttttctaggtttttttaggaattagttatttcaacctctggtagtacaaatttacaattgtaattgtaaacactatacataacagacatggtattcatttttcttgtgaagtaaaaggactttgttcagggtatggaagctgtgatggctacccctactctctgtgtgatctatattacaaagtctcccacttaagctaaaattctgactctgggcaagtgcttacttccaatggtttctttcctcatctgtattgtaggccaactcactgcagtgttctcggcattcagttatgtggcatgtgtacaaggtcctggcatgtgcttgctgcccaatccatgcctgctttgttttagttgaattccattgtgtcaatgctttccttgcttgttgctagcaagaagacaatgatactatagtagtgatttgcctggagggtttttgagaaactatgaaggacaccctgaaaacctattttgtctctatgccaaggtcatgagcttccagaatttcctgtttagattctcctattttgtcttccttccatagtgtatacaattgtgtgatgagaatttcccctgaatgtttgtgtctgcctttatttctgtttgtgcataggatatgcctgatagggtaattctagctggtgttcacactttaaaggcttggaggacattcctttgtattcctct

SEQ ID NO: 31073 - DNA, 1136 bp, Mus musculus
atcttcccctttctcccaaaaaagcgtggtttcctttttatcacaactagactgtccacctctgacccaaccatatttgcaaagggaacacttacaggaccagtgcttttcatatcatttcccatagtgctacaacagattcaagggtcgtatgcctgctggccaagtgctttgctgctgtgcatagttcctagccctttatttttagggaaagagtagactctgagggtgctgactcatcattttcccatctcaagctcttaggagttgaattccttccaattagcctctcagtgtggagaagcttggtatcattcaacgataagttgtcataataaaatcatgaactgtttgccaacaagttggtgaaactaagccattaatatcttgaatcagtctgtgttgataattgtggcagtggtagcaactctgctttaagcattattaagtgatgtctgttgtgctctcagcattttaaaagttgaaaatggaagtcttagagccgtctatattatgcttcacttaacaatgaaattgcatggatcaaatcatgcaataatttttaaaatctccatgtattttatgtggtgtggctattctgaggcattgtgtaaaataattctgtctgttacatgaaaattgacatgtaagtttattccacatatcagagattactttaccactaacatactccctcccaattttatgtcatctatgtgtatgtgtgtgtgtgtgtgtgtgtgtgtgtgcgcgcgcgtgcgcgtgcgcgtgcctgcgcacacatgctgagccatccactggattataggaaacttaggagtggtcacattctccacaaagaatgattctccctcacaaattaactacccattctcaatagctccccagtaagggctgtggcctggagatcatctatctgtttgtgtaaggattttgtctggcttgaacttttgtaggttatgtactggtaaccatagctactgtaaatggatgtatgcaaaaagcatgtcatgtccagaacacagcattttatagctttgatgctcgctcacctctcaggcttcattccttccatttctttttcagcactgttcactgagtctctgtggtgatgggcttaatgtaggtgccccatt

SEQ ID NO: 31074 - DNA, 1183 bp, Mus musculus
ctgaagttagaagcctgccttaaccccacaagtttttcccaaaatgggcataggttgtggtggattgctgtgacttaagtcttcagaggaatgcttcccgattagttaatttgcccaattaatatgaaggtgactaagattatgaagatgtctttgtaactcagactgccattgcaaacacatcagactgggtgactgcagaaactgtttcttaaatcaccggaggcccaaaggctcagatcctggcaccagcattgtcaggtaatggtcaaagcccagtttctggcttgcacatgtgtttcctcgtattagttcatggtgcaagaagaggaagaggagaagatagaaaagatgacaaagatgagaggaaagtgcttacccggttgtctcctatggaaatgccacttttatgaccccctataggactgataaaactgtaacacttgggatcagggcttcaaccgatgcattgatgagggagaaacaaacactcagactaacatttctaggctgattccatacatcaggttccgtgccatgtttatttaattatgtttctttctgttttcctttaaaaagaaaaaaggtactgctcgtggtaaatttgaagccaagatactcattgagcacatagtgaactgccagggacattggagcattgaaggatttgtatggatgctttttactcttaaaaaagtataaataaatagttgtgatatgttgagaaaatgatgtagagttttattttccttgttttatgatggggcataggaaggtaccacagcacagcctgatggaagtcagaggatggattgtgggaaaggattctccccttctactaggattatgggaatcaaactctggtcatcacccttgactataaacacccttacccacaagccatctcacaggctctaaagccatgccttctaggggccttgtagggtcaattgctgccatcacttacttagttttccaggatgaagatagaaccaggacccctttgcattctgggtgagcactgtatgactgagccatgccccagactctgtgtaaaggattaacactgaccagtttttgtattgtctttgtgaaggagtttaactagtcttatctgatttgtttgaattttagtgcatgtgctcctggtacaaatacaaaagatattaaattgaagcagaga

SEQ ID NO: 31075 - DNA, 1215 bp, Mus musculus
aattcatcacttttggggaacaaaagttgctctcttggccaagccaatatatctagaaaacactgagtgagctctatggtcacaagcaggtaacctttcttcttgtgctagtgtggctgaaagtttggaacccagaggtatacaactcaattcacatactagccttctcatcactacttatgtcaccttaggcccctaacttctctgaaataatgaaattgaagtaatactgatttgtcccctgtaggattgtaatgactgatggttatgtaggcatttagcacattattaagttttagtgaatattagctaaaacaaaaagttctcccaagaaaggcaactgtgagaaaacttgtgtgggcacatgtatgtccatgtctgtgagcagactagtcccatcagagcaaggtacattctgggtagaattgggtttaacctgtgactgtattacccttactgtagcactatggattcaccctctgttccatttagagtcctcaggattttcatgtcaaactatgatatgtattggacattttaaaaataatgtgttggtaagcaatccaaatagatttaaagctaaagaaactaaaaacaagaccttttagactaaaagtggtttatcttccaggaagctgtagctttaagttctagccttggatgtcattcattctgtttttagccttttttaaaacaatttttattagatattttcatttacatttcaaatgttatcccaaaagtcccatatatcctccctccaacctgctccccaacccacccactcctgcttcttggccctggcattcccctgtactggggcatataaagtttgcaagaccaaggggcctctcttcccagtgatggccgactaggccatcttctgctacatatgcaggtagagacaagagctctggagatactagttagttcatattgttgttcctcctatagggttgcagaccccttcagctccttgggtactttctctagctcctccattgggggctctgtgttccatccaatagatgactctgagcatccacttctgtatttgccaggcactggcatagcctcacacgagacagctatatcagggtcctgtcagcaaaatcttgctggcatatgcaatagtgtctgggtttggtggctgattataggatggatccccgggtggggctgtctctggatggtccatccttccatctcagctcc

SEQ ID NO: 31076 - DNA, 1155 bp, Mus musculus
tggcagtaatagtgagaaccatgaaaaactgatatagtcagcacctgtgaggaaaagactgctaaggcccttgcaagactggccttctgcgtctgactaaaagaattagtccattttgttcccatcaacggtgtcatttcaatatgtgatgggtagaactgtggcatccatttggcagtctaagtgggacaaccctctggtgataacagaaaaatggaaagaccctgagatttttagccacaaggcaagtgattctgaaatgaccctatctttggaatcattcacgttcactcagcctgtggtccatacctgactgggtactgaggaagctttataaatccttatcgtgtgtctttgtaggcatgttcaagtatcttcttgctatagtgtttgggaataagtttggttcctcctagcaggtaccctcttgagaggttggggagagggaactgggtgaggactgtctttgttgcttcagctgattcgttggtaagtgtgagggtacggggtttgccacagtcattcattatcgttttaaaaggaatcatagtcgtgccaccctcctaactccttgctctgctaactgtatcaggggtaatagtttgccccagtaatggatccctgttcacatttatttaggaattatttcatgaaaaccaagcttactccctgttctaccaatgcttccgatattattgtcagtagcatattccctgtattaaatcatttctaaataaaacagctaaagtgttttctgttgcctacttagcatttccagtgattcttatgacacgtgttacatacatactatagagtagttattacttgaaccaagtcatttgacaaaaactcaaacctcttcccatggcactacaactagaaagtcaataagtttgttatatttttatttttggaagatagctttctactttgtatttcatttctttaccctaaattattctggtatttccccacacacatacccatcagccccttgtctttcagaacacaagtctatcccgttctacttttctatttttgagaatttcatagatgcgtgctgtatttacaccatttccacccttccctctgaccccttcaaatccttgcatgacctttaactccctctcaagttcaggcttgcttggctgtgca

SEQ ID NO: 31077 - DNA, 1185 bp, Mus musculus
aaggtcctagattttggggatttgggatctttctcatggggtggcaagtaagatgaaactagacagccataattgtagggcctgccagtcttatttcaagggggttggcagaccttgtgatgacccatttgtctttgtcttctataacctcccgtagctgagaatggtgtatccataggttacaccggctgcctttactgtttgggggttggtgaggacctcagggtttgggtcttaccctgttggctttaggccctggatcagggtcctctttacccacacaaggtcaccaggctgaaacttgtggacaagctcagacacattcaagagtgcagcctcttgaacagcctgatgactagtaagctgggtctgtgttctgtttgatgtggtttgtaagatatttatggagaatttttagaagagttatagagaaataacagcacctgttctgtgagatccacaaacaggaacagtacttatcttccttctgatcactgtgtcttcagccctcatgggcttcttaccctcttgctcaaatgctcatgttttcaactttccccaactcgtttactgtacagccctgactggctctgagtcctccgtgatctgattgcctctgccttcccagtgatggcatctgcagcaggagcctcaagcccagccctatatggtcttggtttttctcatttcttgacttcagcaggaatatgtgctctgaacagtgtgccctccctctcttttctgagccacagcttctatcatcccctttgtactagactatgtcttactagactctgcatgggggctctcccttgttaagtcattggtaaaatagtgaatcttgattaaaaataattaaaaaaaaaaactagtaggcagtggtgacacacacctttaatcccagcacttgggatttctgagttcaaggccatcctggtctacagagtgagttacaggacagccaggactccacagagaaaccctgtctcgaaaagcaacaaactgccccccccccaaaaaaaactattttatcttgactggggaaacattttttatttttatcctgatcttttactaaaacatattttcacaatgcttcatgtactatttttatcttatttcctttatatatcattgttttcatatttctacataattttatgattatatttttcatttaaatat

SEQ ID NO: 31078 - DNA, 1128 bp, Mus musculus
agtacagtgtcacgtgtgattggaaccttagtatctgttgattgttggctggataaatgagtaatggataaaacaattagaactccttttggcagttatataaatgaattaattttctttggtagttacttattatttatttaataaatacaaagtattttgaaacaaagtctctatgagagcaaaaaaaaaaaaaaatagctcaacaattactttgggtagttgcaaactatgcctgataagtgctttgctttaagaaggcagtaataccaaaaccaacatttgaatccagagctacttggtccatagtcttatcaccaaaactatatttttaaaatagcatctagttcttgaaacatttaacttgtgtgtgtgtgtgtgttctgtctgtctgtgtgtcagatagagagacagacagagagggagagctccatgtgtgtgcagatacagtcacctatgtgtgcatatgtaaacaccaaaggtcatccttgggtattttcctccatcactgccatattttttgaaaccatttcatcactaaacaggggactcatagtctcagataatctagctgacaagaagcatggcagggcctcctgtcggtacccaccactcctcatccatcattggggctgcagctatacattgtcgtacaccacttttttttcttttcaacaccatttctcagtgaacctggagctcaccaatttggcaaaactgactgaccaacaaatctcagacatcctcctgattgcctcattatctgagattattggcacaagctactgtgccaggctttttattcctcctcctccttctgcttcccttttattgaaaatattttttatacacatttttctgatgacagtttcccctccatcagacccccacccccaagatcctcccaacgtcaccttccatccaaatatatatcctttcagtctatggttagaaaacaaacaggcatctaaataataataataaagtaagataaaagcaaaacaaacctgaataggacaaaacaaacaaacaaacaaaaagaaaaagatcccccaccaccaaaatgcacacgaaacacatatagacagtggcccatgttcacacacacaggaatgggctccatctcat

SEQ ID NO: 31079 - DNA, 1257 bp, Mus musculus
gtgaactattataggaaatttagatactacatatatattaaatttatatataataaaccattgaaagcaaggctacctctatagaaaattgaaaacaataatatatattcatctgtgagttaagaacaactgttaatgttctgatatatataccataaattttttaataaaagaaataaaacattaaaaataaagttgaaattctcctttgtcttctagttcctattctttcccattctcagcctgcaaactcgggatcattttaaatgaaagagactcatatttctcacaaactatacataagcaatttcaatgagaaatgggcactatttgtgaatctgccctttaatttgtcctataattttgttttcttctcatcatacttttcctttgactcctatagtctaatttcttttgagaattaatcaaagtattttgctacatcccgcatagaaatcatgcttttctgttccattctctttcatttaattagtaaaataacttatcttttaaaaaattgaaacttgtattgagatgcattgatgaccttgctgtctccatggaaacagcctgagcccacagatactaatgtgtgtggtgtcatatttatgtttttctgatctatttaaacacctttttttttctctgtttgtcttccagatttattcaggagattgaacatgccctgggacttggccctgccaaacagtgtcctcttcgagagtttcttaccgtgtatatcaagagcatcttccttaatcaggtcttggctgagatcaacaaggagattgaaggcgtcaccaaaacctcagaccccttgaagatcctggctaatgcagacaccatgaaggttctgggagtgcagcggcctcttctacaggtagtcaggaggaccgctccttcctaattgtttaaagtgtattgtgcatgtttgttcttctgtgtatcatgtgtgtgccttttgcctgcagaggccaccacagggtcttggatctcctgaaacaaatgatagtaagccatatgaaatgggtgttgaggatcaaacctaggtcccctagaagaccatccagtgttcttcatcactgaactatcttctccagctccaaaattactgttctttaatcaccatttatgacttgggaagagtcataactttagaaaagaggaagagttaccatttggttctatatccaacagggccaaaataagaggaaataacttaaacggacactggggaaatttaggcctgatatagtt

SEQ ID NO: 31080 - DNA, 1206 bp, Mus musculus
agagtcagcacagtgactcactttgactcaggagttattagcctgactgttgcccaaaatggttgaaaattattctttttatacttctgaaggtactaaatgagaacaggaaggtttttcttaacacaaaaggctctagttgccaaaaccattaagtgaatatagaatcaggtaccagccagttatagcagtgaaaacgtagagagaatgatgcgggtagccaaccacacctgcatgtccacatggctgtgtggcataccacggcatgtccatatgttacccactatatgttacaatgctttctaaagttgatttgcatctttccatggaaaaactcactatctggtctttttgtgtcttgatggtaaacaaaaatgagatgcaaacctcctagtttgtctgctgcggcacaaatgagaataaaagtgtcccatgggatatagttccatttcagctttgcttttgttaaaccattaagccagcattccccttgtcctaattgcatctgattctttttaattagaactctctgtgtggtgattcctttcctgcttcagtatttacaagtttcaaatatttgtgcactgttatcagacatcccgcctcagtctgtctgagccagcccttgtgtgcttagcttctctaatcatctttctgtacataggttttctagtcccgtcatcactgtcaggtgtcagtagctgtcatttcctaaaatgaactcatagcatgtctccattcttcctttatgggtggtacaaagtcattgtttaatttcatgcccatgatgtttactaagaaaattaaattaccattggtgacatttccatcataagtgtcccacccactgaccatctctgagtctgtttggggcttctctaatcaacattgagtatatttctgtattagccttccttccattaaaataatatccaagttcactgccatgttataccaacttcacaactaatcatgttttgtttagacaaaagtgccaactgataatttttccttttttttttttctcattaattgtatggtattggtttttataaactcgttgacgcttataacaagaaaagaacagtagagaagctgctgtggtcagaatgtttggtcctgaagacactgactactgacattaggaatggagataatcctttccctgggtgtcataaggaaagccaaatgcctgggctgccttct

SEQ ID NO: 31081 - DNA, 1164 bp, Mus musculus
gaaactatcatacaatggaactaagttagtgagaagctaatcaaacaactttacataaggggaacacttggtttctcaagagcatcttagacagagcacataaacacccttgggactcctagttttagagatagaactgtgttccttctctatacatcaggttccgcagagaaagccttagtcagtcgttcagccttcacagacagttttcctcctcggaggaaaaccctcagaggcgtacctcaaggtatgtctcctcaatgactcagtaaatccaatcaagttgataatgaagattaaacaccacaggttcctaagaatgacgtggtaaccactatcatgtgacccttccctagtacaagactagttagtttcttttatacaaccagaaactcctgcatggtgataattgtgacttctatttgctctctacacatacccctgtccttgttactaagtaaatgtaggcagagtgttagttttattagctagcagttgatattgatatgaccctgttctctctcctggctataaatatctgttctgcctacatcaatttgaatctttttccccctaaggaaattaacatggaaactgtagcacaattaattacatctaaattctactaaactacaagtcaaaacaaatacaagaactggggttatataaggataggagatcataggaaagaattctttccagggaaataatgtgaaatcctgcgcagaggtagaaagtgacttgattctgaagttgttgcccatgagcacatgagtgctgtcacctaactcatccggtgataacctggcaccagtctcctgtctccagttatcatttctccccaagggagaaggttctaatcttgcactcccaagtatatgatcataatgtagattctaaatgccaggataagagaggatctatgtatctcctatcagtccaaagaagtcctagggtttatctgcaaactcttactttctctcaggtctaaactagacaccttctgattgccataaaagattattctgggttagccaatctaatgtgtagatataaagaggctcctgaggccccttcagcagtcttctggataactcagagggactagaaggaagctaacctcatgaccacaggatactcttgatagttttgttactacactaa

SEQ ID NO: 31082 - DNA, 2494 bp, Mus musculus
catgccctgaccctgctgcaccgaagccagactggtgtgggggaccagaccacccagaacaccaggctgcagagactcaaggagatcatctgtgagcaggctgccatcaagcaagccaccaaggacaagaaaataaccactgtgtgatggagtgcacctcactgggtgtgggtggggttcccagtatgcacggccacagactctagctgctcagcatggcctgagctggctgtgctccatctacactgaggcttagtgggtaggcggtggattattttctctttagttttgctttttcatatgaacgctaagaaagtttgcagtacagaatgttgcctaacaaacactttagtctattctcaagggatgagggtgggacagggaggaggccatgccaagttgctggactctgagaaaggaatgaaggaaagccgactgccacctaagttttaggaccatcctgaaatacttaataaggcctgtggcataagcagtcggctttctctggtcttagccttgtcagtttatagtttagtgtagtaagtatatgcacattgctttgtctccattgccaaaatcaagtaagcgcttctcagctggcttcccagcccaaaacagatctctgtgagcctaggagatagcggtcctttatcccaaccctgggacagactgcacactctagcaggattgttcgcaggctgctggtttggttttacaagcttcttgttttattccttctgtattaaaaccagttaagagcagtgactgtccttccagaggaccagggttcaagtctcaacacccgcaaacagaggctcataaccctctgtaacttcagcttcatctgacctgaggccctcgtagtactacatgcacgtggtgcacagacatacatgcaggcaaaaatactcatacacacaaagtaaaaaaaaaaaaaaatgatcataaaactattgctaaaaatagtagggagggagaaaggtgactcactgttaaagaacttccatctcacacaccatccagggtaaattgtaaggagcgtcctcttgctcccatgcacactgtcttactgacttggcttgttgctgtgacaaaacactcctcgacacaagcacctcaagaaaggaaggtttatttagctaacctcaaaaggtacagctcatcagagcagggagggtgacagcaggagcctgaggcaggggcactcaggaagcatggagcagtgcatgctgtgttcagcccgcttcctcctttccgtgcagtccagggtctcagccacagtcagagtgggccttccaacctcaactaatataactcaaataattccacataagcaaggcctataaaacactgaccaaaatcaacacacgcacacaccatctacacagacacacaaaaataactttaaaaaattttgacaatgaaaaagtaaatcaattattataataaacattgaaactactaaaaagttgagagaggtctaaagcagtacaagtattttgtataaagcaatacagctcaggtctgcttggctgaaagcagggaagacgggacatttccccacgcagctgcctctgaagcttcttttttctgtttgttggtttttggtttttcaaggcagtatttctgtcctgaactcactctacagaccaggctggcccggccttgaactcagagatccccttgggattaaaggtttgcaccaccacacccagctgacttgccctttcctgatatggctgcctgcaatgctccaggccctcaagtcctctcgctactcaaggttcataggtcactggacacaacagtttatcaacaaggattcatcttgaatacactagggaaggagagacagaggactggccattcaaggtcactgtcagaccctgagggagggaattttcacacttgtttctaacaactttggactggatgggaataaccaaaaattaaaaactgttttgagatgcttaaatatcgtatgttgtttttctcatgttctttattccgcaaacatttcctagagcctaatgtgtaccaagtgttgctacgcttgggcaagatatatagacagaggacacctttctatctagcatttaggaactggacttgaaagccaacaagttcatggccaaagctgagctggaagccagagccatgcatcgaggcagggagccataccaaagctgcaggacggccttccagtgtcttccaagagggaccgctttggtttacaaatttctctgtaatggctgcggtctcccagcagccactgtctgtctttccctctcctccccaccggttccgagcggtcagggtggttccaagcatgtgtaagagtggatctctgctttgccacaatagtggcagaccggaaacgccagctctacacagaaaagggtcacaggggcctttgtccgggcattcaagcacaagcctttggtgattcactggtatctattcgcccaattacaaagccaatgacacatttagt

SEQ ID NO: 31083 - DNA, 1160 bp, Mus musculus
ttctggaaaaggtttttgcagtgaataagtatgaccctccccctgaggtggtcgctgtccaagatcacatgacccatgttgtcaacagcatgtcgcagccacagaggatctgggacaggtatttattagggccgcacagatagaagtggggggttgggaggagggtggggggagagcgggtaagtaaaagacagtattgtcattttccctaatcgtctcttctgtgactcacttggtccccgtggaagctgctttctcagggctggagagatagctcagcattttagagcactgggtgttcttccatgggacctgggttcaatcccagcacttacatgtcagttcataactgtctgcaactccagtcccaggcaatctgacattctctctcttctgttctccatgaacaccaggcgcacacatagtacccagatggcatgcaggcagagcacattaaataatacaattctttaaaaaagatttgcttgtttatttgagtacactgtagctgtcttcatgcataccagaagagggcatcagatcccattacagatggtcatgagccaccatgtggttgctgggaaatgaactcaggacctctggaagagcagtcaatgcttttaaccgctgagccatctctccagcccagttttaaagatttatttatttttatttatatgagtacactttagctgtctttagacacaccagaatggacattggattccattacagatggttgtgagccaccgtgtggttgctgggaatcaactcaggacctctgggagagcagccagtgctcttaaccgctgagccatctctccagcacatttttttccccaaagctctttattgtcctctcagaggtaagggaccaagtgttcaatcatggcctgttaccgtgtacttgaatgtgctgttcattcaccctttggtgacctaatggtgatctgattctttactctatcatgggcaccttgtgtctagctagcctgagccaaatgtcagtgaatttgaattctaaaataaaaagtgttaacttttctgccatagaatagaaacacagacctttatctcattaacagaatttattattattattattagatattttctttatttatatttcaaaagttatcccctttcctcatttcccctct

SEQ ID NO: 31084 - DNA, 1195 bp, Mus musculus
tgtggtagggtttgaaatagtggttttgtgttgactaagtatccagagaagagagcaaatgcctgcccctctttctgtgtgctgatagctaatgttagctgatagctaatgcagaccgctaggcttaaggcctactgtggtgacaacacgtgatatcagtcatgagcatcaaaatgatgctaatgattgtaaccttagaaactctcaattacaaatgacactgaatgtcaaaaccatccctggaaacttgaggcacagtacaatacagtcaggagtgagggagggagtgtactgaaagcgcccagaacaacatctgctacatggttagtactgagatgagcgttcgttagcactaacacgtaaacagcaaaagaatattacattcgatcatgaattagaacaggacaatgtatcctgtttaagtggaagtgtttgttaagtgaaacaatcttccctgaaaatccctttatgacttcagccttgtctaaattaaagagcttagacaaaactaggatgatactagaaaaatgatacttcagtataatattcctaagatagagggcttcttcagtgggcattcacaggcaacctgccactgcagaagacagggatgggggcatcaaattggagccaatggtgaatctccttgtggtatacacaccaaacacttaggataacagctggcctatgtagtacacgctcaataaatgctatctgttctttttattgttaccttgttgatgatatcaaatatattttactgtatagagagcaaatgcttgcctcctcaccattacgtgtctgggtaatagctgttttgttttctctttgtggtggcttttactcctggatctacgaaccctcagtttccaagaacaaagctaaacatccaagtggagaaaggcagaaaagcctttgctggggaaagcgagcgataaaatagtgcctaagagaaaattgttcctaaagctgagttgggccaggcgcagcagtatgaccctggctcccagctactcaagaggctgaggaaagagggtcccttaaatcaagggaggttagcaacaaggcattccctttcagatgcggcagtgtggggcatcagaaatgtttactcagatatattggtcaaaggaaaggaaactttaggcctgcattaaagctccctgtgggtttctgtcccctcctgcctgtcact

SEQ ID NO: 31085 - DNA, 2694 bp, Mus musculus
taatgtacacagaggtgtggaaaaacctcgggaccacaaaaagtgagctgcaaaaggatgacaagaaggactgaggtctgcctgggacagacagacagacggtgttatgtgagagcggcctctgctgcaggtctggccaccatttcactttagctgatgccaaattaccagagtattgaagcagaaaggctccagagcttcctccaaaaggatgggactcatctgctctcacgagtctgcatttgtagattccacataggcatccctgagatagaataaacaaaacaagcaaggctaccaggcagaccgtcgggcagcctctgcatttgcttttctatttctttgccagaacatcagaaccatatttgttgaattccaagtctcagagcttctagttttctacctgtgtcgcacttgttgctaccgatgcctttttgctatgtacctctttcctcccgtcacccctgcacacttaagcactttgcagcacagccaacattccaggcacaatcaggcactgagtgatccagtggacatgcgaaaaattagaccccaggagtgatgaggccggactccctccagcgtgttggtgttgggagagaagcagttgtccccatgagcagatctgtgagctggatgccggtgatgctggagtagacggctggatcccaccacgcacatttcacgttatttgattagtcaatgcaaagatcacacacttctttcacctgttgctttctgtagttagagcagtcctgcagcgctcattgcacattagaaaggaagaaaacttgaaagtggatcgagaagagggagacctttccttccatctcccacgtgaagccccttggcctgtttacggagatggagaaggaagtgtggcccaatacagctcactctttcagcaccctgagagactgttgcccctgtgaacccagccacacacttccatgggactcctgtgggtttcaaatatgtgtctgtgagaggcgttaagacctggtagccagaagatacttctgagaattgtcacctgtcaagtcatcgatgatgattgattgatacacaggcgtgagtgtgctcaaaccccagctgcggcagggtgaagtcttcttgttccatagatatgggactgcttttgggtgtgcctgggaggtggcatgacacagcatgtttacatacagaaacaggcctggctcttttccgctgatcactctgaaggtctgattgtcctctcttggatccccttgaggaagagtaaccctgtcacacagcatgtggcgcttgtgtgcccttagctggattgtatgtgattgaagaacaagaacattgtgttgctttctttcctcgtccccacttagggccagaccctcattaccctcacctagccatctgctcctctgcaaacagctacacacaatgtttctctcgcacagacgacagccttccattcttccactatgtgctgactgtgctcagactgaggagtggctctccatctcctcggctcactgtagctctttgttgcaccctctgaagatgctctttgatgggtctgaacagcagcagcaaagagaactatcccaatcctctgggtcccctgggaaggcaaagagaactgtcctaatcctctgggtcccctgggaaggcagttaagacttttttctgttacattaaatgcagatactgtttctccacctaagtccccaggtttgcagactgattgtcattctggccattgacagcttcccagtgctggtaatggtctgttctcaaagacctgaattagatgtgaacccattcacagtcccagaagctctgtagctactttgaaatatgtggggttgcctggaccaatgttgctataaataccaagtgttaaaagcccccttaaaaagacagtaataaaaagtacttttttcttccagtttaacagaagaatctgtccctcggggctcttgaggctccattctgattactcctaacaggctataaccttcagttacctagagcttccctttttatgttgggagaagtagcacacagcttgtagttccctgagactggctgatacaatctaactggaccggttagggtttcagaatgtgtatccctttgtgggttttgttgaaggagatgtaagaacagataagagtgcgggctctgctggctcaagctagcaagtgccccagctgcttcctgccgtgcagtagacagaagaaaatgtaaccggcactagttacagttttgtaaaattgcccttctaaaggttctgttttccttctcattgtgtatgcttgttgcacagggccctgtggttggacacttccctgcagttgagtacttcccccaagctctcctctccccgtgttaggtcctgctgttcccctgaacagttttgccttctaccttcagatcgcatacacaccgtggtttcatgtctctctacaaagctcaggagctacaaataagagcacacatatgctgtttgtcctccctacaccagctaaccccttaataggaccatctctggatacatccataaaatcactctttataaaagtcatttctctttgccatttgtttgtttgtttgtttgtttgtttagcatgtggactgtaaaggttttaaaagggcaaataagccattttaccaaggaccaggctccatggaatgtagagaactgcctattaa

SEQ ID NO: 31086 - DNA, 1159 bp, Mus musculus
agaggtagaagagttacagaagccaaaaggcaaggttggcacattaagagacttttccagaactatggactttgatgtgaattaaaaattaagaaagaaaggaagaaattggaaaggaaaggacatagcctgaaccatgggttgggggttgtggggaggagaaagaggggaaccaagtacaccagccaggaggccagaggtgcaaaaggagcaaagcggggaggggggggtaacgaaaatgtctgggttgcttagggaagagcctctagaggaaggtcaggaaagcactgggctgcagaggtcagggtagaaggcagggtgtgcccaccataccctctaattggtaggcactaaaggaagggggttgagtgaactctggaggccacgtctgctttgatacgttaaatatgcaccttatccgcttggcctgggtttgaaatttaacagctaaattaagtcttcattttggctggtggtggtgtgtgcctgagtttatgacctgagtggtccttccatcatggagtcagtgtgctgaggtctagggcctattacatattcctgtgtccattctcttgccttcgcggaagtgatgctgccctccttgctctgtacatcaaaacctcacatattctcttaggccgtctcacacagggatccacgaggcgttatccctcagcaccagctggggtgcattgctggtgcctctgcacagccaggggctttgcttcatcagagtgcaggtcccaggctaatgggtgttccagctgctgagacgtctcattcctgtgcttcatggtaaatggagcaggcaggcacccagtaacatttcccctggtgctcatcacagtagaactcctcaggagcctgacaggaacagtgccctctgcttggaaatcctggaagggagaggccatttcggatacggccagaagtctgcacctctggagagtaattaataatcttctagaagtcccgtgttctctctgccctcccagcagtgggaaccgtctggaacgtcatggcgttgtctctgtttccttgcagagcttattgactttttttcttccatgtttgtatgtaaggtctttgactttgaggtgagcagcgaggacatggccactctactcagctacaacaggaactggagggtgtgcgcctt

SEQ ID NO: 31087 - DNA, 1159 bp, Mus musculus; identical to SEQ ID NO: 31086

SEQ ID NO: 31088 - DNA, 1102 bp, Mus musculus
gggctagagtggtcggtcagctgccttgagtggcagtgctggagacttgatttcaccatctctttgctccagggccaagcctgaagatccgtctctcctggaggatcccaggatcaaagcaattgcagccaagtacaataaaactacagcccaggtatgggtgcttccaggtccttgtgactgttacctgaactctacactcctggtggttcctgttagtcaggtgtggcgggagctgagcctgtgaagccctctctggaagtgtggtttggagccctagaatgcaatatcaagggcacagatctagaaattagttgacctgtggtcttggcataaaagtgcctgtccccactgcctcaatagcagcccagacctcgacccagcatttactggtgttcttggaagctcatccctgtacaaatagaagagctcttaccatctgtggtatgagagatgttctctttctcccatgggtagagtgagtcccaggcagtgacttcttgtggccttgtgatacgcttggagccaccgatagagcaggcctctagagtccgatttggagcagcttgtggctgtcactaggcatctcagaacctctttacctgtgcagttatagactgagatgatagcacagcacatgtgcacacgccacacctctcgtccacaggtgctgatccggttccccattcagaggaacttggtagtgatccccaagtctgtgacaccagtgcgcattgctgagaacttgaaggtaagagcccagctgcaggcctggctctcctccatggcaggtgggtcagggtgggggtggggttctcaggctcccctttccctcccagctgtgtggtctgagcaagtcacttgacggcactcagaatcatgcctgcgttgggggctgtcgtgagacactgaggctcacggtgcacacgcagcgcttcatagcgcctggttactcgtactcaggaaacattgctgagctgctggtgggccatggacatcccggacagacaccaagccactggctctgtgcagtgcctaagcagtcatgaacaggggtgggaatgcctgggcacccgggctgtaggcattaagagtgccccac

SEQ ID NO: 31089 - DNA, 1102 bp, Mus musculus; identical to SEQ ID NO: 31088

SEQ ID NO: 31090 - DNA, 1215 bp, Mus musculus
ttaataaactttactttctaccacttaatggccttcctcttcctcctccttcttaccaatttatgtatgaatatttatctccactcattctcaatttttcagttactggcttttccttgctctataatctcttaggacacctgaacatgaccccacccaaaaaaattgatgaagaaagtaaataaatattattcttaaatcaacagtatttaacatataaaacttaaaccttttatgtaaatctcaagggtcagctgtatcaaatccccaaacttgatcatcttattctgttccaaagatcttaacttgacggtaatgggaactgtattcttttacaaggtactgtctctaactaaatgtccctaagggttaacagtgatcatgagcagtggttgcctcaggtggaagggaagaagcaggaaatactttgacctccagtatgctccctgggtaatagttcactagagttctgatcacatcagtgagaggtaaagcttgcatgtaatccctggttgctccaagttgggtgagcagtgaggtatgccaagctctgaagggttggatgctgcattcactactcatgccagtcagaaaggtagaagacaaatgattggggtgaggccataggtgggactcaagcgttcaggaagaacaggtagagtgacttatgcctataatcttatcgcttgggatgtagaggcaggagaattgagaattcaaggaatctctggctatatagctaactcaagaaacaacctggagtacatgagagcctgccttaaggaaaagggggagggagggaagaaaaggaagaaagaaagaaagagagagagagagagagagagagagagagagagagagagagagaggaaagagaggagagagaggaaggaaggaaggaaggaaggaaggaaggaaggaaggaaggaaggaaggaaggaagagcaagacgcaacagatagaagtctactaagaagcgacctggatggggtaggcactacttcttgtgttccttgctcgtttccccccaatgcttagggagtcttcattcacctaaatcctgattaattcattcacccattcctgttggcacattccaaagaccaggaaaaggccatgaggagagacatagacctgagcaaagtgaacttcaacaactcgtgtgaagactgactaacaacaaggaggcaagtctgaaaagagggagtgactatt

SEQ ID NO: 31091 - DNA, 1165 bp, Mus musculus
aaatggtagaaaaggggtgataagcatgtcctctgtcccaatgttgatgtggccttgactgggcttttcagtcgtatggaacactggaaattcccagtgcttatcgtagagcttaatagctgtcttgactttgagtgctgtgagcaaagatgaaggacagggtaggaaaggaacctcaaggggaaaggacctaggagcgaaggtcacatctgaacagactgccagcaatagccttccctttcggttgtttggatttattcctatcgtaccatgagcccacaaatggctcccggtttaaagctctcttctctcagcaggtctgaaacaatcggagaaagaacccaactgcaagccatctcgctgggccagctcagttggagagggctaatcgctctgtttatatttatgttttccaatatcccagtaaatccatgtatatgctcactatatttaataaccacaactagagatgttcatggtcaaagtactgcctttgcagaggagcctgtttctaaagaaaccatgctgtgaagtaaactcgctactgtcatatgaacagtgacaccaaccacatcggaagtcaacaaaaggaaactgagcttaagattatctgaggaatgtatgcagtatctaggggcgaaacgaccccgtaggctttgttttgtctcagtacagacatcatgtttctgcactttagactaaagcatgaaagaaattatctaaataggcaatcaaaactctctgaaaataatccacttcatatctgatgtagggcagtaatgattgtctgttttaaaaaagatgtattgttgagatattgctttttttctatgctgattcatacctaaattggctgattactttagctgacagtggtactgactttttttcaggttagttgctttgtggatttctttggtagtgatagtagactgaatcacatttagataacccaactatgtaatgaatgtgcatacgtgtaaacagacacactaatggtagattactctttcatgtgctagactattatatttcatagtatgtccttgtaactaactgatatcacagcttttgaagattaaggatcacaatagtatattaatatttcatatttgccaacagaaatatggagttaggtatagctatgttttcaatgcccaatgac

SEQ ID NO: 31092 - DNA, 1352 bp, Mus musculus
tcataagttgataacatcttgaaatttgaattttttatgtaaattttagtagttttactcccccctcccaccaaggctctttaaggaactcatcattcatatatcagatcctattttagcttacgtctttattcttcccaatagataaaagtactctagtgtcttacaaaaatgttcttatctagaacattctatgcatacagcgtcattgtacaaactcatacctcagctgacttaaccaaaattatcttagtctccactccttccacagtaggagagcctctaacatttccaatccacagatttcttttcaagaggaaagggttggcttgagggtttttcaagggttggccttgaaaaagtctatctttctcgtgaattagtaagagttagttggattccctagcttttagcaaacttgggccaaaggaagaaaagccactaagactgcacaagtcatctacccccgacagagtagacacaagtctatggtaagacgaacagagtgcacatggcacacccatgaaaatgacttccatcgttggagtacaatggatcaaagttcgatcttaggcagatgctgagggatcatgctcatgttaatgaggccttctcttgctatatcttacaggctttttgcttgttgtttttgcttttaagaacgttcaaagttgtgagatgactgttttgatcctaaattttattccaacatttggatgacgatgagttttagggtagatttttctccgtttggatttaacctttgaagaagcaaattcctcctctacttgtttgattacagctctctgttatctttaagagaggaaactgcaagctgactagcatgttctgtgaatctgccattgttaaaaaaccttataaacacttaatatttttcactgataattgatcgctgcaataaaaatatattgtgaaaatgcatccacaataaatggaattcttccagatgtctctgtctcgtgcattctttgatgctctaattgattgtgagaactgtggctataataaagagaacagggcaaaacacttgcacttcacattgagggttggtttcactctctaaaggaaaaaacaaacaaacaaaacaaaacaaaacaaaaacattgagacaggatttcatgtagcccaggctggcctggaactcattatgaagccaagaatgacctcggactcctgtccctcctgcccccacctctcaagtgctgagattacaagtgattgttagcatggttgccacagctgagattacaaatgattgttagcatggttgccacagttcatatttaaaacagttcttactacagggacttttctaaccaaatattcaaaaa

SEQ ID NO: 31093 - DNA, 1183 bp, Mus musculus
tcaaaggaatccaagaatggaaggatgccctctcacccagcattaggcttgcttggctcacatcagatgaggtagagggcccgccctatttacagtcaatgaatgctactttcttgacagctaggggctgccctcccagaaaggtggcagcctggcctggttcaagagcagctaaaatgactctaggggtcatctgtgggattggaagccattggtttatcccattaagagttggggcctttaatttcctggtccgagctatcagtttaggattgaggattagcattagggaaaggctatggagaaaccgtgctcaataggggagctgtgggtgccccagtccagagtgcggtgttgacctgctgttgtaaatcgaacttggtcactcttgatttctccgtttgggggcagacagaatcagatctgaggtttcctttgctccagcgctccagagaagaacctcccctgtgagggcctcctactgtgtttttttcagtcgtcttccttggctttttccccaaccacccaggttgccttaaaatcatgcatgcgtttagctgaaagattccggacacctgggagctagcttggcgcctcctccacttctgcagagggaacctttctttgcttcccctagttactgactctggccgctaagaaccaacggctgcgcctccgtcacaacagctgacagaaacaggagcctgcggatgtgacccgcggtctgcagggggcacccggggccctagcggccagccagcgcccgggtccggagcgcgcacgccgggagcgcgcaggagccggaaggggcgggcggtgggatgcgtgcgcgtctcgcagttctgaatccccggaacccacgggaaggaccgcagcgctgccctcccctcttgcccacggttccatcctgtccccaggcccccggctctgcgccctctgcggtagggagggagtggcgcggccagctccgcgctagtgcagcgacgtcccgcgtgtgccttctgggtgagattttccagggacccaacgggcccgacccgatcagcgctgagctccagaaaccttgcggcgggcaggacctggctgctggctcgatggtcgatatccagctttctacgactttgtgcacgctaattcttaaccacgtctgtttctcgtctataaaatggacatgatacacatg

SEQ ID NO: 31094 - DNA, 1176 bp, Mus musculus
cacagtggccggcgcaccctgttcggtccaagaggcattgactgtattttgtacataattgcttatttttcttatttaaggggaaaaaaaaatcagagcaaggtaatgctcttacagtcacttggtgtctctttctggactatgtgagtcgcctggccctggtgatagccacagctccctgccttggttattggatgtcagctctcactagcctcagctgccatgcctttctggcagaatccggttatagttgagatgtacaccacagtgccctcttctggtctcaagccgagatctgagtgtcttctgcagaacctgaaagctgggtaaggtgctggctaagaggcttctcaggacagcaggcctgagatctgggcccacctccagctcctgcaccttggggtcttgtggtcccagaactctcatttggtggcttcctcctccttccatcgtgaagtctcttagcttgaatagtaccagctgcctgcacctctgcctggctcagctgcatcggctgtgcctgtgctctggtctctcacttggaaggagagaaaagcaggagtgttgaggcctgggctcccttctgggatggaaggaaaagtggaaagcgatatataggaaaaccctatatatcatagttactatttattattggtgtgcctgtgtgtgttgggtgggtgggtggggggtggggtgggatatgccacaacaaagatcacaagacaacttggtgtagacttaagttctttctgttcatctttatgtgtatttgggggatcaaactcaggtgggcaggctgcatggcaagtggctttccccgctgcgccatctcctgctcacgtgtttacccacgtccacactgacatgaaggggtcagtccgttctctgccgtgtctccactccgactgacacacagcctcatcgtctgcctcacccagctttgtgggcctgggttccgcctgagtcaggagcccgtgatttaatttcctctggttttcctgtcttatggcgtgctctttcttccagcatgttccccacaacttgctgaaccagtggttttaaggctcagagacagaaagaacattccagagcttgttcctccccaacccctcccaggaagaatgcatccttcaaagcgcctctttggaacccctgagggccttagtagggctctgt

SEQ ID NO: 31095 - DNA, 1336 bp, Mus musculus
atcacagcgcccccttcagcacacagatccctctgcacagagccagttggaacccctacccacctccttcaaatccctccagcttccactctccacccccaggcttccagacagccttcagaccccccagcaaaacccccacagatctgctacagagttccacactggaccgccactaagcaaagagggaattgaaaagggcaggatttgtcccaccctgttccccctcagcccactcacagctcccttctcatctcttaacgttctgaagaatccagctcctggtcgggtttttttctccctacccccagatacgatgcgatcacagcgtctttaccatcttttctttcattgtaaaaagtttcggttgatccagcatttgagtgagtgacactgttgaatgtttctggggggcaggaattgcctttttaagcagaggaaaaagaaaatcaaaaggcagtctcaatacttagaaaattactgtttgtctgtcgctcataatgacataatctgcttagcagaaaatgacaattaatctataggaaaggtcaagtaaatgcattgtcaactgcagaactgagagcacggccgacttaaatgagattgctaagttcatgggggaaagcagtggtcctggcttccatcttgtattcaacttttcactattgcaggaaaaatgcttttcattttaaattctttattgaattgatagggaggactcaattgtgttgttaagcaaagggatttattggaagttgatgagaagataaattgatctgtagtcgtaactggcctactgctaaagagtttataaggaaggaaaagtaattttttaaggagaaaaaattttggctttagacttaaattcagatgttttaaaggaaaaagatattcacagattcaatacctatccttataagagctgaattctatgtgatttcctcagtctttctcctctgtcagaatcttttttttttctttgaccataagtccacctgacagggcactctgagccagcactgctctggggccatcagatcaccaacagaagcaaatctctgacctctttgcctgcagcttttacttaaccctgtagtttctggacgtttgtgcagtattgaaaagacaggagaaaagaaaacaaacctggttataacctgatgctaaaactaaaaacaaggaaatgtacctctctcttcagaattaaaactaaaatcttaaataaaacagaaaacttgatggtgaccctcgggtgagtcttgttcttgttttttcagtttgtttcgtgtgggtttggaatatttaatgatgcagtaccatatgagtttccattaga

SEQ ID NO: 31096 - DNA, 1097 bp, Mus musculus
ctgccaagccagggtgtggctcagcaggagagcacttgtctaacaccaccgcttactacaaaaacaagccttgccttgtttccaggaatggtcttagtctactgagtctacagtcagaatgaatctgggtcagggtgtgaggtagtgtagctggagctgttttgatgaagtttgttagcattcccgggtttcctttctttgcattaactctcagctcagctctagagaagggagcaggggagggaggtaaacttttcctccaagctctttaaaatgtgttcccattccaagagctaaggctctgggtcctgtcctgtgacacgccccctcccccaaccatccccactgtaagcaacacgctatgctctcgggctcccagaatggttagggcactggctttgcttcgagtgcgtatatgggggatgttgtttgttgtttttcagtaaagattgttaaaaattacaaactgggagatttgtttcccaagctaccttacaatcaaactatactgggaagatcctaatttccggttgtttgtgtgttgcgtaccacagatgacatctttggctggcactgttattggattgtattattttgcagagcaaatatagcctttgatttaaaaaaaaggaaacatgggctttatttgttttatttttttaagtggttcttggttagcagcaaagctaacactaaggtaaatggctctccttcgagccttgctttgctgcctctggttgtgttatgatgctacttcatagtaaagtttcctgaatgtgttactctgtaagtggaggtaagtgttcttctgtttctctcttttgacaaatgtaagagcatagaatgagtggggtaggggagagagaagctgggcatcggtgtgggcaccttactgacccggaacatccagacctaagagcatcctgtagtccttcccatgtagctagctatatggcagttttatccttccaaggcagtcttgtttcccttccatgaaggtttcaactgtttcttatgcataatcgaacaccattctagaagctagactgtcttctctaccaggccatcttgtaattgacacatgtatgatttcagtt

SEQ ID NO: 31097 - DNA, 1148 bp, Mus musculus
atgcatagagcattatggattctaactttaattcacaagaattacaatactcttatattacaggtagatagtaaaacctatctttgctaatcttttcaaatataatttcatcagatctcccttgtgcaacttaacttttatataccatctcattttcattttcttattattgatatttaatacaaaagatacatacgttaagagtaatcacagaaggagtcggaaagaacctgaatcagtacaaacgtacagctcagggaaggaaggaaggagtgagagaagcggacagagggaggatagacagacagacagacgaatctgtctaggatgtctgagagggttactaataattatcagtgcataactagaattctcttgcctgtgaatcattgttctcccgtgggaacaagcttcacccattctttttctggcctattttggaaaagttatttaccaatctggaagcacattattcagtgccattcatcccattgcttagtgaggatcagacactatttaccaaaccaaggaagaactcagagacaggtaggaacgaacaggcgtgagtgaatgattacagggcactgtggtggtgacagaggtagccacctaagaactgtagcccagttattctttactaaaatggtaaatcccaaagaaaacctgaatttttacagtaggtaactgttcccttgttgggcagagttcgatttccttcctccttactattttggaaagtatctatgggggtgttttatcaggtttattctcttagagcagatgtagacctcggggtgctaacatggttcacatcttgaatgtctgcaattttgtaatctgttttagggaaactgtgttccgtgagtgctcaggtggtctccatgtcttcttgggtgtaatttttgtggtcggcatgttccccacagggctttccctaacctggccctaaccgtaacctgctccgagtcagcgttcggtttcatgcttgtcagagctcttgtctgtgagccttttctttcgtcggcttctctctccttccatcattgggctttatgttgctatcctctgcttcaggttccttctgatccctgctgtgattcccttttgacatatgcatcttttacattcaatgtatagtttggcttttg

SEQ ID NO: 31098 - DNA, 1121 bp, Mus musculus
ctaacttagtagggtcctattttatttactgggaatacacattatttaggagataatcctttaaaaattcagttttcatatctttttttttattttatgaaaatacaactgttctcatcagaaaaagataatagttctgacttgttggtttgtgtttgggcagttaatcccaaccagtgtaaatgaagaggggtgacagagtgaggaaaggaatccctcttcttctgtattgaacaactcacatttggaacaggtgtctagagaagatttgaatttgtaaaattggaaaccatatctgttttctttagatcttctaagtaaatgtctgcagcatattcactagtagtagttcagcttcctagtgctcttagtcatgttttattctgtgtctcgttttaggtgaagtaaaaacattaatcatggaaattcacattgtggtatcaattcatattttgagtcttctttctcctgctctctcttcttcctacaggcatctttaggtacaacaaagtactgcagttatttcttaaagaacatgcagtgcccaaagcctgactgcatgtatcttcatgaattgggagatgaggcagccagcttcacaaaagaggaaatgcaggtagtaaacacatttgattaaccaatttagtacaaaacaacatttcaagttaaaattatgaagacaaagacaaagattggggtttctgaaaacccaatatttcttaaaagtagcatttttccagtgtatctcataaaatgtctcttctgtggacatggttacaataaaatgagtctgtggtcagctaagttagaaaactaccttagtaaatcagcagattcatttgctgcaatatgttccagaggctttactgtgcaagcatatattcaaaagggagcttagctgaccgcaggaaacccttccaggagtctacttttaggagaaggtcagtagtatgagggccaaggaattaaagtaatttgttggggtgtttgtttgtttgtttgtttttgatacagggtttccctctgtatccttggctgtcctggaaatcactctatagaccaggccatcttggaactcacagagaccttccagcctctgtttcctgagtgctgggattaaa

SEQ ID NO: 31099 - DNA, 1115 bp, Mus musculus
gaagtaagtcctcttctgctttccctgtcagtgccatagtcttactgtgtctgcccgtcttatctgagaataatagttggccctggtaaattctaagactcttctgaaaataataaagttttggagaaagtatgaataataataataataatattttttaataatgtttataaaccagtttacaaagctaggtggtggtggtgcactcataatcccagcactcggaaggcagaggcaggtaaatctctgtgagttcgaggccagcctggtctacagagcgagttccagggcatccagggctacacaaagaaaccctgtctcaaaacaacaagaaaaatccaatgaccagttgtgatcttaggcgtgtctgaatctttctgtgtttcagtttcctcgtgaaactaagggcttgacctaaaaatccttttagtgatggtagcttgtgacgtggtaatgatcctgtcacccttaaggctgatatgagctgtgactaggtttgggcttttttggtttttggttttgttttgttccccctttatccctttcctgtggctgtgtggaccaattaactgaagacaaagttacttgaccctaataggaaatcttaaccagctgtccaagttggtgtgtgtgtgtgtgtgtgtgtgtgtgtgtgtgtgtgtgtgtgtgtggtcagaagaggagtttgcaggactcagttctctccttccactgtgtggcttctggggtcaaactcaggtcagcaggtccaagagtgagtgcctttagtagctgagcgatctcagtgctccccaagtagtaactcttgttcattcagaactgctgttctgtgttatcattctttactgttgtcattctaagctaaatttagggaaagaaggagaatttgactaagtgtaacgagagaccaagtcctttgtggtccagtccctaattagtggctcttaacctttctctttcctccttcagttaggctaatcaaagttactctgagctcatgttttcttgtaggctttaaacattcatctgttaatttttaattccactgaaagacttacaagattgttgggaaagaaaattgaagcttgtgtcagctagaatgtttgcttcagtag

SEQ ID NO: 31100 - DNA, 1160 bp, Mus musculus
aacatttaacatggaggcgtcatacttaatgattttctttgatactttgtagttctttctgcaaattgaatagccaaagtcttcaaatgaatagattgtttgtataaggtttttaaacatgagttatttaaagttggtttaccatataatttttttgaaacttgcatctacaaacctttaatttgattaggatgagagatataatcaaacaccaaaatacaaaataaaattgttttgtgacacttgtcaacttccttctaaatggaaatactagaggtagcttgcagcccattactttgtttttgttgttctgaaagaaggtcttaactatagctcaggctatcctggaactgactgtgtaaaagaagttgtcttcaagcacagggtagtcatcctgtttcagcttccttaggctggaattacatgtgtgagctaccatgtacaccagtcctggataactcactattttgtaaaagacagagggcattgccaaaagatgagctcttagcattaggagaattttacttacttgtttggtactaggctagactatggacgttaagtggccccctgcatattagacagtggcttcaggagagtgtttctgtataaaggattttgtgtcttaaaagaatgaaaaataattcatttaatcagtttagttttagaagcttttctttgcttccttcccactccctggtttaaagtgaggcagcacttttcacgatcatgattttttttttaatgtgactgcagtgattcttgactcaactctgttattgtctttgtagactgtgtgagatagggtaaatttgtgaaagctttagtttttgctaaaaattcacatagttttgtcattacctatattatcaccttgactttttgtaaaggaagtgtagtgagctaagttggttttgaaacaaaaacagtagggaaataggttattgaggtttttgctgttctagaaacagtataactagaatgtactacatacattccccaaaggatttttttaatctaaatggaacttgtaaatggttttcatcccactggaatagcatgtatcagataaaacttggtaacacattctaacattttataaactttatgttcccatagagttagtaggaaaagtctacaaatacccattcttgaaaaaa

SEQ ID NO: 31101 - DNA, 1231 bp, Mus musculus
tgagaaggtagtactgggaaagatgaaggtggtgccacgtgttgcctcatatcccctagttctggataactagataagaaacacttcagtttgtcatgctaccaggcttcattgtttttgttcgcatgcatgctggccatgactctacttgcctggcctccaaatataggattaaaggcatgtgctgccttggcaaacgaggctgcgttgtcatgaactgacttctgctaggagcactattttcattacttaattataattttatcattctagcccaaaaatgttcaacagcatgagaaaattcagaaagccagttcagagggtgttgcgatccaggggcaacaaggaaccagacttcttcctgagcagctcattaaagaagcatttatcatcagtgacctttttgatattggggaattgtcagctgttgagcttctccttgctggtaagttgacatttagctggaagtgtgatatgtagtcagaatcatgaagctagaacccctatcttggactttggttttcttttaaagatttatttatttcgcatacctgagttcgcattgctgtcctcagacacaccagaagagggcactggatcccattagagatggttgtgagctgggatttgaactcaggacctctggaagaacagttagtgctcttaaccactgagccatctctccagccccctaacttggactttttattgtttgggtaataaatgggtttaaaatgtttattttatgcatatgtgtatgcctgagtatatgtatatgcactatactcatttagtagttatgggaggtcagaagagggtattgaatactctggaactggacttacaggtgaatatgagccactttgtgggtgctgggaagtgctcttaactactgagccatctgtctaaccccttaacagattgtttttaaagatgtcatttacttgacagaacaattcaaaatatttaatttttcttgtattaaagggcaagcttaatgttgttgatgaattgccctaaggtgggccttgatgtagtaatttaccaacagagatgaagttgcatccctagaatgcatggctcaaggcaagtgctgtcatgcagtgggcaggaaggcaaggtttactggttttttttttttttttttgagtgtcttttggagtgggttatttggtgatgaatgactaggtaaaatataagataattttaataataattaaaaccaggaaga

SEQ ID NO: 31102 - DNA, 1177 bp, Mus musculus
tcctgtgcaggtggtttcctgaaatgacggtgttacacggtagaaagcaatgtggtcacgcgtgcacgtgcctgcctttgctgcagctgcctgctttgttccttactcacatttgtaaaacttgtgaaacacagattctttacttctctttgacatagtttttgtgtatgagaagtaggtgactcattttatctttagagagcatttatttatattttagaattcctgtatagaaaaaacagtgagtgcttctttttctaatttctgctgtctatgaaacttattggaagttgttaactgaaatttagggttgttgtttttagtttttatgcatataatactttaacagcaatacagatattttgttatatcaaataatgatgttaattagtcatcattccttttgaaaatgctgtgtttatgacttttagatatccatgtgtgacggatgtgagaatttatttctgctcttttttggtgaagtgatgtaattttgtgttttcagatatgattcaccaccttccactgttgacagagagacagtacgtttcgacaattcactctcgcctccaggactctcagccttggaagcttcctggactgcaggccactgttaggcttgcctgggccctggcgttgagggggatatcccagctaccggatgtaacaggtaaggaaggaaggttggagagaactggctctgccactgtacctagcgatgcattgattttcttcctttaaaagtttttaggtgacttattttatgtgcgagtgttttgcctgcatatatgtctgtattccacatgtgtgtctaacattacctgagatccaagaattccctggagttaggaatggtttctagttatcatgtggatgtggggaatggagcctgggtttttttgaggaacaacatccagggctcttaaccactgagccatctttccagctctaaatgcgtttgttttcaaatatcaaattttaaatcagaaagagaaagtgtaaatatgagcacgtgaaaatacaagttgtttgataaaaatttgtgttagcacttttcattccagcactcaggatgtaggcggatctctatagtttggggccagcctagtctacgtcgagctccaggcaggcagggttgcatagagagactgtctcaaaaacaacaataacacacccc

SEQ ID NO: 31103 - DNA, 1180 bp, Mus musculus
gagccaccatgtggttgctgggaattgaactcaggacttctgaaagagcagtcagtgctcttaactgctaagctatctccccaactccttaaaacattatttgttgactcattcatgaattagatatattttagtgtaatagtactatgctgttctagaaaggacttaacagtggctttgatttttgtcactctagtaggtcatttctctgtttgtagtatttatgttcctgggtttgtgaaagaatttaacttccattctttccatgaccaaactagtgatctaccagctaaaagacagataccttctttgttgtggtatatattaaatgtatatagtgtatagtgggttgctgatcgcatttcgtagctgtgacttggtagtgggtgcccctattcacatctgtcaggacagcttgagttaatggggttggaggccagtatgggcagcatagcaagatccatttttcagaaaataaaacagaaaagcataggtaaacaaataaaatacctatcttgttgttttgtgttccaatctcagagtgagaatgctcgcttggccctctgtgaacatccccagtggacgcctgttgtggtgattctggggctcctgcagtgcagtattcctccagttctcaaagctgagctactgaagacacttgcagcttttggaaagtctcctgaaattgccgcttcactttggcagtcgttggaatacacacaggtggtaccatgaactctctcattgtatactttagaggatggtaatgctatagaaacaagagctcctggtggaaatttacagtattccagggcttcctgtgtaggtatggtgtgggagcctagcattgcatttagtttgttttcttggctcacttcacaacaacgaggttaccgaagataggttattcaagtaactctaaagatcttaattcttaagatcagtgagatacttcctgtgtggcggactggaagcttcagacatactgtactcattaaatgcaggaaatagatacttgtgttctctgtactgttcctttttccccatgccttcctgcctgaaactaggagggcaatgtaaactatagctttctgttatcagggcctgttgggtaagctttacagatacgttctcagcagctggatggcttttcactggtggacacacacggctcctaagc

SEQ ID NO: 31104 - DNA, 1099 bp, Mus musculus
agatacagatgtggcttctgcattctggcttttctatttgagaatgggtctggctacgagatctagactggtttagaacctacgattcttctgtgtcctctccctcttaagtgctgggctacaggtatgagctgcaatgttgagctttaaattaagtacaaattatcatatggcgtggaacgtaaacttgatgacagtcgtccccgccccccatttacctccttccctttttattctttgaggcagggtctcattatataatcttggttggcctgaaacaaagactggccaggcaagtcttaaacttagatcttcttggctctgcttcccaaggactgggattgaaggtgtgttccccacacttggtccactttcttttttcagaggaagctgacttaaaactcagggacatactacctacatcagctcctaagtgcactgtgtttgtcttggggtctctggtgtgtagaaagacgttgctaatttgacatttttctgtcttttatgacttcagagtgtgagccagaagctgatggctggatttgtagagtgcttggattatgaagacacggaagaatttgtacgtgtagaagagggtatggctctgattaacgtgtgtttttacttaaatacatacatggcataatgaggaaaaccttgaaactcttaatttctagtgctgatataaaagagattgagaatttgctagaataaaaaagagttttaagattgtttaaatcaaagcaatgtaaaagtcaatcaagaattaagtaaatgtggtgcttcaaacacatgctaccttatattaatttgtgattttgttttgtggattctgtatttaggctcagaattagaaaagaagttagctgcgatccgtcatgaaacgagaatccatatcttgaatcttctcatcacatctctagaacgcaatccacccaatcttgctctctacctgttgggctttgagttaaagaaacccatcagtaccaccaatctacaagacccaggtatagctgtaccacacatgggcaactatttaacatgtttgctggtataagtggtcatttattgactcctgggttcacaggataatttactt

SEQ ID NO: 31105 - DNA, 1171 bp, Mus musculus
atccacctgcctttgcctctcaagtgctggaataaacatgtacaccattgccacccagcttagttcttagagtttttgggtggtggggtgaggttcaacacaaggtttctttgtgtgtatccctgactctcctggatcttactctgtagatcaggctggcctctatctcaaagacatcctcttgcctctgccttccaagtgatgggatcagagacatgcgccaccacttccccccaggtcctacattcttaaggtagttgtaaggctttatgttacgtgagacttcctgagttctggcgggagctggtctcactggttccccttgtactttaaggtgctggatgatgaagccgcacaagagttaatgccagtggttgccggcgctgtgttcaccctgactgctcacctaagccaggctgtgcgcacggaacagaggcagccgttggtctcaggacctggagaggcccagtatgctttcatgcttgatagttctttgacctcatctcctgcagcagagagccggccagtaggctttgcgtctatcggagattcttcgcttcacatcatactgaagaaactgttggactttattttgaagacaggtttttccatctacatttttctaagcattatgactttgttctgactttgagtgaaatgttttcccttgactgcacacatgtctttgtctcctaggtggtggcttccagcgtgtaaggactcacctgtacggctctctgctttattatttacagattgcccagagaccagatgagccggacacactagaagctggtaaagttagactgatttttactcttttctctttgtaaagatggtaacttcagaaatctaagtcacttctccattttttgactcagcacaactacaatcagtaagtcttgacatagccattagattgctgtaaagtggaggacatgtgtagtttttaagagttacaagattagtatatagacattgcaaggaaataacactcggatgatattctagttttatagacttgaactgcagtgtactgtttgtagggttggacaatgtctcttttctctttgtaccacagtacatgtctgctggggtcttataaaatggcagttgttctatagtaaggctataacatttaaacaatttctttattcataggcttaaaaat

SEQ ID NO: 31106 - DNA, 1039 bp, Mus musculus
actcttggtgaaatgtatgtacacatactattaattatatatttaaattactctggtgataacaattttaataaatatttcaattaaaaatctctaaagattaaaattttctgatttttgtttgtttctttctttctttgagagagattcctgtctgtattgtatcttttccttcttagccaaagtttcaaagatggcaataaattataagaacaaattgattagcaggataaattataatcagttgtcttggagtccatgattaattttaacttctgaagagccatacattgtgttattagtgtgcatgtgtgacacatgcttttaaagttcattgtctggactcattgatctggtcttttgtgtacatacaaaaatggatttctgctattattggatatgacatataattagttgctaaattgctttttactggacttttctgttttaatccttgtagctaagaaaactatgtgggaacggctgactgcccctgaagatgtgtttagtaaattacaacgagagaacatggctatcattgagagttatggcgctgccctcatggaagtggtctgtcgagacgcttgtgatggccatgagattggaagggtaagatatcagctgtgtagaattgctactgaaaagtgtatatttatgaaagtatatactgaatcagctttaaaatgtgtgttgcacatagagaattgtttttgatattatagtgagtttgctcatctactatgatttgtaggttctgctttgttactttatattttgtttatgtggcatcttaactcagaatttctccttaaaaatcacctttgctggctggctggagagatggctcagcaattaggagcactgactgctcttccgaaggccctcagttcaaatcctagcaaccacatggtggctcacaaccatctgtaatgagatctgatgccctcttctggtgtgtctgaagacagctacagtgtacttagatatagtaataaataaatctttgggccggagtgagtggggctggagcgagcagagg

SEQ ID NO: 31107 - DNA, 1219 bp, Mus musculus
ttctctaacaaatagtgtctaaaatgtaaatgctatcatttttaatgtaggtttggcttcagaattaaaacttgacactggggctgatgagatggctcagcggttaagagtgccgactgctcttccaaaggtcctgagttcaaatcccagcaaccacatggtggctcacaaccatctgtaatgaaatctgatgccctcttctggagtgtctgaagacagctacagtgtacttactataataaataaataatttaaaaaaaaacaaaaaacaaacaaacaaacaaaaaaaacttggcactgaagattttctttatatcgagaaattgagattctaggtatattcaatttccaactactcaaaaaaaaaagtgaaattctattatgaacattcttataagaaacagttcttaaagccctccaagtaaaggcttggctgttggtggttttggtagccatccacatattaaggctttgactctgactctttcttcctctagatgctggccctggctctccttgatcggattgtctctgtggacaagcagcatcagtggctcttgtacctttctaacagtggctatttgaaggtccttgtggatagcttggtggacgatgaccgaactctacagagcttgctgactccgcagcctcctctcttaaaagccctttatacgtatgaatccaaaatggtaaggttgtgtggatgctggactttataggccagtaggtcttctcctggtcctgcagctgtgcttactgctagctcggccactggtgttccctgagcatttctgttatataagctgccattatgttaagttttacatttggggatttgtgctaacagtgcagctttcagtataaagatgggctgcaatgatcctgagaaggttagagggcagtgtcctgctgccagcttgctcactgaggaggatgttgaggtggcatgatgccagggttcgtgggaagggaacagtgccttaagtactcttgtctttgtcatttccttccgtccagatctgctgcagtctctccatgttaaatttcttacataatgtcacactagtggaagtcttagactcgccatccatttattcatacgtatttactaaatacctaatatacaccaagcatgatgctacacacactagaaatgggcacagcaaacccaccgttgacctgttgacagaaactatatttgaattgaataatttgcagt

SEQ ID NO: 31108 - DNA, 1182 bp, Mus musculus
tagagccttagctatcgttacttattatgaaatacttctgatttctgatttttggaaagttttaacttttattattgaaagtaaaaggtttttcttagactttttaggtttcatcttatgtatatagttgttttgctttcatggatatcttgtaccccttgcatgcctggtacccaaggaggccagatgaaggggttagatttcccaggactagagttacaggtgattgtgagccaccatgtggttgctgggatatggaccctgatcctctggaagagtagccagtgctcttaaccaccgagccatttctctagcccctctcttaaactttaaaaatacctttgaaagtacctacctactttaggttgtgtgtgaatatccttgagatggtgttgctgacataaaaaatacttagcagtctttagaagatcctgttcttcaaaactgtcatggcaggagtctgcccgtgcaggtaaaaaatagaaaataccaggagcattctctggtttatatggttttcatttttagcacgcaacgatatttacacatgttctgcattttataggtatgttaagtgaacttgatgtagatgtaaatgaaggatccttaatggagctccatggacacattgcaaggtttcaggtaagtgatgtattttgtaaatagcagtgttaagggggctgcgcctggactagagcaggttactgagtctccgactaatcaagttagtgtcagtcactaacctgcggggctgccgctacttgattttcccggaatcacctctgacttccattgcaggtgaagaacgcaagtgtgtcacagagcttttatattagtgtttcacattcattattctatgtaaatgttattagtgagtaagccataaacagttgctcattttactttggtttgttgttcgtttgttttttgagaagagtatttctgtgtaccccgtgtgagcctggctgttagactaggctggtcttgaacttgcagccgtcttcactcttctgcttcctgtatgctgcacctataggcatgcctccacctgcggctgttgctctttacacagtgttgctgtcctcatgcagacagttgttttacccagcccctcaccccttgcttgctcttggcttgttgaggtagggtgtcatgtatgtggccagtctggccttgaactct

SEQ ID NO: 31109 - DNA, 1121 bp, Mus musculus
ggttgatttttatctcatgcctgcttgtgtgtctgcaccctctgtgtgcagtgcctttggaggccaggagagggcatcagatcttctggaactggagtttcagaaggcagttgttagccattaagacatctctccagcttcaatactggtgtctaaatgttattaatcatagtctacatgacctaaattacagatcatcgtcaatttttatagatagtttaagattcataaaagtttgttttcccagggtgaggcttatccattgtactctgcatgtgctgacccctgtcatttccccaaatgtaggaaactcaactgtaatgtgtggtagtggaggacttcatgttctcccctttgtaaaacaaatgaaatccatagaaaatgtattcaaatacaacaccgttttgtcttgcctattagatacccaggttccagtcgttccgtattggcgcctgcctggcttgggcattattatctacctgctgaagcagagtgccactgatttctttagctactatgacagtcaccgtcgcagtgtcaacaagctgcagaatgtagaacaacttcctccggatgagataaaagaggtatggaccttgtaatgaactgtgaggcttgaaaagtcactgctgcaccacaaaggcccaggtgctgggctcgggctgtggaataacaatgatctactcactccacgctgctgagggatctgcagggatttacctttgccatgtaaccttgtgagcacagacagaacagcccagtagctcttttcaagaaaataggcgtggctgcctgataaggagctcccaggaatgtcttcaaaagctgcagagaaacagggctcgctgttgcagatgtttttgcgtaggacgtgggaggagtctccagcatcttcacgcttcagtgaagtttccaggcagatgggacggctcgtcagtcttgatcacttaaatctgacacatatccaccattctactttctccagaagatacctggcaaattcatgccagcttttccacctactcttggaaaaggtttttgtttttatctagtagaaccccaagggctggtggaccactaggaaattggaagtgtcttagacttagacttgcagagacaaa

SEQ ID NO: 31110 - DNA, 1345 bp, Mus musculus
cattataaaatctagtagtagtttacattagagtaccttttgtcatgtctgtgtgggtaaggtgagcgtggggtagtggtggtgctgggtttcaaacccaaggccttgcactcgctaggcaggtactctgaactcaccttactttatgtaagaaagactgcattactggatgtcccagggcgggtggtacccaagggggtcttccaattctcctcagagaagcggggaaggtagtggaggaggggtttgtaggggtagggctgggaggggagcagggatgggtaggggggtggcagtcggatgtaaagtgaatacattttaaaaagattaaaggaaaaaggatagtgtagcagtgttgtgaatcagagcacagaaggcaatacccgagtagcagtgcactaacaagggcgtctgtactacctccagcttcagtctgatgctgtcaacgctttcggagagtcgctgcaaaagaaacttcttgacattgaagggttgtactcaaaagttcgatcccgctatagtttcatccaggctctcatcagacgtatccgtggcctgctgaggctgtccaggaactgagaactgactctcttccgtggaagagatgaactgaggagaaccacctcttttttatagatgactttatttctaaattatgaccaaaagatattttgctatttctttctttatatatggacatcttttctgtaaacctctctcatttctccctcacttgtgaacaataaaatactttttaaaaataaacaaatgtgtggtcattcttttgaaatgatcgaaactcttcacataaaaatgtttgatgcttatggttttcccgtggagagattctgaacagcagtttgttttcagacattctgtatccttcatgcctttgtgatgcttcgatattctagcatggagtgggtagtgaactacaccatgctcgtgccatgaaaactaatgacccaaaaagtcaacctgtcccttagaattagcctcagcctttcctgcatttcaaatgatgacagtctgtctttgtttctttgaaaatatcatcctgagataactcagacccaaaaggacatgcatggtatgtactcactaataagtggatattagccaagaaagtacagaatacccaggatacaatccacagaactcaagaaggttagcaagctgaagggcccaagtgagggtgctttaatcccacttgggagggagaagaaagcaatcacaggagggagggagggagggagggacttatggggagggggaggagaaaaggggaacatggtcaggtattagctaaggtattggcgggggtgggggtggggtggagggccag

SEQ ID NO: 31111 - DNA, 1152 bp, Mus musculus
gctgggcctggctttcagagaggaaatgtaaatctaacactgatagctaatatatatagatacaagccaaggaaacaccactgagtaggtctccagaggaagccaaagccttggcaaagccctttgtcctttaaagaagagctgtgaaagatactggcaagtctttctagtcttcctatctatagctaaattataatgtttctttttttcctctttaaagatgccaaacctggctaaaaaacttgaagagattaagaaggacctggaagccaagaagaagccccctagttcctgatgcctgcctggcactgcaatctggacccaccagttccatcctggggggcctgtctccttcacagccacgtccaaagctgtgttcctctttggtctcagaccctgcgcgttgctgaggctccagcacgggccagaagtggagttagctttccgtttccagcatctccccgttcccgtatcttccgtccacctgcttctgagacctaagcctggaaccatggtgctaggttagcagccgcaaccatgacaggactcactcgcctgtgctctgggattcctaccgcctactgtcaagaaatgaatggatttggatagctgctggggactcactgtctagcagtgataacaggagcttgctagacaaactaaactgtgttaaagtcattaaagtcagtatcttcaagccagtttctggtgaattaatccatttattatatattgttaccaaggagctccatggttgatgatttaaccagtaaatcatttgctggtcattaaccaggaaactattttatgcattctataaaaagcaaacaaactgggaaaacttaaaacatgcaaagtaactgttgtcttcgtacagttcagtctatgcagtctatgtttttccttaatgatatatttgaactgaatctgccgtaaaagagccattctttatgctggcacttgataggatgggtggataaatgaggagctgttgataaaataatgttacttttttttttttaaacattaaaatgtatcctaattatataacttcatagtgaaccccctaagagaagtgtggtgcaaatgtgtggtaaagtgagtctctctgggatctgggatctgatgcttcccccacccccgccccccacc

SEQ ID NO: 31112 - DNA, 1111 bp, Mus musculus
gccaggcagtgatggaggtgggagaagatcagaaatgattgacagaactcagagcattgagctgaccagaacaaactgatcatatcactgcacatctcacgaggccggaggttctcagctggcactgctaacattttgggttggataatccctcaccatggagggctgtcgtaggcaccgagggggaggttaggtgtgcccctggcctctagataccagtaagagccctcactcagtccatggcaaagatgattctagacatgacaaatgttctcgggggtcaaagccagccctggttgagataagatgttctcttagctcaacgtttcaaaatgcccggtgactttctcattgtttgtcggccggtctgtaattccttgagtttggaaagatggctgcttattgagcttttcgtttctcatctcacgtagtattagtcatgtgagaaatgcaatggatgactttaaacaaatgcatgaatgagtgaatgaatggatggacacatactgagcctctggagaataacctttcgttgactggcttcatataatttattatatgaaaatacattatgtatagatatatatttctggctttgtataatatattctattaagcatcaggctggcatcctctggcagaaggcagtgggagaatgacttatgtgaccttgtctctgaagacggttggggtcctgacactctctctgccttaccagccgctactgtagtcacacaggaggcctcggctgggctcccctctgcacactgcaggcttaattatgagacttcttttcagttctgtgaaacaacaggctacgataatacacggaggagaatcttctcactgtgggatacaagcaacattgaaacattgaaaccttcaagaacaaagcaccaaggacagttataagaaaccctgggagccatgggagactatttgccatagactcttgaagtttcagcactggaaaaagtcacacgtaaaataaaaaaggaaacatctttaccacaaaatctgactgtgccttgcttaatcccagacattttttttttttttttaaattttagcactgttgaccatggctaaatgacaatcctttttctgtctt

SEQ ID NO: 31113 - DNA, 2402 bp, Mus musculus
ggaggggaataaaacatgttttggaggagcagtggggaatgtgatgagacttttactgggattcctgatcaaaccagcctgtttttcatttccagtaaaatatacagcttattcccaagggagagcaaaaatacagtctattggaatcattggaccttctcagctccctagctaatttattaattagtttattgaaggtctgactatacaaggccaactctacttatttggtagccctagctgtgagcagtagtggctgctgttatgtcaacatagggtgctgagataagcaattagctatagccttctgccttaagaatgcactctcctgggggctcctggctagttaagagcggttagtgaccaaaatctctctagaatgacgttaatctttacataagagcttagataaggtaaggagcagcgcactcctgaattgctggatgactaaactttggattttctctcccctttcacatcaatttcatgtctctttagataaaactgactagttttatttataaaatgttaaattctaggagcctaaaggaggaatcattccagtaggcttatttctttttttctcctttagactcagacatttatataacattgaaacactttgagactccttctggtagtaaaggagatttaaaaataaaatcatagccataagcgtgttagtatcttataaagagagaacagttgtcttagtacctatggagtttcttcatttgctatttgagtgagccagccttcgttgtgtttggagaatgaagaatattctttggaatgcctctcaaaaacccaccatggatgctgattttatagtgcaccaaaggtatcactggggtgagatgtactgtatttggacagatgggacctcatcccttcaaaaacattcttgttaccatgttctcctgagctggtaatagactcttgctgggccagtaccaccccacctgcatggtgtttttatcttaacaatcattctttgcatacatgtgacaacttcaaaatgcattctgtgttcttataatacagtgccctaaaacggtattcctaggacctgcagataagagaaacttatctctaactttttctttcatgaacaataaaatgaattaaaacatacaaccttaaatttgatggcctacactttaagtattaagatgtcttttgcttttaatttgccatctatacaggattacaaaaactattagaatctttccatagccaatcatgcaataattgaatgtacctcaaatttttaaagggtaggtgatgggatagggacttataatcacattagggataataatattaaaaacctaactgattttttttaaggcattgtagcattatatagcagggttaaactattactaagaacaatcagcctggctaataactattaatcagttgataattggttggggtgtgtgtgtgtgtgtgtgtgtgtgtgtgtgtgtgtgtgtgtgttctcccatgaactcttttttatcctgtggctttttcactttcaactagcctgcccctgtagtttttctatgtccaagaaaacaatcacaaaacagtagtttaaatactttgatatatttggctagctctgctgttttaatgcagcctactagagttggatatcctacacttaatcttaaccaaaaggccaagcagctatagagttggacattctgctaggaagtggaaggcacatgatcagtctatgagtcaatataatgcaacagggtgttttgagacctttgttttcacctcttggcatactattttaaaggcttgaattttaccctttacacaattttcaatttttctttcaaagtcttctgttatagttggctattgcagagtgtatattgtcttatcattccagaacttgggtctgctttctacagtcattatggtaccaaaaccatatgattctttgtacagtttatcccagtgttccttgtaatgcagtagaggctattttgccttccccctttgttggccattttgtaaacccatagctatgaagtgattgcttgagaaaatagcatataaacatagactaggatagactgaccaggatggtttacagtttctttaaaaaaataataaacaaaaataaacaaaaaaaaaactaggttatttataatgtatttctgaaccacttggcagagaaattcatgacacttaatgttaatatttttgaataaatgaagctaaaatgtctgcttttggtacaacacgcattaataaaaggttaagttttgttttccactgaagtactatttaacatctcagaaaaaaaccctgcatgttctatagttttatattaaaatccatcatttcatatgcactgtatcaaaaacaggttacttgcctgaacatggttagtgtac

SEQ ID NO: 31114 - DNA, 1163 bp, Mus musculus
tgttctggcgtatctcattcagcatcagagcatccacactggagagaaaccatttgaatgtgagctgtgtgggtcagccttcagatgtagatcccaactcaataaacatctgagaattcatactgatgtgaaactctttcagtgtgtggaagattgaacattgttcgtggaacagagcttagggagtccacactggtgagaagctcgttcagtgtagtagatatggggaagctctttaatatctttacaaaattcttagacatgttagaattcatactggcaagaatcatcatgaatataaagaatgtgggaagtactttatgtgtggtggagaccttaaagtacatccaagaattcacactgtaagaaacattaccactgtcaagaatgtaggaagacctttagttgaatatgaaacttgttttgacatcctaaatataatagtaataagaagtcttatgatgtaaggaatatggaaaggcctacagtaattctaagttccctgtatatcagagaagttctactggtgagaaagcctatgaataaaagtaaggtgggaaaatgtttagacgtcgtgcagccttcatgcatagtggcaaattcatacaggtaggacaccctatcagtataaagaatgtgcaaagacctccaagtggagctggggccttcttcaacataaaaaaaatgtttgcttgtgtcgaacactatgaatgcaaggaatgtgggaatatttacagaattagctcagctcttaaagctcatcagagggtccatataagtctcgagatgctgtgactgtgaggactcggtaaaaaagctttgattgtaaatggtgagcttacacaacatcagaaaatccataatcaccaggagtcatgtgcatgtgaaagaggacaagccactgtatgaaaatcttcctgaacatcagaaaactcacattgggaagaccatgacgtcacataaaatgagaactttaatctgccctgggatttggtgaacataagagtattcatatactgttgatgccaagaaatcctttggaacgagaatttgggaagttggttcagagaagatactctgttgaaaatgtctcttatcctcagaaatctaggaagtctcctgacaaccttttcccagcattctaacagtctagattgactgtc

SEQ ID NO: 31115 - DNA, 1177 bp, Mus musculus
gaacacgggaaagtccagactaagtttgcctcatgtggtaagcagctgagcaggaggaggggcttctgagaggtctattatctcaataaagggttaatcattcctcccacatcttcttaacatgtcttcagatgaatccattttcctgagaggtggactcatggccacatgattgacaggcccagttggagtaactcttaacagaggagaccagaatgttcaatgttctttcccccaaacagaccagaaagtcaagtcaccaccaagagccagaaataaaactcagatttcattcttttgcccatgagatgctagctttcacttaagaagcatcaaccgagcccggtatttctgcattttttttcaggcttgtcttaaaagctgaggaggcacagttgtaatgtttcttgggttcaaggcagataatgaggaaggagttcaaattcaatgactcggaagcctgataatttcctgtaatacagtgcctttttagaattcccggtgctccatagactaaataagaggaccctacgcacaatagcatagggagatagggctcattgatgaggatgctttccaggcactgtggtgctgggaatccatcctaaatgtttgcccattttgagcagcgttgcccgacatgtgtgtgccctaatctgttagggatcaggtaggtggtggggctggaagagttatcaactctggtttccttagcttcatggtaagtcccattagtggcatgactcaaatgtcacatgcactttctgtaggtggtgctcaagcagagatctgaccaggacactgataggaaagaggagagcaatggctatttgtttatgagcattctagttatgaccatttgcaatccaattgtattattgctgctgctgtttcaggactgctgctatcgctgtgattcttcggtttcacattcttccccacatggctgtgtgtattctccctcctcccctccttcctcctcttcctccctagccctccttctggttttggatgtagaggaagacacttggagcgatagccttaggttctgattttccttatctttcgttgtctgaaaaattagttgccaaacatacttactgttctacatcatgttaggaagaccaatgccaagagggggatcacacattaagagctcacagacacacagtgttgt

SEQ ID NO: 31116 - DNA, 1197 bp, Mus musculus
tgggtggaaggccttaccgaattagcaatctgtttggattagtagaaatgtattgtgcttccagctccagagaggaaagctaaatataaatgcattgtcaggcagacttacctggagtattttagtactaccatctcccttcttagctaattcactcagcagaggcaaattttaatctaattttggtctcctgtgttatcacatcatcggggcagggtctggataaacaagacttaaacaatggatccactcagagttgttgtctttccctcatttgttgaagatgtttcaaggtggtgcatccatggataaggcctttatagaacccatagctatctcgattataaaatcaaagctctcaaacgccattccctttcctggaatttccatagggtcaactccatcagggtctttgaagaccctgtgaagactatttaaactccccagaatcactaagtatctcatattaaaaaaaaaaaatccagtgtcgaagttcctctcttgatgctgaagagaaaactgaagtgggcggatcttttccttacaggagaatgctgtgaatggggagcacctgtggctggagaccaacgtttcaggggacctctgctacctgggggaggagaactgccaagtccgatttgcagtgagtatgtcccacgatgcccacttagtctttccaggaaaacagactctatgtctgtgagcaatacgggcgagaggaacggtgtgcccaagtatcccaggatgcacttggaaaggctccatcgtcatgacacagaacgtgtcacttgattttaaggtttacaggtgtgtaccaagtctccatggctccaggttgtcacctttaaagactttagggtttcactgggtagactccatactagtgtatttgatgcttaacaccatagtggttatgggggttgttgtatctattggaagtcagagagagggtgcccgtagatgagggactgtcacagatagaggtgtgtggagtgacaggaggcctgtgtgaaggtggagggagtcatctctctgaagaacagtggacatgggatgggggtatgggtggtaaaggtggaaacaaccatgtgggatgtggataaggttagcctctttccacactgagatctggagaacacaatcccagaaatgacttgataaatcaacaaacaggtgagtggggggtggcttttactt

SEQ ID NO: 31117 - DNA, 1189 bp, Mus musculus
tgagtatataataaaaaaaaatattagtacccttgccagaggtggtgatgcatgccccagcagttgggaggcaggggcaaaagtagtgttaggccatcctggtctacttagtaagttcaggcaagtcaactagccagaggtacatggtaagaccttgtctaaaaaaatgatcactgtcctatgccctttataaacaggacagcgggatgacaacccattgttatcttaatatcaagaagatgaggtattttggtaattccaaggttagctcttttttcttggctacttttagttcccccttcccctttccccttccccttcccgttcctcttccccttcttgttccctctctccttcactccctgccctttcccctcctttcttttcttatgagatggcttggtccaggtcttgaataaccttgacttgactatccgcccacctctactttcccagtgcaaggattacaggcatgtaccagcaggcctggattgaaggctggattctatctcgtctacatctgtctgtctgtctgtctgtctgtctgtctgtctattggtgtttagaagagtctccctgtgtacgtagtccaagttggctttgaatgtaccactctcctgtctctgccttcaccttctgtgtgctgggcttaaaaccctggcgtgttccaccatgcccagctacatttactactaaagagctgctttgaaggattttggaccctctcagcaaaggacatctctgaggtataaagtctgggacattattcaaatcatcctaactggatttctcaagccctgatcaaatcaccaagctgttttgcttagcttcttggtcaagttcattcattaattcagaaggcatttattgaatatgtgcagagtctatctagctcagggctagatgtaacaagattagtggatgaatgaagtcctgtcctttaggagtttatagtctttactgaatgaagggaaggcaataatagaatgccactgaagatgtatgatagctcttgtacttgaaatgtgttctcagtctttcacgtcaggtaattgacattaacgtggcattatgctctgggaactgaattatgaagtattttcttttcatatttatttcacagttaatatcacagttcttttcagacatgctcttgtgagaatactcgttccccacaaagtgatgttgt

SEQ ID NO: 31118 - DNA, 1178 bp, Mus musculus
aggcaagcatgtttatacttatgtgaattgtctaattcatgtggaattttagtgccatggttgtatatatccttacctttctggttagagatacagtgcataggcaagaaaggggtgtcacggaggggtctggatgggcagtgagggaaatctggtttatcacagagaggccagtgctcgcttgtctggagtgaggaatgtctgtcaggcttcgaaagaactttctgagtcttgtttccttgctggtctcatgagctggcagcacatttccctgagatttcatgagcaagactgtccagcttaatccttgacctgctccctcatctttatatgatatgggataatgctctctggacacacattagtattaaaagttgcaggggatgggggaggggtggagaggaactttttaatactaatgtgtgtccagagagcattatcccatatcatataaagatgagggacacaatttgagtcagagaacttctgctcgtgagtctgagccagctgtgtgctaaacagaggccaccccaggagacctgcctggaaaactcgctgactggaacacttgagactagttcaaagatgctgatggtggctgggcttgcatgtttctgaatacagccgccagtagcaatggtgccgtgatgtcacagaaaccatgactctcgcttgctccacttcccatttggttctaacacccccaccttcatcttatacaggactgtcacaggagcctggggagagaagagggatttaaaggagggagtgaggcaagctgcagttgtaggcccacccggcagctatgtctgcccacccgcaaggtggtctcggaagaggtgttacttggtaaagggacctggaccgctctgctcactggcaactcagacatgtgggaccgctggaaagaaaaacacccctggaccaggcagaggttgagttctctctctctctctctctctctctctctctctctctctctctctctccctctctctctctctctctctctgtggtgggctgatagtaaatgtgtctgctacccacacatgaacatgatcaggaaaggacacacacagaaagcgcacatttttcttgtatttatgacggagttgtaataaagtatggcagaggctgccgagttggcgatgaagtctgtgggaattgtatggaagcct

SEQ ID NO: 31119 - DNA, 1270 bp, Mus musculus
cagaggactcaagtactagtgctaggtctctttccttccactctctctctctctctctctctctctctctctctctctctctctcctaagtacttattcatgcctctgatgtgccttgtatctgaatccaggatggcagagatcccctgtccctggaaggtgtcatatattactagctagtattaggttgaagttgggggtgggggctttctccgtaggcttggggatggttccctcaaagtgagccactattagatttgcccatcaggggaaaagaaatggggttatatccattaggaaaatcccattttatagatagaggtgcaatcacataaaaatgtggccaggcaggattaaaggtattctaaatccttaccacggggcattttctggatgcaaaggcactagcccatttgaaaattaatattccgtgcctctgggccaagaggtcagctttctgcacgaggagaaaaacagtaactgctgtttgttacagcctgaaatccaggacgaccgcattttctcttggtttctaaaaggaagggaatcttcccgatttttctaagatgttgagtattgtgtaagtaagctttgagtctttgaacctgattgaaatgcaaagcaagggtgactcattgttaggagaagtaaaggccacggaaggtatggtagtttctggagtcctatctgagaactcacagattgtctttgcctctctaggcagaaacagagctacccactgcagcggcctgactgtgcagcactcagctctttggctctctctgaaatgcccgtctcatcctgtctttttcgagcatggctcacaggccttgtgtctgggtgaagggaacccagggtcaggctgcacttctgtttctgtcttttgctcaacagcggggtgtgcactcgtggctgcacagatgaagcccatgctgagtctgtgggaacacccacactcagtgcaccctgtgggtgaccctccctacacagtgcagagcagagcccaggaggggccacaggcatcagtgaactctccttgcctaggatggcaactgattttgctctctttggaaagattctagataagtcagcattgtttaaatccaagtgcagtgcaagtctgtgaactgatctgttgcactgtcttatggcttcttattcttcatcatagctaattaaataccaaaaaaaaaaaaaaatagaaaataaaataaagctttgtagtatacttgtacttagtttggggaaaaatgaaattataatgcatttg

SEQ ID NO: 31120 - DNA, 1208 bp, Mus musculus
atcgctgttgcggaatccacttaggcatgtgtcccctgatggatgaatacatgggaatggtggatactgtcttctgactcaggctctaggctccatggcttcctctctctggtcctgccacacagaaggaaagccctgtccaggataatgagcgttgctgacacccttgctagcttgtcctgcctacctgcttaccccactccctcaccttcctccttcccttctgccctccatccacctgccttaactaattggggctggagttggtcatttttgtacacccacagtggtaccttttacagtcaggtttggatactttgcagctcatccaaagagacataactaaaccctaaactctttttttgttgttgttgttgttgttttttttttttatgattaaaaagtaaaaattgtagtttaaaaaatcctttcctctttcatacaaataagaaatggaaattgctcgtttattgtataagatagaagattcgtttaaagtgtttccccacccccacccccagcttgtaaaagattttatgtaagaaatgtgcttacactttgtattttatttttagcagcagctaaaaggcctgtagttttactctctctctcctctctctctctctctctctctctctccctctctcctctctgtcttcatcatctttgagatcattagagcctgtataaaggggattatggccctgccttctatgtcacacataggatttggtgtcattagtgtttgctgtcatgccccatgagtagctccttacttggtctgctcagggcatcctagggaatgttcctttcccccactcctccctccctaccgtggtggattcccagctggcagatggccaagctcagggccactgtgatcttggcagccctcctgtttaaggggctgccaccctcccttacagggtggtgtatagccagggctatacaaaaagggtggctagtgaccttttctctctcttctctctctcttctctcttctctcttcccttgatcttccttggcctggcccattctgctctttacagtgccagatatttatacatcataaacttaggaaatgcctaaaagagcctaagcaggaaaaatcctagggtgaggcaatgtttgcatgatgagagaggaagggtttgccatagagagctgaaatggggatttagactgatgtgtgcattggctgagctgaa

SEQ ID NO: 31121 - DNA, 1100 bp, Mus musculus
gggtagtacagtgtgtcccactgtcctcctgactggtgctacatggttgacagtatggtaagtggcttgccatgaatgcagctctattcacagagccaactcttgaaagcccgaggaggaggtagctgaaaaggccgaggtaggtaagaaacagccccatatgtcttaggaaggttgagggcagtcatttgcctttcacttaggagggagcttcatgtgctgtggactagctgcccagaaaacagtgcagctataagctgactggaatcatacctgcctctacctaaaataattggcaagtattttgcccactgtcctggatagtgagtcttgcccctttctttgctcactatcatttggtaagaatagatgtacatgaaaatcgtagctcatgttgcccactcgacacagacagacatggttctctatgtacttatttcaaaattgtacgtgctcatgatgttcatgctgcacccatgccttcaacatgaaggatgaattaattagctgtgaactctaacttttcacggaaggatggtctcgtgggaaaatgtggttcttacactcagggaaatagatgctcattttctgtctctgcccctctctgagctgcacaattttgggcccattgtagatcttttctgggctcacactttctcattggtaaactgactaactaatatgtctgttgtaaagatttattaaaataatatatttagccattttcctcgtcatgcttccgtggctaggccttagtggacagctagctcttcggtggcttcctagataaaatgaatgaatcatcgtgtagacagcgacctttgtctcccagctgctctgcctggagaggatcactcccaatcgaaccgttatcacatcgtccgtgtaccctggcttctgcatcagtaaacaccttagcctgatgtcactattgactttcttccttttaaacacaaatgttctagagtacacacagaggaagattcccttagattcttttcccctctaatcttgagggagatgttgccaggttttctgtgtcccctggtgagtcaggggctcaggaacactcacttggtatgacagacaaatatgaaagg

SEQ ID NO: 31122 - DNA, 1226 bp, Mus musculus
tgatcctgatcctcatctttgcggaggtgcttggcctctacggtctcatcgtggccctaatcctctccacaaagtagtccttttccaccatcagtcacaggataggatgtaaagatcacccctcctcattccagaacgaacagcctgacacatgcacgggcagctgcccctcagtagttggtcttgtaaatgtgcagtgtcctagtgcccattgtctgtcgcccccgccttgcccctactgcaccgtgctgtggacatacgggcccactcatctcccacccaggcccctgaccagtgacgaagtcagcctctggttaccccacccatcgccctagagtgctcctgtgtataagaatgaactagagttgtcatttttctcttcactggatgtttatttataaaagatttgacctattcatgcgtctgtggagcagctcctgtctcccaactatatagtaatcattagtagactgttgccttgtggggttcctgttgctgagactccttggatggagccacccttccccctgccctgaacagccagggtggaggatagagtgctactgctcctcagagctggctcccagctgtgtccaataaaagttctcggatgtgaaaaaaaaaaaaaaaagaaaaagaaaagagggaaaatcctaaagcaccctgggtgcaagatgtgcagaaatgtaaggtatttggagaactatcaacaaccaccaattgcacatgattttggtcacatttacttcctgttcctataactacggacaagtccccatttttcctgtgagtaggttgcaaactgttactctcaggttttatttcttttcttctgcttggcaactttacagctgtcactttagaagaatatcctgcctaccagcttggcccagtgtaggcatagaactaagtgctttctttcttgtaatgtaaacctaacagacaagtggaggcacacgcgtatcaacatgaatcattagctctgctttaggaaaacaagtgcatttgtgatgagcaaaccatgagtaatcatggcccaagagcacagattcaacttaccttgaccgacatgttccgccatggaaaaagatggggaaaaaaaaaaaaaggcaggcagatttctgagtttgaggccagcctggtctacaaagtgagtgccaggacagccagggctacacagagaaaccatgtcttaaaaaaaaaacaaaaaaaccccaaacaaacaa

SEQ ID NO: 31123 - DNA, 1144 bp, Mus musculus
agcagatgaagttacccagtgttgacaaccagtactattcattgtaaaacaaacaacaaaaggctattcaacctattgttctggagtctgctgtgaggtgtacaaagttcaggggcttacatatggtaaaggccttcatgttgaaggcaaaactacatgtttcaagttaggaaaagttatcacttaacaaaaggaacatgcatgaatcctcagagtggacttcttcataggcctactcacattgattccattaaacctcacatacagcacttaatgagtcacggtgggaataaatttcaacatgtttccatattttcatagaaactatagcaaactgtcagatgtgtaggatgagcctggagtgcattgtgtgtgacatgagagtcaccaagtgtagctcgtacactacctcacctgtatgtagtccacattaaaggagcaaatctactagcagggtgtttaatagagagcattggactgttacaagctgccaaaattataatctgtcttcctaagaaaacatgtaaggtgaaagaaaaaaatacgtaagataattcatgatagttggcccagtttattctgtaaaaatagatgttgaaaaatacttacattctttgtcactgctgtgtgtgtttgtggccaaggctggccttctttactatgtggtgtgaatttctaatcatccacctctggaatacaggcattaggtgcatactaccatacccaggttatatgttctagggatttaacccacagcctcctgtttactatgcaagctgtctaccaatagagctatatctttagcctccagttttattattagacaaataaaatgtaatttgttgtgcttcagaaaatggtaaaagttatgaggacattggcagtctaagttgagttaacatttcatatatgatttataatcagaattgttagagtaagaataagtaaaaaagggaaacacagggaaggttcagagggtccatcatgttatgtgctgttaacttagcccagtacatgaactccaaagtatattcttacattttagtcgatttattatagttgtgtgaggtattgtaataatgtgcagacattttacttattcagcagttacttagttaatattttcacctgctggacaacattc

SEQ ID NO: 31124 - DNA, 1222 bp, Mus musculus
taaatgggtagtgcatacttttttaatgctcatatcagactaaggaaaacttaatataaattttaaaaaatttgctttccacaatataagttatttttattacattaagaaacccagttcttgccaggcgtggtggctcatgcctttaatcccagcacatgggaggcagaggcaggcagatttctgagttcgaggccagcctggtctacaaagtgagttccaggacagccaaggctatacagagaaaccctgtctcgagaagaaaaaaaaaaaagaaacccagttctttatgtaccatctgaaaactattgactaaagtagtacctaagaatattgacatataaatggccctatctacttcttccccccaacaccatagaagagaatccatagaaaatggaatttctcttcctttttttctgtattcaattatgtacagtttataccctggctttaggacccagttctcttacagaatcccaactgagaaaggctacaaaggcatgaagggattgtgtatgttcctaggaaacttggtgtatttaggcatggcaaaatatttatatttaagtcataaaaagctttattaaatgtaacttatcgtctgtgtgtgtgtgtgtgtgtgtgtgtgtgtgtgtgtgtgcgcacacatgatgtggtgcatctgctctctgtatatttatcgtgggtagactataaagagtaacctttagtttcttgctgggggaagttgtctgacagaactctcagtttgtgtctcacttgagcccttagtctcagcattccagaggcagaggcaaaagcaggtgggttaatggtagttctaaggtcagcctcgtcagtaaattgtgttccaagatagccagggctgcacagagaagccctgcctcaacaaaaaagcagaggaaggaaagataacacttaggattgaagttttctcgtaaatttgcagttgtttttagttttcaacattaatttgccctgaaataatttcttctctcggaagattgattgttcaagtactataatgttggacaacattgcaaggaaagacacaggtgtagatcacgcccagccgaggcctccgtcaaacagaacggtgcagtcaccaaattcatcagtgccatctccaggccttgcaggtaaagccaccttttggatttgtaaatgttttctggttttaactcgtatttttactcataataattaagtttccctcagc

SEQ ID NO: 31125 - DNA, 1138 bp, Mus musculus
actggaaaggaatgacatggcggtgggggggggggatataactggaaaggaatgacatgggggggagaggaaggcggagaagggattttttaaatctaacaattgtaatgaacttttgactattgttacaaagatttaaattccatttggcacagacgtatactccagagttccctacagtgccctcttccctgcttcctagtctttgtacttctcagaaagctcatctgttgtgataaacagtcataggccctttctgggccttgtggcccacacctgtaaccaagcatggaggagatagaaggagggtcacaagtgtgatgttttctcagatattcatgttaacttcttagacctttgcatcacatttctgccatttcttttctgtacttctttgtacctagtagtatgtgataaataggcagaggataaaaccctgtccaaagaaacctgccataggtggcctgcaagtggtgggaaggtggtggtgaagacagagctccgacatacttagaactcaaaggtacattatcccaacagtggagaatggatctgtactttctgccgagacttatctaagccagaggttgactatgattgtgatgttcccagtcaccactcagagaaacggaaaagtgaaggccttactaagttaacgccaatagacaaaagggtaagtgtctgaacatttccactcatgattttatactgaattcttccacctttaagtttctttctctctcttccctctatatataaagagagaagaagcaatagaaaactatagtgtctgtgtggggtttttttgtttttgtttttcgagacagggtttctctgtatagtcctgactgtcctggaactcactttgtagaccaggctggcctcgaactcagaaatccgcctgcctctgcctcctgagtgctgggattaaaggtgtgcgccaccgcacctggcttgtgtgtttgtgtttaaactcgtgcatgaacgctcatccatgcatctacacatggagaccagagattatcctaacatatcttcctcttttgctttccaccttacttttgagacaaatcctgtcattgagcctggagctcactgggctagactggctagctagcaagtacctggaattcacttg

SEQ ID NO: 31126 - DNA, 1172 bp, Mus musculus
aataggaacagaattgtgagagattatttttattaacgaaacctgggtcttttgggtgttaattcctacctgtatttttatcccacagcctgattctgaagtagccaatgctggtataaaacttgaaagctattttgaagaacttctaaagaatctttatccagaaaaaaggtttcctaaggtagaattcaggcatgaagcagaagactgtaagttcagtgacgactcagacgatgactttgtacagccccggaagaagcgtctcaagagcaccgaggatcgccagctgcttaagtaacgccgcactgggccagcgcgctgtgctagagatttctcatcaaaactaaagacagcaaaaggcttgtcagtgatctaagggtttgtgagctctctgctctgtttttgctgtttactggactttggtttctttcataacccatttctttaacctcttgtcaatgaaaataaaaagaagaggaaggaaggaaatgtgtacaagaataaaagaaggaagagaaggtagaaaaagaagaaagagcaaagaaggaaaagacattcttccccttgttggatttcatacaggagcctggagtgagtgctacactaagaaagaaatagagtttgacataagttgagattttagtgtgatctggatgtgtgataatccatttttagaatattaatttcattacccattaattatggccaactgtaaggagatagtcctgttactattcttaaatgaagtcctccccaaacgtgaatggaagcagagttctttgccaggctgcctgccggaaaaggtgtagacagatgctactaagacaccaaatagtgtccatgtaagatggcaactgcattaaaaaaaaatcaggaaaaacaaatgtttggttattgttttgttttatcttgtctgttagagatgctgggcatagcagttctaaagggccattctctcatggattgctagatcggccttttcttcagcttcggtgagggaggaagtgtgtgtgtcaagtgttgctgtttgatccgcccctccactctccccttactgtgcagagctgcaagttgctagtggcttttctttcttttggggggagaagggcggagtggttgggttttttgagacattatttctgcagtattactgtagtcctggctgtcctgga

SEQ ID NO: 31127 - DNA, 1173 bp, Mus musculus
agtactgttgtactagcccaatatttgacaaaatacaataacagttttagtttgccatagtaaatttttagtattaaagcattttaattgtttgactagagaaatttttttctttaggttgacagaacagctgacctgaggatttatttggtcacatgacctcccctgaattaaaatgtagctggacatagtagccgtggtggcatgcacacactcacaatgccagcacttagaaggtggaggcaggagaatgggaagttgaaggtcatcgtccgctgtgtgagccgctgtgggggaggagcagggagacggtgacttctgtgtagcattattccagagctacaattgtttcttgccttaatagcaatagatcccttttatctaaacaacctgtataatactcgttatacatgaccactctaacagtcttcatccgttttctaaatgtgtgttgtgtgctgatgtttgtcgtgttgatttgaacatgcagctggcacttgttctggaaacagtctgaacaaagtttgacagtgcacagacccttggggaaatagggttttatgttcagttcagtctggccttcagctctggcccttctacctctacctccctggttcagggactaaagtagtgtgcgaccatgccctcagctttggggttggttggtttgcttgcttgcttgctctcttgctagctttattatttgtgggaagtggttacacttgtgatttagtccagcattttaagtgtagcagctgtgaaccatttttattttaatattttaaagatttatttttttatttcatatgtatgcatgtttgtctgcatatacgtatgtgcatcatgtgtgtgcctggtgcccacccacctaggctagaagagggcattggataccctggaagtgacgttagagaggatggtcagacaccgaccgtatgggtgctgggaaccaaacctgagtcctctgcaagagcaataaatgctcttaaccactgagccatctcaagctccggctgtggaactctgagcaatacctttctttttgctatcttagaatactgttctctggtagattgtcttccataactgtcacctgagttaaaacagtacttatgtaaattattttgagaattatcactaagggggaggtagggcttaaataaggtaaatata

SEQ ID NO: 31128 - DNA, 1132 bp, Mus musculus
aagggaagccatgcacagccgcatagcctcatgcactcactcacagactatcaaatagtgtgttggggtgggggaggggcacatccttgcttgaatggaggctgtggaaattcatggtgtgggggagaggtgtgctgcggcctgtgaagtctggggaagagaggtgggaggaagactcaaaagaggtggtaaggaggctcaaaaggtcatctggttcccatggtgttctgcgccttgctcctgcctgcctgcctgcttctagctggcatttcagtctgcttttcttgctcttccctatcaccacagggtggaattccagaacaagttctatgagggggctggctccaagttctcccccttctcctttaagcacgtcctggaaggcacagctgaggagtaggtctgtctgtatcctggtgcaggcgacagctgaagaagctctcactcttgtctctgacatcagcccaggccaggtgtcccatgctgcagtccttctgaatggctgtctgcagtgtgaagctgtgtatggtgcagtatttaacaggacttagccacctaactgaggggctactttggtgaatcattcggacttcatgtgtagtcttcatgatcaaatactaaaataactgggaaacggggggggggggggggcggacatgacacttgaccaccatcttcctgtgatagtttatttttattttacttcctttctgtttgagacaaggtctctctagctttaactgttctggaaataaccacacggccaaggatgtccttgactttgaactcaggttcctcctgcctctacttcccaaatgctgagatgacaggcaggaaccccctcacctgaagttcctgcagtatttcaagtgttataatcatgaaaataaatgtctgctttattcactgtttaagatgtcgttattccaaattaatccttaacatttagcaccagcatttaaaggccaacgccaaggccgaacaatggggttgcacaacctaatccccagggcaggattagtttgttttcccttctcttcccccttgtcttgggcttagcattacaagttgagggactctcaaatattgtcaccccacaggaggaagcacagctaatgccctctgtgggaga

SEQ ID NO: 31129 - DNA, 1776 bp, Mus musculus
acagagtgttcactgctatttcagatcttggtgagtgttccagtaaccaagccagtccccaggacactagtctacgttggcaggacttcacaagttaatcattccttaggcctcccttggccctttcatcctggattcttaggtgggaatcagacacttagaaagatgttgggtcaaggttctaggagcaggacagagtgttcctgtcatagtacacactaagtttcccactagcagagtcctcgccatgtcatttctacctccaaagtcatcagagcctgcttgtccacatctggtccaggtgggagtacaaggaaggctgcttctacacccatgagcacaaatacgtctgtgtgggacagtccactgaacgtcgtcatttagtccagcccattgcaggcattcctggaacaggtgagagggtttctacttcccatgaagtatataggcttacactcatcacctcgtaaacaagaacgggcacatttcaggtggcttattttgtgggggagggtgctggaaggggttggtggtgattgtgggtgtctaaactggaattcttttgtccatgttaaaaagacttgaaaactgaaacgtcacggtacagtgttaattcacgcctgtgtgtgtaacaggacactcagcaattatcttaagaacacacagcagcattgacgtgtagaaagagaatagtaaatgcctttgggaacacggttgagagccagccaggacgcaaggggagcaatgaatgtctgtgtctgatatgctcctcccaggttggtgtcccactggacaggtcacaatgcaggctgcctgctttgcctcctcctgtgtttccctgctccagggccacttccagggattacatggaggatcaccgatgtcttttctcatgcccaccagatatcaagtactcatgacttgactcccaaatgcgccgttacagggctaagttaaagccagactttaaagttctgtcacggtggtaaggaaagaaacaggaggtgctagaggaaccaagagttctggtcattaactcagtcatgccgagcaccagggcgctggttctgaaacggttaagagaaaggctctgggctttgctcccatctctgcacagcgcactgtggagcagagaggagggagacaggagtagggttatcagggaagcttgctctgccaggctgctccaggatgccagcttgtctctgactcggttgaggtccatgctctgactttctgcaccctcgtgctaggcgattcgtgttactatacaaaaccgcagaaggaattgggccacctgtggcatcaagactgcaacttgacaatcacggtttgctgatctcaaacgggcacttaaagcctggtatgggtgtgtgatttagtgactgagcctgcccttctgtttgtcagttacgtttctacccttcaattagctgcactgttttctaatgtgctgtagagtttggaaataatttatgcaagtgtttggttcccatgtttacaatttttacagctttcctaggattttaaaatggaaatgtcaataaatgctacgaatcggtgtggaagctgttctttgtggttcattccttgggaacacggtggctttgtagtttgtcagtggtggttttttatgctgaggtgacctttggttctctggttttgagtgcctgctaagaatacctagtgtggttctccaaggacttcagttcacagcattccattcctgggagctggcagaactgtccccacttgcagcagtggtaccatgcccgc

SEQ ID NO: 31130 - DNA, 1776 bp, Mus musculus; identical to SEQ ID NO: 31129

SEQ ID NO: 31131 - DNA, 1688 bp, Mus musculus
gaacttccacagctgatcagcctcccttgcaggtttgccaagtatctgcttcctgtggaagcaagaccaaaaggaaaccaaccgagtgggggtttggaggagtcggaagtagcatctccaggcaagctgcccgaggaagggaacaagtcgcaatgttagaagatgccataaagtcacatggacaactcatggtactttttctgggttggcaatttgatgaccactttggttcagtcaaaatgtgtgtacttttgggccaaaagccagcacttacacacacacacatacacatacacacacacacacacacacacacacacacacacacacacacacaaccaaaacacaaacctaagctaacaaaatgtaagtcagtctcttctttcaaaggcagaagattaaaccctacaggtggatagggatgcaggggcagcctttccccgggaatctgactggtccgcacaacacacccactgctcagtttcctgagaagagagatctcaagacattttaataacagcttgagccctcttctcctctgtaggaacttaggttaatagtaatattaacaacaagacatgctaagactctttggtaatctagaagagcttctagtgagaacctgatggtaggtcgtggggcctggtgatttcaaacaaagccatcgcctgcgttctttctccttctggtgctacagctctgagggccttcacctttctgtctgaaatacaactgtggcttttgcagtagaagactatgttggtggtttcattgtgttctggggtctggggtgggaaagaaaaagaaaaagctgtacttgggagggggaagcttcatatttatttggttattcaaaatacatatcagagtttgggtttccagtcttagttgcatttgttgtttatttgttgggctcacccaactcttgacaccatagcagagcatctccgcaaggtccatcctccggaatgaggctgttggggtgtcctaacccaggtccttgtgcttcactgacagtttgctcacaggttatgtttgaatgtcttatggaagcagacgttattttccgtgattcttaggactacctgtctgtcacgaatctgcccacggtagtcaggtcccctgagctctggactggaagtggaactgtgttcctgccagcctctgtaatgactgaagaaatacagggttttgaaaacatgaaggaaatgagagtttccccccattcctgatttagctattatttctttgtctgaagtctgccatactcactttgggccagagagaggttacctcacagtgtgcttctgacgtcacatttctcggcctccgacattatgacattctgcatcctggtgcctgaaggaaactctgggaaattgtacactaacagggagttgaaccatgaagctcttcgtcagatgaatgaatacttttgattggacaacagataatgggttagagtttgggctggggtggtggtggtggtggtgctcagcctaatcaaaactgtgtgtctgcaagtttgaagaaaatggagacagctagaacaagcccccagactgcaatcactggctccagaattgtctttgcccttctcacctgttcctggaaactggggcagccagtgcttatctgcacactccagatgagaaggcatacaggagggggcccactgatctttgtca

SEQ ID NO: 31132 - DNA, 1333 bp, Mus musculus
ccctctcctctgtgtgtgtgtgtgtgtgtgtgtgtgtgtgtgtgcgcacgcgcgcacgctccaggccctcgaatgtgaatgaggctattttagcctgtgtgtgtgtgtgtgtgtgtgtgtgtgtgtgtgtgtgtgtgtttagggtcttggttctctctgttctggtttatttcagcacagttctgtccttttcttcatctactagaatttgacagacctctggttttcctccattctctgtgctgtggggatttattgctctttgttcggcttactgctatttctgtgggatttggggatagagggggaggggcgggacactaaatgctcacattcaacttcgtcacttaatgtcaaaaacatttccagcgaacagagtgtttcaagtctcacagaaagggatcaaggttagaaaaccagctccctttccttttaaacttttacctccctttgagtcaggcttggagacacacatctgtaatccctgcattctgaggcaagaaggtctaggcctgggcagtgtagagagacatcgtctttaaaaaccaaaacaagataaaatatcccttcactttaccccctttgaagaacactgatcagagacccccgtgatcagtgtcacagccaggccttcagctccatgtgctattctagaagctccttctgccttccttctttcagattgtgaatgtcaccattgcttcttcgagggtggctccccggaggggcccagtgaatattatctttgctgttaaaggctcgcaaggttttctgaatgggtcggaggtgagcgatctgctgaggaacctgacggtggtggagttcagcttctacctggggtacccggtgctacagatcgcagagcgtgagtacttatggcttcttcgaggccttggggaagggactgccagcgttttttgccggtggatgtctactttaaaatattgttaactttaagtagagactcgattcttctagagtgcttttgggctcacagggtctggatgcagaggattcttcttgtactcactcacgcatgggaagtcccttccgcaacgtcccattgaccacagccagtggacatataccgacatggtggcccctccagggtcttaggtttatgatcaggctcaggccctgtactacactccttgcggtttaatgagtgtttagtgcaatgtacctactttcatatgttaaacacagtaggcttactgggactttccccctcaggacatatttgactgaatgccagaataaagtcaggatgtctcaagcccagccagggcgggctccagagcccttctctgccccgtgcctccctttcctgttt

SEQ ID NO: 31133 - DNA, 1195 bp, Mus musculus
aaaaaaaaaatgaatggaaagaactagatttgggggtgagaaatatttcatatcctgtataaaatgttattacttgggcatgatgaagagtttttccttccatctgtagtggttagcattcccaacagctgctttgaacctcagtgcagctgccctccttctgtggagggagatatcaccagttcattcaatagcatctcagagactttgaaaatattacttctgagagcttttaaagcctcatcctttgccgtcggatgcacagctggagacattctgttatttgttgagaagaaggtgggaactagaagctcctgcccccctgcgtgggccacagttgctccctggtcttactgtctttctcagtgtaatgcccaaatttccattttctagaatacttcacagcacttagatctttctactcagtccttagtatgggccttattttttcaaaacaagttctagcatgcttcatctcagccatggcttcctgaagtggcaccttcctgcttcatactagcactaaaatgcatctggtggttggattttgtttgtagtgctggccagacgagctgtgcaggagtacatcattacatcaattaaagaagtgctgagaatccacttcaaccgtgcggtggagctaaaggtgagaccctgagcctgggagtctgatgtctggcatgctttctggctctcatggggtgtggtaaaagccctggcctctgctcttggatttttctctctcactctcctcctggtaaactagttttccttggcatctccgttcacatgtcgttttaccctgtgtggtggggctgtgtttgtagaattggaatggtctgtcagaccagaggcagcatagtttggggcaaccttaactgttttgctatccttgacttgctttaataagtgactggggcttatactagactccaggggaaggatacttgtgtctttctgtgctttcaatagaggattctattgaaagagatggattcctgtactgcttatgctatgcccactgacggtatccccttccagatgagatcagaaagctgtgctctaactagtcctggcacgagctaataagatatgtggtgagtgtaaactgcatgccagctctcaaaaaatgcaccagatacagcagtatctcactaataattttttgtagtgactacacattggaatgatgttt

SEQ ID NO: 31134 - DNA, 6040 bp, Mus musculus
agctgcagtttttagccggtctttctctccctcacttagtatcattggcaactgtaatacctacctcacaactaactgatcgccaggacccagggtggaaacgaaaatacacttgcggctgagggctgaggttggacctggagccagccaagagagggtaaattctgagcacgtaatccagggtgaatcctgaagctgtagtctctctctgcagcccctgaatgccttcgagcctcaatggagggcaggtttcttctgctgtctgctaggtcccgctggtgttttctagactccatttacatagcttatgttatggacatcacagtttgtgaactctgtattgtttgttacttgggcttatacttagttccttttttgcaaagaattgttaatataagtgtaatcacctcccttattctgtaatatttcatactcctaacagtgtttgaatatctcattttgtatctgtgcagtattgaatttaaaagccaatttgtacctttgcttggcttgtaggtgctaaacaatactgttttctgatacatatttctttaactgtctgtgtggataacctctgtccctgctttctgtgtctcttgcttgattttgtgaatttcccatgttgcattttgtggcttgggccctctgtgctgtcatcaatactgtgttcataatattcaagtttctgggtccatcctcagtcagcaacccagctaatgatctctggactctgctcggaggtttctacctcaccccacccctctctcatcctctatcgagcctatcagagctcagctgctctatcctgaaggatgtgtggttcactccttccagttatatctccccggtgtggatgggacagaccatcaggaatccatatataccttgcccatttcgtggtctctccctccctcctccctctcccctcctctccttctccctctctctcctccgtcctccctcttccctcctcccttccctcctcccttcctccagcctctctgtacccactcatcctgttgttttcagtgtgtgctttgctgatatttgttgtggtcatgttccccaatgtaactgtgtaaaaagatttgtgtttctttccataacgtgacatttgagaaataggagcaatttagtaagttttcataaagccaaacttaccttatttggagaaacttttatcatgataccaatggatcaaaggagaggagggatgtaaaagtgtcctttccaaaccagtttcctcttagtggacagtaagctcgcggacttagggcttctcacttcagttgtcagtaacagtacttctgagattgtgttttatattcttttctttcttttaaaattcaagttgtgacatttttttcctagtggtatttgtgtgtgtgtgtgtgtgtgtgtgtgtgtttgtgtgtgtgtttgtgtgtgtgtttatgcattgggatcaaaccaagggccttgcccatgtgaaacaaagtcctccaccagcaaggtacatctaagtcctggactaaactttaaagtaaaattttagtccagtcccagtggtgcaggcctttaatcccagcactccagaggcagaggcaagcagatctgtgagttcaagactgcctgatgtacagagtgagttccaggctagtcagagctgcacagtgagaccctgcctcaaaagaaattgcatttaattattattactatttacactctgtcattttcctatatgtattttgctgtaagccatcttaaatccttgatgggatggggtggctcagtgtgttctctttccatcaatagacgtggtagctcttacagtggtagctcttatagtattgctttctcatgtgtctcaccagcatgctctcagatatgatgttcctggtctgtaaccattgttgcaacattttattcaagtccatagtatttcattttaagttttagttcttttgggaatttagtctacaaaattatctttttgtgtatatgatactgggaatgggcctgtggctcatgagcactaggcaagtgtgctctacctctgagctgtattctcagcactcaaattatgttatgtaagtgttaccagatcgagtctggctgctcaccccatgctgggcagataaagttaagagatgtggtactgagggaagagggtgattttattcacaaaccttcgtagaaaggaaggatgggggtgtttggagcctgctcgctggggagctaacttggggtcagtttacactagtgggtgatggctgaccttgggcactctctcgcggtgcgtgggccagagaatgcgcagctctttgctttgtcttgtgttttcatttcttcatgtctcagaaacagagcagtgtttccttggactttacttttcaaattagttccacagcacacagggaaatgactcccggggtggagaggtcctgagccctcccccccccttgtgtaatgagcgaactaggcttcatgatcacgcccccaaccgatagttcaagtggagccttgtcactttactgcacaaacttctctagctctaacacgagaattctctgaggactctcaggaatcgcaaccggtttcctccagccctccccccacctcattctgagaccattatccagtcatttgacttaagacaacaagttattgattgtccttattatcttttcctcattccatggcaaatctgtttccaagtgttggaagttctttccccctcagaaaccttctaaagggtcagttttccttacctctctccaccttcagacactgccctggtgcacacccccacctctccctgccttggtatacacacacacaaaactgtcactgcctttgtgcacacttctcttatgtatttcataggcacattactcaatgatgtccaggttaattgttgagtttttttgtttgttttgtttttgttttttggtatgaggtgctgggtaggctcttatacccatggtagccatggtagccgcatttaaatattgatatagttggcctttgaagatttcatttactctctctcatttatttgttgacacggtctcatgcagcccgggctagtctcgaactcactatgtagctcaggctgggtttgaactccttatcccctggcctctatctcccatgaggtgggggtgtcggtgatgctaccacatctgcctctaaagtggcttgtgtttccctgcttttaaatacgttttacttatttactatacgtgttgtgtttacgttttacttatttactatacgtgttgtgtttaggcttacggatgtagtgatgtgtgtggttcggtgatgtatatgtggaggtcagaggtcgcctccctgttgtcagttctcgccttccatatgtgggaggtggctttagacttgtaatcctgctgctccttaagtgctagggtcacaggtgtgggacacaccaggctctctcctcttctccctgcctccattccagctgcctgatcttttggaagcaaacctaaggatattgcagttctgtttctcctgccgaaattttcatcggcctccatcacgcagggcaagcatcctacgttaggatgcacaggggcagagcaacaggtaaatgggggtaaggaagaagggctgtggcaagctgtcccaacagtggtggttcctcactttgggtttctatccggggatatggacccagatctccatattgttccgtttttcagaagaagccagaaatacagatttttgtgagatatgactttggtgattaggtattaccttttttggttgagttttaggaacaaaaaggttagagtctgctgttgtggaacatgcctataattccagcacttaaaagctggaggcagaaggagccagagttgaaggccagtcttcataacacagtgagttagaggctggcccagctactagaaaccatgactcaaaaaaacaaacaagacagatgccaaaatttccaccaacttgaattttttggaatatatttcatcttattactcttgtttggttggttagttgtttttgtttttcttttgaggcaaggtattctaggctggtcttgaactcagtatgtagtctacattttggatcctcctgcccccacctcctaagtgttgacattactggcatttgctaccatgccccacttactcagtgctagggattgaagatgggacttgatcatgtaagcaagcactctgcctcccgaggcacatcctcaggcctagccctggactcagtctttaaatgctgttgcctcttctgtaaacataatcactacttccctcactgtgcctcaaagcctggcaaaattacaattgtcaagagtcacaataacccttactgaccctgaaaaggtggtttgtagacctccagcttatacctcacgctccatccaaagctttggttttgagcaaaaccattaattattcctcgtggcaatcctgacacttagaagttagaacacttcttgtcagatactgaataagttgattcagaatatgctaattttcattgttttgtttgcttggttttggttttataggttttatgattttgttttgtttttgaaacagggtttctctatgtaatggagccctggctgtcctagactcactctgtagaccaggctggccttgaactcacagaagcctacctgtctctgtcattgcctttgtgccccacactctacctgagtgctgggattaaaggtgtgtgccaccacttctggctctgattttgttttttttttttttatttaaaaaaaaaaaaagtcagggtctcactgtagccctgactggcctggaactcattatgtagaccaggtaggctggaggcatctgctaggtctataggtgttcatgttcaccaccacactcatgatcaccacaaccctcagttcaggtcctttatttaaaaaaaaatgcttacactttctttttttcctattgagggtgctgtatgatgcaagtaattgaatcactgaagtttagagtcaacttctgttcatgaagtgggttgcccatcaaggatgctctccgtcccacatcagtgtgtcccgattttcctcactgtgtttttttatatatatataaatttattatgctagttctttcctgattattttgtgtttgtgttgctattctctatggggatctctctggagtactgctaacttttaagatgaatggttagttgtaataactggagatggcctgtctgtctgaatagaaaatcatagctacaaagtgatgtgttatggagctccatcatttcatgtttaatacaaataaaagtatttttggtatttcttcattagagttagttgttagcttcactctattcttacttgttggaagctgaagacttgataaagtgactcagtcttttaatatcttcacaccttgcatgattgattgcattcaatgtttttataatattgaaacatccttaaatttataataaatcagctctgtgtgactatggcatatactcttggcatttttttttttctgtttgcaattcactgagattcataaataaaactcatttgtatcttatggtatgtatagtgattttctttttaatttttttggtttatgagcaaagtataaattttattttaagtagcagagtttctgtaaattgattgattagttatttgtttgactttttattcagggactcactctgtagcccaggctagactggaattcctgatcctttggcctcacactctcaggggctgggatcacaggtgtggccatcactccctgctccgttttcattttaaaatgcatttatttatttatttatttatttatttatttatttaatgcatatgagtatactgtcactatcttcagatacaccaaaagagggttttggattctattacagatggttgtgagccaccatgttgttgctgggaattgaactcaggacctctggaagagcagtcagtgctcttacccactgagccaactctccagcccccaatgtatgtatttttattgcatgtgcatgaatatttgaatgagtt

SEQ ID NO: 31135 - DNA, 2347 bp, Mus musculus
gattgagtatatggagttagagaaagagaaaggatgcataattagttagaaaggatgtataccatgctgaaaccattctgttgctatttaggaccaaaacattttcagacagtaggtaggcttttacattcccttgctccgttacctaacgacttaaaccagttccttgcttcccccatccctacacattgttcctaagtctgattttacctccccaataccagccagtatcaggtgttcttatagtccttggcgcctttgcatctaattcattggttctagacgaactattctgtcagtttttaccacctagtaggcaatacctgttttgtctaatattcaaagtgcaattcgcgtctagattatccacacaatttcactaattgaaaaatatcaaatttactattataatgtaagagagaaatataggtcataacttcggcacgactttaagtactaagcaataatggagtcgtcagacgcctccgcttaccgtgaaccagtatgagcttgggagaaaggaactggaagaacatgaaaaagcaggggcatgtgtagacattagtgaaaattaacaatgcacgttatttgcaaatgtcagcaattatctgtacatggtaagaacgaaaaataccttcattgaaataaagctacagcacaagacaacttacagattgtgaaacagcgagaatgaagagctacattcttgcagacgagctgtaggtcgtacacgaatgtctaaagagacattcaaaactcgaatagggtgcagagtaatttcttactgtgaggaattgcccaatgtatggaaagatgcatagttggctctcacatgctaaatgccagtagcgccctccttcgcttgaagtcatgacaaccacagtccctactagacctgttcatctttttttttttttttttttttttttttggtgtttttgagacagggtttctctgcgtagtcctagctgtcctggaactcactttgtagaccaggctggcctcgaactcagaaatccgcctgcctctgcctcccgagtgctgggattaaaggcgtgcgccaccacgcccggctctgttcatccttttaaaggtagatcttttataacatcctttgccaccttgagatgatttataggtaatataatctacatttgagtttattcagacttaatttagtgccctacttgtgttataatggaaacttagaaggtcagaactctgtaatggacataaactgttaagtactcaggcatgactacgctatcagctacgaaacatgttaactctcactaggaatagctttggcttaagagtccagcaggggcaacttcctgagatgaatgaagtacaggaaaatgaaagattagagggatgtgtgacggaatacagtattagggttcaccatagcagactctgcgctttatctgtctatggtgaaggatagggcgcaatcactttaattgtaatgatagataaataagacaggacaaactacagtttgtctcagaggaatccaaggattctttttcagacaagttgtaggtcccgcatacatgtccaccaggacattagacagtcgtaaagatgcagaacgaacagtttgtgtgtgggactgacccacccacacacagcagggcacttgttctgcctcaggctgcatctactcagtgccgttaataaactttagatacaaaccaacaaccaccattctccagtatactacagtgggaatcactgatctagttaacggcagcactcttggattaattcaattgttatttctactctttaacaacagaataagccagatccttgactctcaagcccccagtttttaaaaacaaggtgttccttgatttataatccttcttgtttatgctgtgttctttgatttataatccttgtttgctcaataaaaagaaaaaataatttgattcatttgccctcatttggtctgtttatggttctttctttttctaaaatttatttattttatgtatgagtacactgtaactgtcttcagactcaccagaagagggcgccagatccagatccctggatcccattacagatggttgggagccaccatgcagctgctgggaactgaactcaggacctctggaagagcagtcagtgctcttaaccactgagccatctctctagaacaagcaagcaaacaaacaaacaaacaaacaatccactactgacagcagaccgaaaggcaagacaggcatggcgacagctaaggctgcagtggattggcacagctttggattacaaacttcgggagaggtgttagaagccataaacacacttttcctcctctcttggtggtaataatgtt

SEQ ID NO: 31136 - DNA, 1149 bp, Mus musculus
ttctctctgggtttctctttccagctccccacccacatcgcagaggcggggcacacagggacagaagcaaaagcagagaccgcttccatcacaacagtctagaggttctctcaacggtctcacctctgggatctggtccccctagcccagatgtcaccggctgtaaggatcccctggaggatgtgtctgcagatgtcacccagaagttcaagtacctggggactcaggaccgtgcacagctttcctccgtctcatctaaggccgctggtgtccgaggacccagtcaaatgagagcaagccaggagtttttggaggatggggatccagatggcttgttttctaggaatcgttctgattcgtccacaagtcgaacctctgctgctggctttcctctcgttgcggcacaaagaaatgaagctggggccatgaaaatgggcatgccttcaggacaccacgtcgaggtcaagggcaagaacgaggacattgatcgcgtcccgtttttaaatagttatattgatggggtaacaatggaagaagcaacagtctcaggaattctaggtaaaagggccacagacaacggtctggaagaaatgatactatctagcaaccatcagaagagtgtggctaagacccaggatccccagaccgctggcagaatcactgacagtggccaagacacggcattcctgcatagtaaatatgaagaaaacccagcgtggccaggtacatctacccataacggcccaaatggctttagtcaaattatggatgaaacgcctaatgtctctaaaagtagtcccactggttttggcataaaatcagcagtcactggaggaaaagaagcagtctattctggagttcagagtctgagaagccatgtcctggctatgcctggggagaccactactcctgtacagggcagcaataggctgcctccgtcacctctgtcttcttccacaagccacagagttgcagcctctgggagccctggcaagagctccacccatgcctctgtgagcccagccagtgagccctcgaggatgatgatgatgatgtcagaccctgctgagtgtaagtcgcctaggggactccctgggcttgagtgcatagggaaagacaaacacaacaccacggcactgaatcgcctac

SEQ ID NO: 31137 - DNA, 1166 bp, Mus musculus
taaggtggtggcgagcattgacgacactcggcggagagtcccgcttacaggaagcgctcaccaggtctgctctttccggggctgggtggggctgatttgaggacgcctctagtgggccccccaggatgcgtcactctcctcaggctcatcaaaactccacccgagcctcacgaacgtccttacttcctctcttcctggtagcagccttgcagtcccgagctcgggggacctcacgtctagcctggaaccgagggtaccgcgccgcggcggacctgcccgcctaacgtcgctcgcttcccattcgctctcccgcgcggctgactttaaatctgaccccaggacctcgtcgtcgaggtcgggcctcgcgacaccaccgccggagttggaaagcgaaaccgctctgctctgcgagcggcaccgcccgcgtccgcccctgggaccgcgcgtaagtttcgattctccgtgaagccgagtcccgcgcagcggccggagcagcggcagccatagcgcgccatgacggatcccgaggtattctgtttcatcaccaagatcctgtgcgctcacgggggccgcatgaccctggaggaactgctgggtgagatcagcctccccgaagcgcaactctacgagctgctgaaggcagcagggcccgatcgctttgtgctattggagactggagaccaggccgggatcactcggtcggtggtggctactactcgagcccgcgtctgccgtcgcaagtactgccagagaccctgcgacagcctgcacctttgcaagcttaatctgctcggccggtgccactatgcacagtcccagcggtgagtgcagcgggaatggggaaggttctctaattgcctagtccggcgccgcggggcagcttcctaggggaggcgggaaccgggtggatatggctcactcggctgcaaaccccttctccctctatccctcctaatctctagaccagtggttctcagccttcctaatgctgcgaccctttaatacagttcctcaggtttgtgaccctcaaccataaaattattttcgttactactccgtaactgtaattttgctactgttatgaaatgtaatgcaagtatctgtgttttccaatggtcatattcgactcctgtgaagttagacccccaggttgaaaaatctgtagc

SEQ ID NO: 31138 - DNA, 1925 bp, Mus musculus
agtagtagttagttagcttatgagaccactctctgtgagtagcttgttacgttgagacaagctgagtatatggttttaaaaaggtgagtgaaaggaaaaacttggcatctctgaaggtgtgtaagtctcagagttaggtctcccttgtattttaggaaacaaagccagggcagggttcttactatcttctgaatgaacagcaattttgaacataggactgggaaagttttcatgaaatatatatatatgtatattttttctgagacagggtttctctgtgtagccttggctgtcatggaactcactctgtagactaggctggccttgaactcggagatccgcctgcctctgcctcccgagtgctcgtatcaaagatgtgtgcaccactgctcagcatacgtacctgtttatattgcgcacacatgaacacatcgtagggatttattgatacaagtataaagcaggtcctttgaagagacctcctaatggctagcctctccatcatatctcagcctcgtgtctctgagctgtcatcacataaacttcttttttctacaacaaagtattgtcaggcttccatcctactttcagaaaacagacatacatctttttgtgtatcagattacctgcttgtttgtatgctctgtaattttcttctgtaggtctgaggtacacaagctagaacatacagacccatcctcatagagcagggactgcacagaggaggaggtggaggaatttttagaaacaccattaattcttcttccttcccagcctcctgctgcagatggcagatgggagttctgcacagaaaggagagggaaacctgtacagagtaaaacagctgaagcaacaggaccagaggctgaacacagccttcatctctagccagtcccaaggtgttcctcagctctgtatctctgagtcctgggacaagtcttcccgagaagatggccagtgtgccatcttttacattaggatcagatatgattgggccaaagcacaaaacacagtactggtctaacagaactgcaggaaacaaaactgcaccatttccttatgccagagcttcttgtcttgttctggtgttccctctttttcagtagcacctggttctctttgccaaaggtactaggtggatcagatatgactaaacctgctatagttctgtgaatcattcttatgaaacttattttgctttaaatacttggaagcaaaagagtgggatgcagatcaactcctgggagctgttgacatcttcagtgacacactgttcagttccagcttcctgaaagacactcattcacagtcatggacttcccagtgagacattgtgagtttactacttagtagtctctgacattttccttgagagaagacggtctgtccccaacagcagaattttagattactgttaaaagtttttaatctacaggattgagacagaaacatgaaggcttgttaaagagaagcacattcaattctgttaggagggataattgtttctgattgtcttgacagggcatcaagttcgtactgtgttctctcacagatgacagcctggaaaagaagggcttggctggggaatgtgtaatttatacagtctatcatagcaatgtactatttaaaaatagtctgtagtgtatacttaaaaatggaaaaaacacttttacaactatttttgtacaacaaaagaatcacataccactgtactatatttaaattaaaatttattttttggtttttgtcatgtgtgttcatgtttatgcagctgtgttcacgtgtagaggttagaggtcaaactgagtgtcttatctctttccaccttatattttatgaaacatgcctggaaagttaaggtatatgcatatgctagataccatgactacacatttgccaaatctagtggaattatatttaaaata

SEQ ID NO: 31139 - DNA, 1166 bp, Mus musculus
tataaggagtgtgagtgtgaattcctgtcattatccagatgttgaagctgctaacgtgaaagtataatttaataagaaactaagaaaataactttgttctgccatctcccacatgattcttttaattatttcacttatttacataggggattaacttttaaaatgacaaagcctaactaatcttttttttccttcacagagttgtggctctcaattcacacaagtctgaaaaaaagaaaaagcggtataaagattccctttctctggctgccatgatacggaaatttcaaaaagagaaggatgcattgaagaaggaatctacccctaaagtcccagtgaccccatcatcttcctctctgcctaagcccccttgtgtcacaacagcccttggggatgacatcccggacttaggtctgaacagtgctgacccagacctccctatttttgttagcacaaatgaacatgaactgtttcaggaagctgaaaatgccctagagatgctagatgattttgactttgacagattactggatgctacttctgacggaagtcccctctctgagtcagggggagaaaatggaaataccacccatcccaccttcccctctcaggttgtgcccaaggtggtacctacacttccagagggtctacccgtgcttcttgagaaacgcattgaggaccttcgtgtagtaagtgtaatgatgcttttgctttttatttgctacacaaactcttagtctgtagttttaagacaaaaacagcccacagtctcaacttgctgttttccataatctgttttagatgctggctatgtacatagatgcattatggaaatgtacctgaagttacttggtggaagctattttaacatgtagctgttttattttattatatatttttccaattccaagggatcaaatcctgggtttcatataacctagtcaagagtcctgccaccatgttggacaggagtggagagaacaggcattcttgtcttgttcctgatttttgtggaaatgctttcagtttatctctttttaacatagttggctgtggatttgttgtcttttactactattatgttgagatctgtctcctgtatccctagtttctgaaattagaggcttttgccaccatgcctggtctgttattgctgttgctacata

SEQ ID NO: 31140 - DNA, 1276 bp, Mus musculus
ggcatatgatttttatatcagtacttgggaggcagaggcacatatatctttgtgagttcaaggtcagcctagtctacagaaggagtaccaaaacaggcaaagctataaacagacctatatcagaacaaacaaaataaccaaaaattaataattttagtcatcataagaatttcttagccttttaaaaactaaatttaaaatttgtaaattaactgtatttttttttctaatataatgctacttatgctaggaatgtagccccaaaaaagaccccaaagctcctgcatccgtggtggcttcaggtggcggtccttccacgagctccagcacatccatcgttgcctcagccagctctagctcagcaccagcccaagaaaccatctgccttgatgactccctcgatgaagacctttctttcccctcagcctcactggatcttgtatctgaagctctagctgtcatcaacaatgggaacaagggcccctcagttggttcaaggctaaatgtgccaactacaaaacctcgtccaggactgagagaagaaaagctagcaagtatcatgagtaagttaccactggctactcccaaaaaactagattctactcagactgctcactcatcaagtcttattgctggtcacacggggccagtaccaaagaaaccccaggatttagctcatactggtatttcttcaggccttattgctggttcttcaattcagaaccctaaagtttccttagaacctttgccagccaggctactccagcaaggactgcaaaggtcaagccagatacatgcttcttcctcttcacagactcatgtctcctcctcccaagcccaagctgctgcctcctctcatgctctgggaacatcagaggcccaagatgcttcttcgttaacacaagtcacaaaggtgcaccagcactcagctgtccagcagaactatgtgtctccattgcaagccaccattagtaaatcacagaccaacccagtggtgaaattaagtaataacccccaactttcctgttcgtcccaactactcaagacttcagataagccactgatgtatcgcctccctttgtctaccccatcacctggaaatggttctcaggggccccaccccctagtttctaggacagcaccgagtaccactacctccagtaactatttagccaaggctatggtgtcacaaatctccacgcagggtttcaaatctcccttctcaatggctgcatctcccaaacttgccgcatctcccaaacctgccacatctccc

SEQ ID NO: 31141 - DNA, 1199 bp, Mus musculus
agggagcactaggtgaggacagcagtgcaggccttgtgccagaggtgtgaacctgcagagtcccagtggaagtggctggaatgacttcctagtgactcgcggagaagcagagaaggggaaatgtaggttttggactttgagacttaccagcaagaatgggcattgaacatctaagccgcagactacagtactgacaaacgagctgtgtacacagaaatactcaactatcacttgcaaactttcagaaccattattagtaactctttggattatatttttcacctcagtcttaatttccttgatttgttagaacaaataaagagacagtcttgcatccatgaatatgttaaatcaatttagggacattgctttatttcttatctgttttgacccctggtttctacacagtccacagcaggagcatcattattggctaatgcctcacctctgactctcatgacatcacctttgtctgtaacaaatcaaactgtgactccttttgggatgctgggtggccttgttccagtgaccatgcccttccagtttcccttggagctacttggctttggaacggacacagctggagtgacagccacctcgggatctacctcagcggctctccatcacagcctaacccagagtaagtgctgctctactttaaatgggatgaaccatctaataccatattgctattgaaatgcaacatgtaagagaaagtcaaagtttgggggtttcttattataatcatgactgtatctccataagttaatgttttaagtatgtgtgctgtgatattagaaagcccttggcgctgggacttacactggtgttagctaaggcattatttctaagtttgatccaaggggttcacatcttgagatcactgaccagtgtgttttcctctcagatttactaaagagtttacagccaggagctcagcacgcggcagcccttcctcactctcctctgcctgctcacttacagcaagcgtttaacggtaagcaagctgctcattcctactgtctataagagtttagagatgctgcgtaaatgttcctcaagtggggggagtggagtgacaaaacgccagggaagtgtttcctttgactgcctcctcagtggagtggagtgacacaacaccagggaagtgtttcctttgactgccttctcagtggcagcagcacgttgaagaaaaagga

SEQ ID NO: 31142 - DNA, 1102 bp, Mus musculus
aatcctagaattcaggaagctgaggcaggaagatctcaggtttgaggccagcctgaagtatttagcagcaagtcccatgctagtctctactggactaacaatgagagctgtctgtttccaactgtcttattgtcttttaatgttcaattaattaaaaatctattggacttccatatcaggtgtccctgacagcaagttcttcaatgtcacttgctgccatatgaaaataatctttaaaaagttcataaagttcttcaaaaaactggggccccttgctccaggctccttcgcgcctcttctccttccggtttggtgcagaatgggttgtgagctgtgtttttttctttttgtcctcttttgttactaacatttttctttttctttttttcctttttcttttttaaaataaaaagcatagatttcccctccttacccctccttttacaatggtctcttctccgctctaagtcctcccacttcctagttcaagtttcatttgtgccccgactgcccccctccctgccccattgcattgtttgtgtgcggcacctgcagtagaaaatcccagctctccaggtcggtctgggagctcctccaccctcctcctgtctcaaaaaagaaaaagaaaaaaaaagagagagaaaagaaaaaaggaaaacaaacgaaagtaatcactgatataatttcttgactgtagaaatttactttaccaataaaacaaatgaggaggctatgtaagccccagtagatattttggaaagatattgggatgttgcagagaagtttgacttgaatttagcacgttaaggttcatttgaaaggtctcttagagaaacttgatcagctcttacgccagcaccaggaaacttcgtttcacaggcctgcttatacttcataaattgctgtactggggtgtctgttgaggaaggcagcctgtacttcattttctctacccagagagaagtccatgtgtgttagtgtctcttcttgctgatacttgtgtatttgtgtatttgcagacacatacatattcatataaatcaatcgatattaaaagtcaaacaataattgtaggttcttaaatccatcgattctgaaccat

SEQ ID NO: 31143 - DNA, 1377 bp, Mus musculus
cagcacacgtaggtcccattcgatggggtccttgattcaggaatattaaactgtctgtttccaactgtcttatctttgaaattgccttcactgatgtgatgtctaagctgttactgtatataaaggtgatcctcagtattcacaagcaataacagtcagcagcgctgtcctcgggcagcagtgctggaccacagctggagactgtttgcgagccaagtgtcatgctcactcagagcctccaaagtaaatgcaagcaataatctctactaaaatcaaattatagttcttctcctgcttctgagaacaaagagtgaaaatcatgattttaaaacaatctggagaaaaggtttggagaaaagaagccaagttaatgtataataacaaagtcctgatattttgaagaaatcaagaagattcaattagtacattctttcatgcccaccacccctttgatggatgttattagcccaaattatcttgttttgtgtcataaacaataaataaggcttatttgggtcccagcactggggaaagaactgggcatatacctgtgggtatatattgactgtgggtttgacacctgcttggaaacagcttattgaaagtgatcttaatccagaatattttttcccaaagcagatctaaattgtttactatgcagagatggaaagggtaggcacccctattctctctcctcttgttgtcctctcccacagcccttcccacctctccttgattcaagactttctaaaatgaaaatcctactgttattgcgactgccattggttatgagaactctgttctttgggaatgtctctagaactcattgtcctacttgctgctacattggaagatgatctttgcctgtgttggctgactttaactgctttatttgtaggagactttgtcatgtcctttgaccctgtgtagaagaactagggtactttactttaggagtgtactataaaagcacactggtcctcgtattgttagagaagtttgggatttgttccccttgttggtttttgttttgttttatttttcaaattgaaagtagaagaaagaagtctatagtccaggccggacttgagcactgccctgtgcttcagcacggtgcttctgctgacccacgttctctgaagggcactttgatttctagttgtgcatgtgcggctctttgtttggttttgctttcagggtgcttttggttttgtaaaaacaaagcagagaaaagtacagtagtagataaatgatcacaaacatgttatgcaattttattttataaagttttaagggaaaagtttatctcgttgtaaataagttcttatctctggtaaaatgcttatattactcctctaaaccatgctcaattcaggc

SEQ ID NO: 31144 - DNA, 1201 bp, Mus musculus
attcagatgggcagattgggaagtagtctttgcacatgatgctggcttccctttctgaatatctgtagaagttaatatatatgtgtgtgtgtgtgtgtgtgtgtgtgtgtgtgtgtgtgtgtgtatatatatatatatgtagggcattatatatataaagcatatgtgttggttattgcaaacataataaactctgtggactccttgactatttctggatgtaatccacttctctctacccctcaaatctttcagtagtagtgtgtgagaaagcatcaggataacaagagcatttgttggtcgaggtgatacgatgccctatgcagacaagattcagtactagtgctagaaccatggggtggtgtctgaatacactttggaggaggttggcactcatgtcaatattaaaagacgttttcttctggaaaatgatcttgaaattgtatatctgaaacgtcaataaacttagatttttagacagtgaggaaacacttgtataatcaggacgtacttgagaaatgttcagtctgtttattgccagatgatcagatttgctctgatttcatgattgtttaaatgtctttcctgagcaaaataaaataactttcagtatctaagacttgaggggggggttctgttttgtttttgtttttagatgtaacatgttgaaaaagactaagttgaactgatcctctgtatatctacaaaggacccccttttaagtaaaattttagttgaaaaaggagacttgtggctaaaagaagaggttcctgtagcaaagctgttgttagccagcttaggatcagtagtgagtgttaattcctaaactactttatctagggggaagtcatttaacctttgtgcctcagattacccatgagacaattgggtataataataatcacctacctcccagggatatcagagactttactatttcaaaaatattttgtttttctaaaacattctatataattatagtattatcttcctgcagaggttgaaaaaaacaaatgtttttcttatagtggatataaagagcaccctatggtctttaagttaaaaaaaatcactggaattttaatttagatgtatatttgatatttaaacataccatatttgttgtgtggtataattattagtttcagattaaatcaaaggggaatgaacactaagtttcttaactatcaatagatttttt

SEQ ID NO: 31145 - DNA, 2737 bp, Mus musculus
cttcatttctttcagtcttcagtcttgcctttggtgtgagctcttaagttcccacttgctccactacagtataaattacctgttgttatatctagggagagaaagtgaattgtttccatatcctcttctcccttactttgccatctgctctcagttcccatcaagttagtgtaaagatagtgtggggagagtttcatcttagtggaggatacatatatatatagagagagtttagtggaaatacctttgagtagcctgatgctaaatgacacttttcttatgcacactcaacgtaccatttgctttaaggtggctatttgtgatctccttgtgttgtgatgtttctacttgtctgtctttcctatgtatttccatttcatagcagctagtattcaaactttgtatacattttacactgctacccaaactagtcagtgacgtgttttgaagttttcatggtacaaattaaggttctatacatagtgtagaacttggtggtcactgatgactggggtttcttctcttttcatttatattcaataaataaatagatttcataggctgagagtctgtctcactgggcactcttgcccagcatgtacgtaagctagagctccacacagcagtgcacagtaacagtaagtagacttcatttttacatagcctgggataccagtgtattttacatagcctgggataccagtgtattttacatagcctgggataccagtgtattttacatagcctgggataccagtgtattttaagattcttcagaagaaatgcagattttcattaggggctcacagcagtctgccttgctgactgttttcatacagactccttacaacagagctcttttgccaaggtctgagccaaccagatcattgaatcctagttaggacctaagtcctaattttaggttcctcaaaagaaaaacattacttgccccgactttgctacaatattctggatttgtttgtttgtttgtttgctaaatctggttgttagatccttgttaatagtgctctggttagaattcagttaaggttatttgtctgagataacacgagagtcagcagcagtccagactagccactgtgtgtgtgataatctgtgctgaagtttccacaccagattgtattttctgtacttagaaccatagactttcctcctgttatacttatctctgctgtttacagaaacgttatgccctactagaaaattcactagcaaaattaccaaggatttgcccccatttgggctagaaatataaaaagaaaaaaaatatttttcttagttgacaaaagtatttggtttaaatagttagaaagttgagccagctttggtcagttttcctggcattttggctctgactccatcatagattgcgtgtacactttgacatgtgttcatcagggaccctctcccagtaaagattggttttcctcccacacagctttcaggacagagagccaagcttttcagtgacctgttttcagctgtctttgaaagactatcttattctagaaaatgctggcgtgctaaactgttcttggaagagagtgtgctagtttgaccctcctcatggtgtctcttgtcctgttaaacttatcagacttcaaggaaaggaagagaaatctctggtgaattttgtgccccaaataatgaacttaagtctaaccaaggtgactaagagatgggtgttttctctctctactcgtgagcaaggtttatttatggttgtaagacttaccatggaactgcagacctatttgcccagaaaataagagtcagaattttagtcatgttaagcacagatttcgaaccctttggtaaagttagataaggggagacttttgtttagtagcagaaggaaaaataattatttatacagtgagtatccaccctgcaaagccacttcccagtatggaagcagctcctctttagtcccttctgccctacacagatgctaccatgtttgcaagccagtctccaagaaggagccgaggagttgatggtcctttagaggagaggcctcagttactgggttgcatctgcttgtaggaaagtgtgtttgctaacttgaaggaatatatgctgtacttcaaataagtgtgtgacttaatgctttgggattttttttccctctaaaactggacctgaacacagctttgagttggtatttgtaataatctcaggacccgaaagattgtagcatttagtgtgtcttaaaaattatgtactgtaccagccatggagttttgtaaatatacctgtctccctttttttgtattattttagtaaacaataaataaataaataaatttaataaaagggggtgatgatgatgtgtgtgtttgtgtgtgtgtgtgactgactctgtgtgtgtgtgtgtgtgtgtgtgtgtgtgtggctcttttggaggcaaactggtgcttgttgaatttctagttcagttcagcaggaatatagacaaactgctgctgttgacccttacaatgagcaaggaggaggtccttcattttgccctctggtggttcatgtagtactagcaaaatggaagtcaggagctaaactcttctcctctggccatattgcctttgtgttcttggtctagctccaacattctttgacctctggcattaaagcttccacactttgaagattcctggttttagagctcttaaaactttcctaagagagagagagagagaaaaagggggggctgattata

SEQ ID NO: 31146 - DNA, 1130 bp, Mus musculus
cgaaaaacaacaataaacaaacagaaaaacaaaacaaaactagagaactggatgtgaggctttactagtaaaggggctgcagtttgccataccagggtatgagttcattttcttctcctaggctgcggggaccataaagttggaggtcggtacgtttaattttgacatccctggtagaaacagtaagatctttttggcgtgacctatgtccagacatccacatactctcctgccagacacctttcctcagagactcggcggccatcagcttacggcagtccaaagggacgcagtcagaagggccgagaggattcggcaccttcccttgctctcctggtcccctgaggtgcctgtcactcgcgtttccctccaagggtggtcggtagagggcgctgtggggcggagtgggcgggggaacacctcgcccgaggcagtgagggaccaggctctccaaggacagaaaaatggcggccctggggtccccggcgcgcactctgcggggccttctgagggagctgcgctacctgaacgcggccaccgggcggccatatcgcgacacagcggcctaccggtacctcgttaaggctttccgagcacatcgggtacggcatccgcggctgggtgggctccaggtcgcgggagggcggatgagggggcggtctgcgcaggtgatagagggtctcaggacaaacgtgtctgagtcaccctgtcctccacctgcgggtctcaccacagactccagcccttcggctaacctgcggtctgaaatcccctactggcccagaagccgcgtggggcgcaccttcctagggacttcgtatctgccacccaccggggtggagctgtctctgacgatttcattggtttgtctggtgcatggggtgtggaatggagtaaggagcgggcgttgtgtgaagtgggtcctaggggtcgtaagacttaaaggcgtaagggtacaagcatcccctctcctcatcctttctacattaaagttttaataggaagcagtgtttttgtgatttgacgggtgtgtgtgtgtgtgtgtgtgtaggtgtgtgtgcgcgcgcctgctcgcgcgcgtgcttttgcttgcttgcgtgttggtggggaatgaagatacagaatttcag

SEQ ID NO: 31147 - DNA, 1084 bp, Mus musculus
tagagctccagtcttgggcttttgttatctccagtcacaattttctctgggcttatacttgttaaatcagtattgttaaaaaaaaaaacaaaaacaaaatcaaaataaaaaaaaacacaaacaaaacaaaaacccgagcactctgattttgttcacttttgtttttatatgcaagaatctttacagtcaacatgtacttctaggtgctgtattgaaattgctggcagagtctattctatacaaactgaacaatctggccccttgttttatttgtaaaggttcaatgtatctatgcctgcctacttcaatctgcaagggagtttcagaaaggccccgcattcgccgagccgtgagttatcactaacttttcagatgtgttaatgaatgtggaacagaagcagttgtgtttaaaaggaagtaaaagaccaccaaagtatcctatattatagtagcaggcttgaacattaaatggattattccaaattgtgtcacaaataacctactagagactagcctcagaaaacctattgttgaactgctctgaagctatgattttaggaatattatcttaaaaatgtatgtgtcctagttgcaaattagaatgttctttaaatcttcttaatcaagttaaaacaatttgaacaaaatcttaccccacggtgtttagttggattaagttaaactctacaatataagacgacttgcaaggggtaaagttggaatttttgtttgtttgttattcacatgtgaaaatgtagaacttaatttaagaattacttcctagttgaaatgtttggagtgttctaggtatgtgaactgcagaagtttttacaatctcctttggtttgtttcagttgttttttgcttcagtaattcatcagtaggttttcctttaacagtgataccaatttaaggctaaactacattttttagggcacaccattctgcatagaggaaactacccttgtgagtttttcttttatttcttcagaaattctaagcaaaaaaaaaaaaattgtaactaacatttgtattttgttactctagttagctacctttcctttctctagagtctttaaacttt

SEQ ID NO: 31148 - DNA, 1207 bp, Mus musculus
taaatataaggtatgattagttaaattttgcctgctttatatcagttctttcaaatcttttgaattttttcaaaatctttatctagtgaatgtcctattttttagggtactatacaaaatgattgttcgtatattttgttttgtacatatgtaggttattggcaaaaaagcaaggttggctgagtcattttagtttctagatatacaagtaagtctcagattgctgtagaagatgctctaatttcgttgttacattagttggtttttgtttttctttggaggtagaaggaagacactgactgattactggcccctaacttgcagtcttcatgtctcagtgtttcaaatgctatgattgcaggaacgttccactaaatgtgtttgtaatactactacaattctgcttcctccacacctgcctctttcctccctcctttccttccccgatttgtcgtttgtctgtctgccatgagatcctctaacctgagactttttaagattaatttttcttttgtgagtttgttgtttttgttgtttttcttgagacagggtttctctgaatagctctggctgtcctggaactctctttgtagaccaggctggccttgaactcaggcagctgcctctgtctcccaagtgctgggattaaaggcgtgcgccaccaccacactgcatctgttgtattttatctgcatgtatatctgtgtaccacatgcatgcctggtgctggatgagggtgtcatagcaaaaagagggtgtcacacctcctgtaactatagttgcagatcattgttagctgccatgtcggtgctgagaacagaaccaagtcctgtgaaagagcaaccactgagccatctcatcagcccagaaaaatgtttctcatgaggatgcatttaaaatgaatctaatgagtggtaaacaacgcagctatggcagcaaatatctataaccctaacatctcaagagtatcaggctggagctggagagatggctcagtgatagcctgagttcagatccccaggattggtaggagagaatcagttcccacatgttggtctctgtcctccacatttactccatggcaagtgtctgtgcatgtgaacaaagaaaataaaatataataaaacaagaaaggccatcacattccaaaaagaatcatagttttcgtccccttctgccccccttttttggtttgtgtttttcctct

SEQ ID NO: 31149 - DNA, 1159 bp, Mus musculus
aaaccaaagattaagctgttatttttttgctttgtcaattccttactgacttcaaactattagaatattattttcatgacaattacagtagattgtatccagctatttttatctgtattatcgtagccaaagctacatagggatttggaaactatattattaactgctttgaacaaaaaacaagaaaccccccccaggattgtattagtaaaggaaaagaggatagtgggttggcaaatttaccaatgtatattaagaataccatttaaatgaaatgtatgagtacaaatcatctgagtcctgatgaagataacctttcatctgttgtcttggcatcacagggagatggaatgtaaaggatagtttaagccttgacctccaacagagctgccactcaaaggatttactatattttcttacattgttttaagaacatttgtgtgagcattgtttttcttccttttgtttaggaagtttatcggaactctatgccagcttccagcttccagcagcagaaacttcgtgtctgcgaggtctgctctgcgtatttaggtcttcatgacaatgacaggcgactggctgatcattttgggggtaaattgcacctgggatttattgaaataagagagaagctggaagaattaaaggtacattgtttaaattaatgcccctcactttatcttgcgtaacctgattcttttggtctgtattggttttttttcttttttctttttcccctcggtttcattgataaggctttggcttcttcttcttttttttttttttttttgcacctctggctgatcttgaacttctggtagtcctcttgtctcagtctccctgtactgtaattagttaggctttgaatggtattgtttattctgatttggcggtattgagactctgttgacaatgtagtataataccattattattaattacattattaaatgtcattgaggaatgatgtgggtgggactagagtttagtagcatacttgcttttcctgcttgtaaaaaaatcgtcgtggtgaaacaagaggttttgcatgttttctacaattctggaaaaacaattctagaagtctaataattgtagcacctcacaaaattttaaattatattaatgctaattgtactatgtgggaagccagatatgg

SEQ ID NO: 31150 - DNA, 1089 bp, Mus musculus
taatccacagtataaatcatacattttcatgttcacctttagtgtaatgggaatattctgagtttggaggaagctacaaaacaccttagtatagcaggaaacttcaaaagatgcaatgagagcagacattaattatatagtgagagctaacaaagggttagaatatagtggagctgtttaattcccaaaattcaggtcacataatcctatggagcataaactatacttaaaattactttttccctccttgacaactattattaggtaaatataggagaaaaactcggaaaccctagttactagtcttaaattttctttggcttactccacataaattaaacccacagaaagctgacaaaatctttgttagactgagttaccctttccctgaaatcacaagctgagtttcttaataggctttcaatcagctttttattttgtgtatttctgtctatgttcttagtagcccttaaagtgatttttaactaggtagggatttgtgtgtgtgtgtgtgtgtgtgtgtccttgtgtctctgtgtgtgtctgttggggggagggcttgcgggagaggtcaggaggccaagctcttgagtagctcaaattgacctcatattcatcctttagcctcagcttcctcttgagtgctgggattataggtatatgacaccctgcctggctttatgaattagatactttcctctgtgctaggcttgttaaaaaatagccaagtaatagtagtgtatataaacaaccatttttatgttgctctatggagttttctgtgtgggagaatacttagccacagattataaagtgataaactgaatatcataggataaataacataaatttagatgaggaaaattttcagaaagattctttaaaactggtttgaggtaatggatcaggcttgaataactggttgtaattaaacaagtatggaaatacctgtaggcttcttacatttcaaaactgggtttgtcctcagtgcagtggccagaaacattttttttttggtagtgttctttatgattctaaatctgcacactaaatctgagaatcgggtggtttaggcaataaaggatctag

SEQ ID NO: 31151 - DNA, 1173 bp, Mus musculus
tgtgagtttagtttttgatggtaaaaaaagtccattaaaagtcttggcagtttgctgttttcttgcccttgctgtgaagtacttatatctctgttactacaagtaggttgtctatatgaaccttgtcttggcaacagttcccataggtcagtgaggaccttcagcaattttgtgcttttgggggtgttctgtcctatagtagacttcaaagtcacactacttgggttcagaattctttgccaaataatttaattacatcccgttgtttttccatatttcattagagataatagagacatttggcttattaggctttcactagtaacaagtaacaaatggtgtgtaggaggatatttgtaatcttgtacaaacattagttcatgtctttgttctttttcagttatcactgacctcagggacttgccagcatctaatgtcatgttcttagtgatcatttctatcattaatagaagctttgaagatggcttgtgtagacttggaatgtggttattattatttttccttgtataatgcttattaagcaggggctcctgaaatgataacttttgaggggctgaggctcaggaggcttgtcataaattgaggccagcttgggctagggagagagaacttgattccaaaaacaaaaggggaaaaaggcttatataacttcaagtagaatgcttgaaattggtgttgatttttcaagctttttaaatcttaatttctgttgccatagttttgtattacgacaaagtatttgaaaacaatttgtgggctggtgagatggctcagtgggtaagagcacccgactgctcttccgaaggtccgaagttcaaatcccagcaaccacatggtggctcacaaccatccgtaatgagatctgactccctcttctggagtgtctgaagacagctcagtgtacttatatacaataaaaataaataaatctttaaaaaaaataaataaagtgaaaagtttaaaaaaaaaaaaagaaaacaatttgtgagaaggaaggtctttatttttagctcacacttttgtgaagtgaaaatgagatttcagttcatggccacttttttgttgttgttttttttaagacagggtttctctgtatatccctggctgtcctggaactctgtagaccaggctggcctcgaactcagaaatccg

SEQ ID NO: 31152 - DNA, 1129 bp, Mus musculus
caatatacaaagccttataccaatgtaataaaatacacaaatgtaacaaagtataaccttaattttgtatcaatattcataaatccatattaatgtaagattatggctataagcagttttttggtttattcaggagtagatttagcaatctatctttcctattattcctgtaatagtcctatattcccccccttttctgttttcagcccttctccccctacataagaaaaaaaggataaaagaaaagggaaatcctcgaatttaacctcctataccatgttttctcactggtcaagaccatttagtaactgtaccaagccctttataataataagcatcctccactcataagaactaccaaaacatacccacatcagcttaatggaatgggactttgttatattaaaatggcttcctgtttatttggggcatagtatttctttcttggaggccaaggagatttggagaatggttagtcttaggaaagctagttgtagcatttgttgtccagtctctgtactctgagaaagtttaggcataagtgaaatcctgactgaatcagaatgtagatggatgaattgaggtcatctggggtcaacagctttctttgaagctattctggaagtcttttgaacaaacaacattgaggcagtttggggtagtatcaggtgtctcagtatccctaagggtgaatcttgtcaaggccactattttcagtgttatttttttgtggacatataatcttttacaaagttgtgtattaacatatgtatggaatgtgcaaggtgcacattgcaattagctaaggaccaatattcttttctctttatttgagcaggtaaaagacatctgtttttcttaggctaatttggattgtaaagaaatggcaatataaattctgtgccataaaagaatgccatggtaagccttaggatgttgtagctaacaatatttatagactatacacggatatttaagtctcagtcagtctcagagctgtttcatatagagagctcaacatatacattacctttttttaaatttccttttctgtggttgagatcctcaggagggtcaccccccccccccttacctgatttctatcaatttggaagaactccagggtttt

SEQ ID NO: 31153 - DNA, 3407 bp, Mus musculus
ctggtctagccttttttgaaatcatgtagccagcttgatcttgtgatttaaaagacaatgaattgttccctgtgggctgaaagtaaggattgacgcataccctggtcactgttgcctaagtgaattctgagaataaaattctcatcattacaccagaagtgaaaccaagaagagatgatgatgtctgcgtgtcataatcagcatgctgttcaagtgcacagagcatgtttctctaggtaacgtgccctctgagttctccactatcaagtaaatgacacaactgactgtagatactcatacagacttctggctacattttatagttaaagtattttatagtttacatttaatctggtactttttaaaaagaaaattgtttataactgacatcttcaaccacagcgattgactgactcttgttttagaagctgtctccccaaggcaggcatgttccactcatgctgtgccacagcctgatgcatgtgtttcccttattgttgctttccagtgaacctgaaagaatgtgaaaggaagtcaagagggaatgggaaagggcgagtcctgaacctgggccatccgcagagtccggtgccgtgtgcgccagagcttggaggggcggtgagactgatccccgccgcctcaccaacactgtcttgatatgaatgcttcctttgtgaccgggccactcacctggcagtaggtgatgccggcactcagcagctctgcaggtctggatgctgctcctgggtccgcagtgaaccttggtcagcattttgagagggagaacaatacccctgtgcccatgttcactggctggattttccacgtgttgctggttttgtcagtttttttttttctttaaaacaaaccccatgtaaaataatgtgtactttaattcacccattgcctggctaagatgtgaaactcagttcagaagatggcttcagagccaaagggcaggggtgggcagtgcgggatggtcctggagacagagggctttgcagggatggaagcaggcttcagagacatgagcaagagaagacaggaaatgtcaatttccctgacagttttgtaaggtttgggttgggtttttactggggtattttgttatgttgtgtctttacgacaggttcttaccatgtatccctggctggtctagaactcacaatgtgaactgggttttgtttggttttggttttctcttgtgccaccactgaactgtggaggacccgtggcgacctgtggtgactcctcaccgcccatgtttggtttgcgctcacagcatgctcttgtgtatgttgaatgtccttgtagaatgttgttctcacgcttcttagtcatatcctaggcgtgtgcgtgtgtgtgtgtgtgtgtgtgtgtgtgtgtgtgtgtgtgtgtgtgtgtgtgatttgctttgcactaataaaccaaatgaattttgtctcattgtctttgaagctaacccatgtttttaaaagtgagaggtatggaaatgggcttttcattattatttgaaaagtaaattcactgtagcataaaaataaaaagggctctgctgtcttctctttagttccctctcaaccaatttccaaatgactctcctggccccatccccacctctggctccccaccgcagatccatgctcaggcactcaggactcccagaaagctcagctctgggagccatgcccctgctcgctgcccgcctgcccgcccgcccgcccgcccggctgttggtccatggattgctcacgctgtcagtactctggctcaggttatgaggaaggacgtggaagttgaaagtgacttaactgtgccatcctctagctttctatgactctgacacacacacacacacacacacacacacacacacacacacacacacacaccatgtgcccttcaaagcagaagtcctattcacactgcctccaagtctgttggcttcctgccctccacatccctctcttgtgttactgcccatttaacgctggctttcttccatgggttacctaggacacaatcatttatagcccccaaagcacccttcacccctttaagtgtgtattttaaccaaatgaagttgacaagaaaggcatatgttggggctgcaggattcctagtgtagtagaagcattgtatagatagagatgttgatatatatgtttgtgtatatatatatcaagccaaatttctgatagaaaagtatagctttatggatgagaaggaaaaggagccctctagaggttggagccagcctcgatgtgtccaatgagcaagacacgccgtgcttcacgcgcagctaaggccccaggacccggccctggcctcacctctgcaaagctggggggccccgaaggctctgctgctctctgtgggtccccagcaatgaaggcataggagagtgaggagacagagatcataaggactggaatttttcatccctttttgctctggccacctgttttgagctacagcctgattatatcacatttccaaaaagtagtaccatgaagatggcgagagagatctgtcacaatgcttagctttcgactgcctgtggcttcaggatgctcaggacagaaagacacactccccaaaacaagaacatggagaaggagacctggcagtacccatccccaaggccaaggaatgaggctccctcccccaggtcatctcacctagatctttctcccccaggtcatctcagctcagtcttgatagcctctggaaagccctggcctgtcgtgttccttcactgtgtggtttctgtaataaagtgttaatccatgttaacctgtgtggggattatcgcgtgcaacagtattttctcgtgtacctctttctcctctgtgacgtgtccctcttttttttatttataaatgtctaatttggttttttttttttaaggacaaaccagtgtgtcgtagacctctatgtaacctgctccttagtctcattataggtatgttataaggatggatattttacttggctttagaatgtttttcaagaaaactaattcttaactgatgaagttgttgctactaaaatgcttgttttcatcatgacgtcgtgcgcttctaaattaatcatcattttcgttgtagaaaaatggagtgaatttatattagtcttggaaactaataatagcattgtaaatttatgagatgattttaacagaaaaattatagaagaatatagttattttaattgtaatattactaactgtagggtgaggcggggtcctgttgtggtgaactgttatagcttgttactcagtttctttttgatcattttctcggtctctgaggtgaagcgagttattaattgaatctgtaaactcacatatgcatattgtatatgtgtagcgatgtgatcacactgtcttggaattacattaaact

SEQ ID NO: 31154 - DNA, 1815 bp, Mus musculus
tgattcagaggaaaagggggcgagtggccagtgtccctgactgtattgcgttctccccttcctcgtaacaaagttgtttgcagctgtaaaagccagcctggcttggttctctttgtctaagaactggaactgagcagccagcgtagagcaggtcaggaagggaggttagcccagcagacaggagctccctggactgcgtctcagatgttgcaaacactcattttgaacagtgtgtggtggaggagtgggttgggtgatgtgagtggagtttacgttcttggaaaccagagtgaggtgcctaggaggcttagggaagtattgctgctggttcatgatgatgatggtagctgggtccccacctgcccctccctcccccgggttctcaacatctggctaagggagggtaggttgtgggcgtggctcttgctggcctgccatgtagctgctaggacagaaaacagaaagaagattgctctgtgccctcagctagcagacagaattccataaggcaagctctcctttcatggcccagcctgagactgcacacacacacacacacacacacacacacacacacaccccaccagctactggatcacagcacactccatcctgggtctcacaggctttgcccctcactcatgtttttccctcttatttgctttacaaattttcagtggagaagcctaaagattaagcaagcctgagatgtccttaccaaattggaaaggaaaggaaagctgtcccttcctatagccaaagaaccctcacaaagacatctggagatggacagatgcattccctggtcctttctgggcaatatgacttcagtgaccttccatttaccttacctttctatcctgccttttttttttttcattgcagttatttcaaaaccactcatcttcaaagaggagtggagtagtggccctaaatgttgctactccaaggaactgatatccctctagcactcctttgtgattaattgatctcatgctactgtgggaagctagaaaacaagcaagcaaccttctctgatgaccccacactgtatcccaggctgagaatgtgtaggacgggctggcaatggcagtatcggcccacttgccttagtctccacaaacagacccagacaagtcggtcaagccactagagaaccaaagatggcaagataaggcttaattgcaaaaggaacctcatgaactttggcactatggctcactgtagtaaccgcccgaggaaaggtttcccgagtctttggggtagctcctgagaagtagctccaaccagaagctcagagctgccagaaaagaggtcctggaggttccctgtcacagaacctccatgctgcctgacttctaagctagaacccctccctgccccaatcctttgagtgtccctcatcacagacccatccaggagagcattatactaattgtctcttgctgcacaagagcagtgtccctcatggaaggactcactgacatttgttgagtatccacacacaatatgccaagccctttctccatgtcccctcagagatccatccatgggaagaagtcaacacccactatgtgacagatagaaaagctggccctctgaggaagtggcatgtgtgaaaggggaacacgatgcatctcagagcccccaggttctggttttcttaatccgatgttcccactccctgtatgccaaacactgtgctaagaattgctgacgagccctaggacagcagccgtgcaggacctgtgcagaggaggcgcctggcttgcagaccccggggcctgcccaggccacctagctaataagaaggga

SEQ ID NO: 31155 - DNA, 1220 bp, Mus musculus
aaattaacctagctctccctagacagtttgatctctgcctgtgagagagagaatgagctgagggctggaggggcactagtggggtggccagagatccattgcactgagaaaacaccgccatggacaactaaggctccaaagaaatccaccctgagcctgtgcacctttgttgcattccgcatactttctccagccttgaacagtggagtgagtgggtaggagttctctgtcctaccgagaaactctggagccgttgatgttagagacttgtcaggtccaggacggggtgaattgtttgatcctgatgtgagtcctagctggcccttcatccacatcatcaggtacaaagaggcctctggtcagcagtccagcatcctccagcccccctccctttcctccctctttggccctgttcaatctactgtgaaaggctctcctcatgatagctgtcctccttcagtaacgaagcttacttagcttttagctgtgaaaaactctggaaacttgcccaaccattaattcttacaaagtccctaaactggatgtgtctcagtgcaccctgggccaaaaagaagatatgctagacttgggcatggtgtgacccacttcagccgagggctcactgggagtggactggatgatgctggcctgtggtagggtgctccatttttctcttcctggtcagaaccatattattccgagaccagctctggctggaagtgagagagcaggaaagccatccattcggagagggatacggagcaaagcctttggagcccctgagccagaggctcccagagcctctgcagcatggaattctgtcacagaagtctctagccgctagatggcagcatttcccatgggactgtctcgtactaagtcaccatactaagtcgcagctgacagtgggcctggcttgccctgccatgggcaacacctggaaggccagcactctctggagctgctgggccgagcttgcccttcatctcctcctgtctgcttgtgctgaagcttctccctcttccacatgtccttccctttctcttccagaccaggaatgagtgttccttgctgctcataaagttagtattgtactgactgtttgtattattgccactgtaattatgattattatcaccttgttgctattttagtcagggtttgaagtatacatttattccaggtatctttgtgttttcttcataatatttaaatttatt

SEQ ID NO: 31156 - DNA, 1115 bp, Mus musculus
gccggcgcgcgcacacccacgcgcgcactcccaagcacgcacacacaaagttgtggccgcctccaccgcggagctccggtcggcggctgcgggccagcgcaccgcgctctcgcccagccccgctcgcacggccgctcggctcccctcgggccgcgctcggcccccgccgacgccccgctctgcccttcggctcggccctccccgcctcgcatccgtgccatcggcgctcgattgcgcgcggactccctggggctcttcccggctcgttcgctcgcgcttgcccgcccgcccgctcgcgcccggccgcgccgccccgcccccgccccctccccctgctcctcacgggcaacttttgccggcgcccccgcctcacagccatgcggagctgagctccggcccgggccctggccgccgcagcccgccccggctcccgccctcgcggacccgcccggcccttggcctcggcgccttagccgccccgggccggccgagccccccgcgcagggcccgggccgcggctacggcggcggcggcggcggcggcgacgcgcccgcccggccccctcccccggcgccggccaagtgaggcggtgatgcgggcgctggcggcctgggctgcgccgagagcggagacacaggctcaagatggcagattcccactgaggctgagggggccgagctcgcgcgccgcgttcccttctccgttgccatgaaccgcggacaccccggccccgatggcccccgtgtacgaaggtaaggggcacccggcccgcgatccccccgctcgctcggccagccgcggcccccgtagctttgttctgcccgcggcccctcgcccggcagcccccggccgcagccccgggccctggtcctgggggctcgcgaccttccccggtgcccccatcctgggtccagacgggaccggagccggcctggagcaggatcttatttccagggcagagaaggcggctggggggtgtgtgccggtgggctgctgcccaaagaaaagaaatgggggcggcgtgtgggaaaagacggatccgtgactgctttctgtttatttgtgataaatgaaggtgatgcggtcctcccccattacctttaaacgatctcctt

SEQ ID NO: 31157 - DNA, 1123 bp, Mus musculus
acactcattctaaatgttaagttcagacagatggaaggaataaaacaccctttgcttttttttttttttttttttaatttttttgagacagggtttctctgtgtagccctggctgtcctggaactcactctgtagaccaggctggcctcaaactcagaaatccacctgcctctgcctcccgagagctgggattaaaggcgtgtaccaccacgcccggcttcaccctttgcttttgccatgtgtgcgagccaaggcatctttcgccctttggtgcaccgtgtgggttgtgcctaaatgaagaaagaactgttctcagaaaacaaagagtaggaagggcaggtaagaagaagcagaggtggaatttgttggtgatcccgactctacctctctctccctgcttggaaaggacaaagagctgcggtatccctgtgcagataactggatacctgctcagcctcccatggacattccgctcccacccctctgactgtgcctgcaaggtgaaccccctggggaggccctcatggtgtttgaaacaaaagtgggggaagagattgtgggaagtggggggggggagctaggggcggggatgaatcctttctgtccagtattccaaagaccacccaggtttggtctagcacttaggaagctgatccagaaaggtcaggagtttgaggccagactgagctgtgtagcaagactctatcacaaaagttaaaaccaaaaacagagaaacaaggctgggtgtggtggcatactgctttcatactggcactcaggaaacagagggaggtggatctctctgagttcgaggccagcctggtctacacagtgagttccaggacagccagggatacatagtaagaccctgtctaaaaacaaaatacctcttcccacaaacaaacaaacaaacaaacaaacaatcccaaagaaaccaaaatccctctgggcctctggtctagggctggtgagattcctgagttgattatggcttcctggaatgtctgaggtaagtccagggttcttaggtttcttacttagaccctgtttcttggaaaaaatacccactatagacttatgtcctatagtcttcaaactgctcacagatacccaagtgggtccc

SEQ ID NO: 31158 - DNA, 1213 bp, Mus musculus
gccagcctcctgacaagtgttttctgactgtccgattccaggccatctctcccaaggtcctgttcatgctcagataaaacctcgtccagcctcctgaaaggcttcatgatatttaacattgtccctctttccaccttccggggcctcaggcagctcaagtgtcctctgacatcttgtcatacctcaaatgccaactcaggttcctggaggccaagtcagtaccaagggacaacaacaaatgcccaggagatggtgggtttctcgctgcggtgttggtcaggcctcacagcacaggccaccttgaaaagatcagagacatccaaaggccactgggagtcgggatggggtggggctctgaaagccacagaattcaagtcaacggtgcttacaaagcatgtctgccacacagaagagacaggaaagagccttttctatgaacaacaaatggaggacccaagggtccctttggtcttaaggaagccatgacaaatgtcttccagccgcatcccttttagattggggctatcttgcacatctctagttatactgacctgtgtcctgctctgcactgagacctatacctttctccaaggccaggacgaaaggaaatcaagagagactagaacacatctgagggagaccctccctcttggggttgtgaccataccaaccctgctcttggggtccacaccctagctgccacccctgcctgccctttcctggtgtgtccatcctctccctccactcgacaagtctcacttactctttggcttctgctcctttttgctctttcctgaccactcaaagggcttcgtggcctccccagtggagaggctttctggagaaactgggaaaatatgggatgtggtttaatcagagtgcaatcctgccagcgttcatggcttattggatctgctctgtctccagcctggtgggttagtcatctgaaactaatcctttattttcatgaaatccttaaagaaccctaagatgatgtcaggcaggagggatatctgcctcaggtcatccaatatctcccttaagtctccagacttaagggagaccccacagaaagcaacaggggccaagcctcctatgttctactgataagagaacccacgctgagtcttctttgggtagggagcaccttggagttcttcctagacaagtgctcatatcctgctctcccccatgagtgggatgtgctcccatc

SEQ ID NO: 31159 - DNA, 1107 bp, Mus musculus
atgggaaactgaagtccagaactaattatcagcagactccagattttctctggaattggagctgagaatagaatggattaggtgacttctttggatgccctgctgaatagagaggtgttgatgcctccacgagtgaggaaaagggcagagaagtggaatggaagagggaatgtggtggtgaaagggcagaggctgctgcatcacccattgctaggatgtgctcttccagtgccctgtgcagcttgtctgtatcgtttcagggagctactttgcgagagatgccgcctattcgcaccactacagtaaatccgacacacactctcacatgatgttcctggcccgggtgctggtcggagatttcgtcaggggcagcacttccttcgtccgccctccagccaaggaaggccagagcaatgccttctatgacagctgcgtgaacagcatgtccgacccaaccatctttgtagtttttgagaagcaccaggtctaccccgagtacctcattcaatactctacctcctccaagcccccagctagcccctccatctttgttgccctaggtaacttgttcactagccgccagtaagtatggccaggatgcattaggcgtttctgccacatctgtctgtctggtggagctatttggaaagtctttctttcttttttttttttaaacaaaacttttaatgaactcttgtttaatattggcttctcagtgaaattacatttttttctcccctagtgctggggatggaatacagggctttgtgcttgctacaaaagcactctaccactgagctacaccccagcccttttaaaatgtttttattatgaggcagggttttgctaaattatattctgcctcagtctcctgagcagctggggttaaaagcctctataaccaggcccgacttgaagccacaatcttaatccttgtctgataacagttttaggttttaggtccttttaggttggcttatgatcttaccagtattgattgtgagcctaagtttgacttataatgatgttagtattgtatttttaactctttgctgactttgatgtttattaagaccaagcacagaatttatacatactgttttatga

SEQ ID NO: 31160 - DNA, 3130 bp, Mus musculus
gccaagcaatgctgagtcagtagattattctgaatcttatcttttaagtcccagttttcttgtttgtgactgtggattaaaaactactcaatgaagaaacagcattcttcaggtattatgttatgtcatacttggttaattattaagttacaactgatgatgaatgcacctttcgagagtacttttaagtaaaaatatacacccaggacatgctatctaaaaatctgacaaattcctaacaaggtgctgaattagaatcaggttttatccttgaagtgaaagaaaaagaaatgagcttcattgtggacagatgagtgagagcatccatcagcaagtcatcgatggttagttagcacagcagaggagctagctttcggtttttctcaaagaggaattagtatagtactcttctctatatttggcctactctttgggtactaaagataaaagaggtggtaaatttaaaatgatttagcagctacccatggagttaggggaaaaataaggtgatgaggaaaaaccttttcaaaggcagttgtgggctaggtactatgacagcccagggagagagagaagtcagaagtagtatagaaaggagatgtgttcagaaatgagtgtccacttgcttcagatgtcctgcagtgtgagacagtccttgggaatcggtgggaatcatgatggcctagtatactgctgccagagagacaccatagcaaatgtgcatttttgctattcacatggaaacatgaaacttcataatgcaaatctaaatctctctcaaaaattcatttttcccattataaaactaattgctccctatgtaaaagagaatgtctcgcctttcatatgtgcaaggccctgggacttgatccctagcaccacacagagatcaagaggagctgaggcttctagactgttacgggtgtcctagactttcatctaatacaatctcaagaattacacattacagcttttgtctagggagagctagctagtcaataagggtgaccagtgtaacccagagaggatagatttgcctagagacaccagtggctttaggatctctggtatcttgttttcttacatggaccccattctttgacactgcggcctctgcttgtcttgtagacactgtccatatatgttattgaagctagacaaaaagaattatactccctgaattgctgttgtgcgtagttaccctcagccttactactaaccctttccttattttgctttcatgctgtaagtgaaaacaaatatttgataccctttctataaacatttttttaaaggtttttaagaagcaaatgtccatttccaaagcagctggcatatcatcagtaccacggctttattcttctatagtaagtctcccctctttactggggagaaaaaaaattctcactggagaaacccttaggttccctgtcacctctggtgcccttctagtttcttaaggctttgtcttaactgtgatattacacttatgtttaaaacctcttaaaggtgtattcgaggattcttccaaccaatgtatctgctctgcactattcattaatggaaccctggctaccacgtagcccctgacctccaagtagtttacctatgcaagacctgtgacactctggattcattttccattacagaaagcagtcattaatgtgatttaatcataaagatttgtcttcaagttttttccttttttttttcaaaatatcagctatttccctctgtattttttaccaaaacaattatcataagtgctagaatatatactattttgcaggaataaaataaccaagacataatatatttctttggtggattttgttttgtaagaaatgccagcactaactatatagagttgattctttgcctagaataatttttttcccttttaagagtcataagtaacattttattttcacaaagcatgcatataacttacacaatatagtcagggacctgaggtgtaacttgctaagtgaaccccaaggttattttatcttgcaaaagaaacctaaaccaaactaagggccttacagtttatggttagactgaatcaaatgctgtaacctcagtttttccaaaaacagctcttgactgcacaagcaggtcatgcagttgttaagtatgaaatagcactgataggaaatgcatgtgcatctttgcagactgtatttcctttggaaaagacttttctacttttaatataattaagccataacagtttcatgctgtggaaaggatgaaaaggttcattttaagagattatatagtatgaactttcacatttattgtgaaacatctaactttgccagtgttcagcaagttttcttttggggtgttggagggtggtaatggggaggggtagtgttggttttaggggttttaactatgtgaaatttgaaatcaggacagttgttggctatggtacttactagttttgtagtaatgttttgctagcctgactttccttactggtttttatgtccatggtccccggtgactgttactcttgtttggggtgtgtgcatagtagtgtctcatctgtgtgtaggcagtcagtgtatgcacacggtgtgacagtggaacggggtgtggctgggagtggggtgctggagctttaagagcatttgtttttattcagaacagtatttcccatcttttgcctgcaggcagggaaagtgtacagtatttattttgtttctgttttactctgaatttgtaagtctctaagtagcttatattattattatagggaagataagtgacttgcttaaagttgtatttagtattcttactttctaatttctgtattttaaaatattgaaattaaaattgtattacttttgttctgatttttttagcactcagtgtattctttgctcattttgtctaaaagtataaatgttgaaagttgtataaaaatgtctgaaagaaaaaaatctgaattctatatacaattctgacttgttgttccctttttctgaatctcaagacactagaatgtagaaaactgttttgcattcttactatttctgaggatttaaatgtgaaaagtaacatcttattatttcactagaggtaccactggggaagagtgatggccaagagggaagactga

SEQ ID NO: 31161 - DNA, 2474 bp, Mus musculus
gccaatgttaaagaaccacataaaagagtcctcatttctcatttcttttgacattgtggttttcttctacaagtaacgaatctggcttgttttattttcatttttctgggtcccaaagagaacagctttaatgtctttttcctgcttatagggaaagtataagtttggttaaaatgtcatgtttgttgtctttccaaaaacctttataattacagagggccttcttcaatactgctggtgttggaagagccaacatctatcacaggcttttattatctagacatcatttttttaagaaatacaatttgatttaggatgttcaaatctgcataaaagccgtaatatataccatattaagttgtataatagcaagcatgttggaatagatctttgtgtgtgtgtgtgtgtatgctacttttttttttttaattttctgaagaattaatactgatttggagtaaaatgggtgcttttgcagtttcttccatatgtcttggctagtaggatatggaggttaagtgactgggtgaactttaagataataatttatctcctttatgtacaatttttacttaaatgcaatttttcagtggcttataatagtttttagtatctccattttcccctcatgacataaaaataagttgatattgggggtctgatgataccacattttacaaattcctacaaagacaatataggcaaataacatgaaatttatttttatggagaaatatggctatataatggatttgttcttttcaattcagcaaggcaggtagacttttacttctgtattaagcattaagttgaaaggaaataattatgcaccattatctttcatagttgcattcaaaatacgtatttccaaagagaaacatttcttattctgtctcttttacaatatttaatgggataaggaagttacgaattcaccttctggtccagattgtctggaccaaagtttccattgtattttgagtgtccggaagaaggatttttaaggagttcttcatatctgtagatagcatccctagcccctgcctacacaatgccataactagtggagagagggatacagtcagctggttgttgtatttcaacatgcagaaatctgaatgtgactgatcactcacctttccacaatatatcactgtgatgtcttagtttcctgtcttattgttagatcacatatttttatttgggttaaaaaataatagtgatgacttctttttccagttatgatctagatttgttttaaacaactcaaaatattttaattattttgctttttggccttaaaagttaaaatttattcttatgaattaaaattatggccagtatcttccctgtgcccttaggctgatgaacactaattttgggttgccacatatgtagtgttttaaatgacagttttgtggattcattttaaaaaatcattttagcctattaatggactaaatgacaaaacttttagccagttaatatagccactatgaaagaatccaggtatatttcttcactgataaaaattcagctacacagccaatgatttttctagtcaaacttcttctaaagttctccatctgtggtgtgtccttttatctcatagaaatggctggactttgaagtgtgactactgctaggatctgggctcagtaataggtagtctctgtctttcccatattctcacaagtagtataccgcagcttaagtcagaagatattggcgatagcattagttagctataagcaaataaaatgtgtaaaattgagaaacagcgacttgcacatgcagctttaatagtagtggtgaccctgtcttaattcagctaagtgacccttaacctgggatctactgtactgtaattttcaacactatagaatattatgctccccagtattggtgaatggttagcaatacaaaactggcagcttagtagttcaggatctttggaatacattgaaattcataaatgaagttcatttttgaagcacacaattcaaatcattaactcagacgagacaagtccatttatatggctaaatacttagcttgaatactcttctgtattttactaatcctaattaattccttttccatgtattttactgtacttatccataagagatcagcaggtattatcagacactcactgagtgctcagaaatagtgaggactgtgaggaacctcaagttcagttttgtctgtccgtttgtctgtccgtgaaggtgtcttctccaggaggtttgcagtgttgttttgacttctaaacaaagttgagcagaaggtggcccatttgtaaacagaacaaacaaaacaaaacccaacttcattagtttcaatgagatataccactgtagaagtggaagtgtttaaaaacaaaatactcaagttctttaacatttaagaaaaattctagccgggcagtggtggtgcacgcctttaatcccagcacttgggaggcagaggca

SEQ ID NO: 31162 - DNA, 1231 bp, Mus musculus
tggtctgtgagttgtatcatgggtattctgagcttttgggttaatatccacttatcagggagtacataacatgtgtgcccttttgggtgtaaatgtatgttttgcatacatagatcacttcacagtaacaaagttgcactttaaggctgaattcaggttgggttcatttggccatgggatcaagatcacagcaggggaatgtcaacacctgcaggaatgtggatcatgtgtagggactttctgggacgctgctgtgatgataaatattggttgttgacaggatttatagtcacctaggagataaacttctgatcattctgtgagaatgtttctagattgggctactgtactctagaaacctactctattgaaggtggtgccattctatgggttggggtcccagactgaatagacaaaatgagaccactgtttggtaccagcacctctctctccttctccttctctctgtctctgcctctgcctctctctgtctctgtctgtccctgtctctctctttctatctctgtgtctctgtctgtctgtctgtctgtctatctgtctgtctgtctgtctatctatctatctctgtctttccatctctgtgtctctgtctgtctttctcttagctccctggctatagatactgtgaactcagttgctcagtctcctgctgcccccaccccccgtgatggatgatggtaccttcaaactgtgagccaaagtaaaccttctctgctgttgtcaggttctctctctgctgttgtcaggttctctgtgtctgtgaggaaaagtcactaatcaaaaatacctgacagcttaaagcaggaaggactttgcacacctttaatcccagcacttgggaggcagaggcaggtggatttctgagttcgaggccagcctggtctacaaagtgagttccaggacagccagggctatacagagaaaccctgtctcgaacaaacaaacaaacaaacaaacaaacaaacaaacaaaaaagcaggaaagacttattctggctcagggtttcaggccatagtcctggactgtattgattctaggctggtggaagcccatcttctaatgctgggaccctttaatactgttcctcgtgtcatggtgaccccccaaccatagaattattttcattgctacttcataactgtaactttgctactgttatgaaccgtaatataaataactgctttctgatggtcttaggtgacccctgtga

SEQ ID NO: 31163 - DNA, 1176 bp, Mus musculus
atgtggttgctgggatttgaactctggaccttcggaagagcagtcgggtgctcttacccactgagccatctcaccagcccccacagagtgtaggttcttatttacattctggcagctgagttgagatgatctctacagcacttcactcccgatggttcctgtgggcttaaggtttccttgggctgtgttagagccagagaggctgggacggtgcccaagtgctgcattctggagagctgttctccggggcccagtccgttgtttccttagagaatctagaacttaaatacttccttgaccctaagttaaataagtggccaggttattcatgtggcaaattcatttggtaaaccaggtctgctttaccctgccctggaatggattcttagccagctgtgccagttcagtccagaaggaggaggctcccggcagcgggagatctcccggaggtggacgcagaatggttagatgtttttgtctctgggctaaacccggtcatgtccctcattcttaacaatgcttgtctttgggagccagactgggaaggagtgaagcagccaggggtgccagggcgctgacaagagcagccgtgtccttggcagatctcagaatagcattggcagctcgtggtgactcatcgcctgcaggcctgctcacccgagctcctgatcttagcgtgaaggagggcgcgcccagctcttcctcctgtgccggggggtgggggggtgggggtggggtgagggggggtgcttcagcagaggggaagtgcacaatgcaaaagacaggacaggtacctgcgagggtctggaccagagccagacctgtttaggaggctccctggcaccctctgcattatgttttgtttttttgtttttggaaaagggggttctgtaattctggcctgcccagtcccattgaactaaggctacaacactcctgtgggaatctctgtgtgttccccgtggcacattctgctcctcttaaaacctttggttaattggctttctttcccacccacacccccactttataaaactattttttttttcctcttccctcatgtagcaagaattctatttattcacaaaaccacagctgttgggttttgcttctggggctaattcctcagccttccaagggtagcctttatatactgctggctatggttagaaaagg

SEQ ID NO: 31164 - DNA, 1147 bp, Mus musculus
tgctaatgttaaacctagcatttatctttagttacatgttactaatggcattttagaagcaaaaatctacacaggggtagtttcagggaatccagtgccctcttctggcctcattgggctaatgatttttgggcaacttgacacaaacctagacatatttgggaagatagaatcttaattgagagaaagcccccgtcagaatgtccatatatgtatacatgggcaggcggtcctggattataaaagagagaaggctgagcacgtcatggggaccaagccagtaagctgcactcctctatggcctctgctccagtccctgcctccaggtacctgctttatgatggactatgatcaggtcgggtaagctaaattagccttttcctcaccagtttgtttgtggtcatggtgttttatcatagcaatagaaaccttaagacacagacaaaagacttctactcctagaataagtttttagaaaaccactgtcccatttactgtttgtctgcaccacaggctttgtggttctgaggcttgcagctgagagcccagagaagatgactgtgttggctagggttgcaaagagataggagagaggcacacacgtagtgtttttccatcccagcacgtggcctggccttccctccagcctactctggttctaggctcccatccaaggtgtggtggtacagtgcatgaggcttgtgaggtggtgtgtgaaaactccccgtggcccctgcacctgccactgggctcaggactttgcagaggtagccacgtcaccgtgcgggtatatggcattgcctgatcctagcccctctctgtcgtagttttctacttttagtgtggggtgggtgtggtgtctatgtgcatgtgtgtgcaggtgcgcttaactagtacgtgaatgtggagtccagagttgtatgctgagcgtcttctcttgtcctctaccttagcatttaaaactttttttgtgtatgggtgttttgcctgcatgtgtgtgtgtgtgtgtgtgtgtgtgtgtgtgtgtgtgtgtgtgctgtgtgctaggaggccaggacagggtgttggatcctctggagttggagtcactggcagttgtgagccaccacggtggtgctgggaactggtcctatgcatgggcaggcag

SEQ ID NO: 31165 - DNA, 1099 bp, Mus musculus
gcatagcctcacaagagacagctatatcagggtcctttcagcaaaatcttgctggtgtatgcaatggtgtcagcgtttgggggctgattatgggatggatccccgggtgtggcagtctctatatggtccattacgtttctttttaatctttgggtttgtgtgggtatattatgctcatttgtacatttagtgaccgcagctcctaggttcatgtgtatttgcacatgtgtgtgtgtatgtatgtttatatgcatgtgtgtatgtgtctgaatgtgtgtgtgcatgtgtttgtgtttatatgcatgtgtgtgtatttatctgcatgtgtgtatgtatgcatgtgtgtatgtgtgtttatgtgagagtgtgtatgtgtgcttatgtgagcgtgtgtgtgtgtgcgcgcgcacacgcatgtgtgtacgtgcatggctgtgtgcagaccacaggctgacattgctttccttgctcatacagaattggactgttagttcacatcgtgctgtgatggctgtacgcatcccttccttcttgtcctaattcattcttccctctaacaactcgttttgctcccagctctttcagttttcagtttccttctgagttttccagcagcatttattgaagaacccccgtggaaccagtgctgtaagcctcccaccacctttacttacgctgagagtcaaatccatcttacttgtatacttggtatctatggcccctgggacagtacggccctcttcttccagggccaaggccaggtggagcaggccatgcatggttcctgaaccttgcagatggtccctgcactgctcacaatagttctcctgcagtggctgcctacattgtcaggctgcatggctccacactagtgtccggtcctcagctctcagattacctagcagcaggaagccttggacacagcagtgctcagcaacctctttggagcctgtttttttctgggctgtctcctccccagcccttcacagtcttcctcttgaacgcccctaccctgtcttctctgcctcaggtgatgggcctaccctgttggggcctttcagggcccttatcttagacactgtctgccaggcccactggc

SEQ ID NO: 31166 - DNA, 2674 bp, Mus musculus
gaagtcaaaatgtcttcgctcaaatccatttgctaatgctcaaatcatgacgctctaagagaagtaagttgttcattttaaaaacttttttctcttcacagacaagttgtacaattctgtttatcttgccgttaatagtgagggaagtattttctcttgtgcaaaggagacaagctcactcacttaatgaatgacggggtcccacaggagaggacggactgggaagcttaggagggcccataggccttcagttcactcgtgtggagttctctaaacactaatggagccttggcttgtcaggcatcctacaacactgccagctaccccagacacaggcaaggaaggggcgaattatttttttacactacagcagttcctggagaattttataacatttgtgaatgtactgaaaggaaaatgaacctgccagcatctttgttgggcttgtcagcttatccctctaacgctagataccggttttggtcctggacccttgttcttcagccttaatcaagagctaagtgatcaggaggcagaatcatgttgtattgatgagaagactatggtacggagctctgataccacatttgcagagagtggatcaccattaaggcatcagagcagagctgagtccagatgatgctacaggcctgcggtggacgaaacacacctttaccaaggtggaaagatcacactgtgcgatggctgggtcactctgtggcttctggaagttctcgtcctctctagaatggctgttggcttgttctcctccgacttcattcacatttgactgactcctaggagcagtcttctgtttgtggactattatatttcagacattccagtatggagctttcaaacccacgttcacagtctgggaacgacaagaccctctgagaagctgttctatgtagccttattgttggaagattggtctctgtcacagccgcagccaggttcctgaagttccctcagcagaagatggaaagacaaaggctctttgttctgggggtatgaagtgtatgtattgaatcatgttagtggattgttagggcctgaggcctgccctttagaagattgtagtgtgtatgtcttcaagactatgaattctataagaatcaatactttaaggtcattctgtacatacattttaaattatgtaaactaggaggaaaatgtacaattttgagggatacctaattcacgttgggttaggaaatattcttccacctcttgctttatgctccaaggtatgtattgatgaacttgcaggaatactacagatttctgaccattttcctgttcagtcactgacataaagggaaaacacaaaacataggaaggtaggggaaacaaacccccgcttttgtaataaacgtccagcggttgtttggttacttagtccctgcttaagcttgacattgcctctcactttccctttctgtgtggtgctggggtggactctgggtcctgcacatgcccagtgtgtctcccaatgccctgcactcccagcccagccccacagttaagtacagcggtgccttgagttccccagcacttgtcactggaagcagacagcccacagccttgccaggtggagctgctcccctgccctaggtcctggggggcctcattcccattagagggagcaccccctctctccctctgaggcagactgctcagtggtgcctgcagatgaagcctctgtcgcatgtggctcagaggttcgtcctcctcagtgggttcatcttcatgttctcatatcagcccgtgccgccttttccaggttagtcttgagcacctacccccttctccgtggctctccaggctctgcctgaaatggagctgtaaacactcagaacaggatgaaacgatgtttttctctctgaatctgagtacgttctccatctacttctgcccacctgggaaggaagtggctttaacaaacgcctaggcatttgcctcattttcttattaaatgtttgcctggaaggaagggtcagagctggcgagctggctgggtgggtgaagtgcttgctttgaaagcatgaatacctgagtttggactctcagtccccgtgtacacatctgggtgcagcggcacacagttccagtgctcaggagacattggaaacaggtctggctgagctagagtgctgaggttcaggaagagagcctgtctcagaagacagtgacgggctggagaggtggctctgtggctttagagtactagctgctctcccagaggacccagattcagttcccagaacccacatgacagtcacaaccatctgcatacctccagagtcaagagatacagcacccacttctgaccttcacaggtactacatgcacacggtacacttaggcaaaacacaaacacacatggatactacttaaaagggggagggggtgtgatagaggaagatagccagtgttgacccctggtcttcatgtgatcatgtacccacacacctatgcacacgtgctaacatatatcaaaaatagcagaaaaggccacagtaaaggctggtttgaaaatggattaaaaattaatttgggggaaaatcgtaggaggctttcacacactgaaataaagaatgactggatgggaaacattttgcccttaagtgtgtctgtcctggaatttaacaatagtagttacatattcctt

SEQ ID NO: 31167 - DNA, 1100 bp, Mus musculus
accctgtctcaaccctcccctatccccccccccccaaaaaaaaaagagaggactctttcctcttctggttggttgctcaaaagctctgaaagcaaagaggaagggcctgtggaacagcagcttccagtgtggagggccagttctggtagtgggtagcaagagtttcagagggaaatgggtgagagctgccctgggtacaaggtgggcaggaaataggtgagagctgccctgggtacaaggtgggcaggacccattgatttttgaagcaggtaggctgtgacaggagtggtggcttcttgagaggcagggagacagccaagtgtctgtaaggatgtggattagttagctctctctttctctaggttcccagaaagcctggtgggagagtggactggatagtggtgcagaccatgcaggagtggtgggtactgttttatgttttctctcctaccagcctcttttttttttttttttcttgtctgtggactttgattcaagcattactagtacagaacatttttatttaaaacatatttatctacttattcactcatgtgtgtatgatgtgtgtgtgtatgtatatattcaggtaggcagctgccctactctcccaagtaaggacattacagcactgcctcaccatcttcagcacaagaaacctttaaaggcttgctatatttgggttggaacaagttgtaaatctctctatagaaatgaaatagtggatgacccatataaccccagcactgaggggaatgctgctgaggcagagttccttcaagttccagaccagcctgggcaacagagtgagacaatgtttaaagataaagtagaagtttagaagtaacaatgtaacaatttagggctctccctcttcagttatgtggcagggtaaagccatcttgtatcagcattcgtagtgtacttctgttcttttttgcagagtatacacacacacaccccaccccaccccacccctgtttgtgtgtgtgtgtgtgtgtgtgtgtgtgtgtgtcccagtactggctctgtagaccaggctggcctggaactcagagatccacctgtctctgcctcccaagtactaggaataaaggccc

SEQ ID NO: 31168 - DNA, 2503 bp, Mus musculus
gagccacagagacagaaagtgggaacatcaagcagataccgggtaactctcactctttttttaaaggaggggaaatcgcacactgtcagttgagacctgcacatattggggtaggggaaaatgacactcaggtgtgggggtgtgggggagactagagtaaaagagtcagacttcagaagatggaaggggtaggaaagaaacagtgttcaaaagccctagcctaacatgttggctacaaatagccaaaggggaggcactggcaaggtggactaagggagacctctggtccgccatgcactccctccctccctccctccctctgtgccacacggtttacctgatgagcaacaggatagaagacactgcttgacagtgccacccctatcatggccttgtttcttacaggcccaacgaaggagccacttctgggagctcattgaggagagagagaacaacccctttgacaacgacgaagaggaggttgtcacctttgagctgggcgagatgttgcttatgcttttggctgcaggtggggacgacgagctgacagactctgaggacgagtgggacttgtttcacgatgagctggaggacttttatgacttggatctatagcagcgttgcgtggcgcgggcactggtctgcggagcctcagacagtagctgtcccctgtgctgtgtggcagtgcgtgtggctctcctaggcaggcctctcaaactccaggtgctgtgatcacttcccagggcctgttcctctaccctcacctcccccaagagtgtgttgttttctctgtttcaaaagttacaaaaataaatcttaaagttagttttttgtaacatgaatttaactgtcagacagttagtgtaggtttgttgcgccatctgtcctcagccaggttgtgttcatggactttgcacactcattctgagacccctttgaggttcaaaggaaaaagcactgattgctttggggtccaaggataggggcaattgggaaaaaagggacctaagtcgctctctgcgctagatgtgggagggctccccgaggtttctgggagatctgcaccttcatggtttagagctgttccctgccctgtaatcccctacatgtgcttgtcctgtgggtttgggttcttgttcagttgcacgcaagaaagactactgggtaaccagaaccaggtgcaaatgtgttgaggttaacctgagaaaaatgtaaaaacacagggaggatgcagtggcattccatcagcgcagagctggcagctaactcccaagggtcgatggacttggtgggcgagcacgagcgagcatgtgagcagcttccttcccatctgtgcataggtgcagtattcttagctttagtgggcagatgtgggttagtggtttcagccacatgtgtcggtagatcttaaaggaccaagcagtatgtcagtagttgttaacgtagcagtagctgtctgtctgtatgctagagaaacgagatcagctgtagaggttaaacgacctgcttgtccccctctcagtacaagctgggtcttggacacactgatgttttgaatgttttacagtctagccttttcagtcaggcactttttggaaaaaactttgtcctcatttgagggggcctgttgtgaggttctgtgcttgtttttgtgggtatctgcctcattccatccctgagctttgacaggaagacaggtggattccaaactgaggtgctggttgtactagaggtatctgtcggtttgcagaagtaatgaacccttccccaccgaagaaaagggagggtgcggccacccacgaggcaagcaaaagttaagttgctaaaattccttggcgggaatttcacctttgcattttgttgctctctttcctgaaataacgtgggagatgctctgatctgtcctctgctttgcttccgcggaactcacccagtcttaaaaacacatcatcattgcagaggcctctgtattttgcagctgcccttttgtaagaagcacttttcccaaataaaacgatttaaaaaaaaaaaaaaaattggtcttgtgtgatgacctggcttcagaactacagatggcagagttgctcatatcgttcttaatcatgtgtagattggctagaagtgggcctcttcaagatggccaggctgccttcatccacaagttcacagtctctctcctagtaataagtgcttgcagtgaggcctggttcagtcgggctcctaaataagacaggtgattgggaacttgaaagactaatctttttgttttgtttgtttgagtcaggatttctccatgtagccctggctgtcctggaactcactgtgaagaccaggctggcctcgaactcagatcctcctgcttcttccttcctaaatgctaagattagtgctgttcagcaccacaccaggcttaaaagtgtaatttttgcaagatttatttattcacttttttttttttttttttttttgagacagggtgtgtctgtgttcccctggctatcct

SEQ ID NO: 31169 - DNA, 1526 bp, Mus musculus
ccctggttgtcctggaacttgaaatttgaaatgtagatcagactggcctcaaactcatagagctccacctgcctctgtctcccgagtgctgggattgaaggtgtgtgccaccacagccaactctcttttctttttctttggaagcagtctcctgtagcatggggctggcctatagaactcttgctctttctgcctccacctcccaagtgttcagtatcctaaagtttggaaatgaaggctttaatccttcattttccaccccaaaactgaaacatcacctgagttaatagggtctttggtgcggggacttgtagggggtggagctctgggatacagagaactggatactctttcagatattgggagttgggtcctcccagcttgactagtgatgtgagcactacgggggtgtggagctgtgcctttacccggtcagacgggaaagcttcggcaggaccttggctgtggagtctccggactggactgcggtggcctcactgtgcctcttgtctcttcccttcttccagtcttgcattgaggcccatgagaaggacatggagctctcttttgctgttcagcgcagcaaggacatggtgtgtgggatctgcatggaggtggtctatgagaaagccaaccccagcgagcgtcgctttgggatcctctccaactgcaaccacacctactgtctcaagtgtattcgcaagtggagaagtgctaaacaatttgagagcaagatcataaagtgagactcctccccaatcttcgtttgtgctttctattttcgggaagagtttagtatcttgtgccaacctccaaccagaacgaccacatttaaatgcatgtattttatcatgaacctgggtgttctaattgggatttctttgtacttcagctagccgctaggttagttggtctgtctattttatttgaatgaggaaaccctgtgtatcagtagagtcttcatgctttttgaggagattgtgttaatggattagatagacagtttaggcttcctgaacaaacatctagctctgaatgtatgtttcttggtgtcttacactttccactttcctataccatccattaagctagccaaaatctaccatcctttaaaaactgttctcataactgaacaaaagccacataatccaaacagagcaaagttacaagaaataaatttatttaaacgaaagaaggagtctgtgtgaaatgtcttcttttggttttgttttgttttttacctaagtctttttttaaaaactggctagccattgagttgatttctgaaggagtttgtctttcctccaaagaaaggttcagatgtgactggaatccctttctgctaatgttcatgtgcctgtcagttaaggtgacacaccagggtgtgtcttgaagagcgggcctagtggagggaatgtgcattgcagcctgttcattgtttcccaggtcctgccccgaatgccggatcacatctaactttgtcattccaagtgagaactgggtggaggagaaagaagagaagcaga

SEQ ID NO: 31170 - DNA, 2262 bp, Mus musculus
gcagttaagagtgtttgttggagggacctggatctgtttttcccagcactcatatcaggcagcttatagttgcctgttaactttggccccggggatctaaatgctgtcttctggcctctctggacacccacacatacagatacacttaaataggaataagtctttttttttttttttaagatttattttttctatttatattgagtacactactgctgtctttagccacacactagaatagtgtatcagagcccattacagatgttgtgagccaccctgtgtttgctaggaattgaactcaggacctctggacctggaagacctctggaagtgctcttaaccgctgagccatctttccaacccaggaataagtcttgacaggtgctccctgctcatgttcacactgaagtttgaaaagagtctgggagctccatgtagcacgattgtaactgcttacttttctctgtcagatacgaacacagcaagccactgaaacaggaagaagtgactgctactgatctgagtgcaaaaccatccctcgctgcttcctcaagtctctcttctggtgttggatcacttgctgaaatgaattcaggcgaagctgagtcacgaaacccaagctttccaactgtaggagcaggttcagaggactgggtgaatgccattgagtttgtccctgggcagccctactgtggccgtagtaagtattgtgaggaccctgtaaactgcaatcaaagggctaaatgacaggccacagtgaactcagtgtcagccttttctgtttgagcttaacctactgtcaacacattagattgggttatttaagatttaaagatgaagtaaaagaaaaattttgaactacaataaaatgaattcttgtttaaaaactgaagtgtctccgaatgctgtcccctgcttgctcctggtggtgctgggatcaaaccctgggctttgcacatgctaggcaaatgctttcccattaagctacacacttagcccacactctgtcctttgatgttgtgtttttttgacacagggtctcttatggttcagattcctcaagtagttaaggatgaccttgaactcctgactctcctgatgtgcccttactaaccagtacttactaatactacatttcacttctaaagaagttcacatgcagaactgggctgggtgccacacgcccgtaacgccagctttagagaggctgaggtgggagggttgctgagttcaaggccagcctgggttatcagatcttaccagaaagaacaaaactgagctggacagtggtggtgtgtacctttattcccatcactgggtattctgagataggcagagggtgagttctaagccagcttggctgtataaccctgtctcaaaaaaccaaggggaaaaaaggaaaaaagttcagtaggcttgactttaggtttcattaaagttgttgttggattttttttttcctttttttttttcctttttaaaaattattctgttaccttatagttcataattgccttatgtatttggacctttactaccatcttaaacattttcagctgccccttcctgcactgaagtacccccgcagggttcagtgaccaaggaagagtcagagaaggagccaactacggtggagacaaagaagcagctttgcccctatgctgcagtgggagagtgtcgctatggggaaaactgtgtgtatctccacggagactcgtgtgacatgtgtggcctgcaggtcctacacccagtggatgctgcccagaggtcacagcacataaaagtaagtgctcagagcagcttgtgctaaatatgaggagccaataaatggtggtgtatgtgctcctgcacggttctatagagtgttttgtcaaagatagacctgtatagtccaggcatagtgaagccacaggcaggaggctctggagagcctgactgtggtcatacacccttcctacaaagagaagttctggttgcagaacctcagactatgatatttaaaaggtagttcacggtttttggggttttgttctgatttgtttttttggggttttgttctgatttgtttttctttttttttttactaatagtttttctgagattcatatttcttataattcctttgaaacacatttccttgctttttaatatattcatagcatcgtctagccattactataattctaagttaaatcattttcattccccaaagaaaacttacatccacttagtagttggcctctgctcagcttttccttgagc

SEQ ID NO: 31171 - DNA, 1234 bp, Mus musculus
ctagggtccaacaaatgctcacataatgctgtcgctgtttgttggtgtctagaaactgctaatcacgtctgcctataatcccttaaagttgctggcctagttttgcttttttcatatgtggcttttaaggaattaaaagtgtttccttaacaacattgaatataactggtagcctgacaactttgtagtctatgtggtttctttatctttgatgtgctttgaggatagggactgaagttagtgaaaaatacagtcctaggactgtaaaacaagggcagtggccagaattaaccttcaatgaacaagataaatgtttaaaattgggggcgctgaggctacagcttagtgatagactgcttgtgtgtatgaggccctagttaatcccgcaccttctcataaggatagtctttcgttcagggcagctgccttgatgtgtgtgctccctactgttgatccaaatccgtcttccagcctaggctgacaagttcattgctatagttgtgaacacaccaggagactggtggtaatgaattcttcgagagttggctttagtcttctaatctagatttctggttctttgtcttacagatactttatgcatggggtttgtaaggaaggcgataactgtcgatactctcatgacctctctgacagtccatacggcgtagtgtgcaagtattttcaaagagggtactgtgtttatggagaccgctgcaggtaaggatttgtttataaactctttggttaagggtgggttgaagaatgaaaataaaatagatcattctagtagctttgtacatataattctagtagctttgtacatagtattctaaaaatgcttatgatttgaaaagtacttattgctagcagtctaagaaggctcagcaaagatacaatgcctttttatgaagtagtctcagaagtcacaacattgtcgctttcactaacatctggacagagtcactaagtccagccacattgaagggaagaggtattgggctccacttttggagaagcatcttggatgcatttgaaaccaccacactaggtaagacttgtagccagtatcacagccacatacagataagtagatagatggatgagtgggtggataaatggatggaggggtagatgggtggctgaatgaaaggataaaaacttctatactaggtaagacttatagtctaagtatctcagccatatacatacaggtggatagatggttgggtggata

SEQ ID NO: 31172 - DNA, 1344 bp, Mus musculus
tcatttttatgtgggttctaggaatcaaacccagccttctttgtatcaacaaagatgtcttgccgccacccctttttctttattcttctgaggagaatgtgtgagatgcagaggctaatataactgggaatggcttgggacttgttgatccttcactcctgtctctctctagtgctgagattatagacatctctagatgtcccccacagggagggagggagggagggagggcttgctggatgagggaaactttgccgatcccctgccttccgcttgcttttccctgtttcctctttttagttcctcagcagactgactgactattctagcctccactgaggggctttttaggttttacttttttttccctctttgttgtgacaggttttctctgtgtagtgtggctttggctgtcctggaactcactctgtagacgaggctggctctatctcagattctatctgcctctacctgcccattgctgaaattaaaggcctccaccacaatgcccagtttggggtctttaaaaaataaacttgggtttcacttaacacacggtgaacttgagcttccttcatggccagggaggaccttggttttaaatgctgaattacaaattcaggccaagccctgatccctaaggttcattgaattaatggagttttctagctcttacctggagcagtagtttgtgggccactatgtttaagtctaatatatatatatatatatatatatatatacatatatatatatatattttttttttttgaaggctgtggatctacatggcccagagagaagaggtagttagtgtcctgcttcagcatgaggttctgaattctggtttccttgtaagagcccgcaccgtgagctgaaggttcagtcaaagagcctggctctaaaacagtagaggaaaacacctgctcatgtatacaaacacaaaatatctttgggtattctggcttagggaggctaagacagtagaatcttgagttttagctagcctgggatatgtggcaattcatgtgccagaccagggagggctacagggagggttcactcaggaaaattatgtagatgaggtaacctttgagaacacagtatgaaaagctctaaaagggtagagggttatgaacagggcaccttagcttgggtagcaagggtgtttgctgattcctagggggttacttgtcttccatgcactgtggcacatataccaacatgcattcacacacacaaagagcaaaacagaggacacaagcttaaagtctcacatggtggccctctcctgtaattgtttttgtggaggtggaggtaaaaacagtaggatttcgggggtct

SEQ ID NO: 31173 - DNA, 1373 bp, Mus musculus
caagaaataaccctcatcttggcccaagggaaaacctcctccctacgccccagtcctcccaggatggaccccttagctgggcaggtggcacgcgctcacaacagctccggaagggaccagccagcatgcagaatgttgttactgtggttagttgcttctgggacctttaaatcttagatattaaaagagaagaagaaggaaagtgtttggctcttccttcattcagctctcctgccccatctcatcgcctctgggccagctcattgactctgtggagccaggagttaggaagcgcggcagccacagaaacacttctgcccacgccactgcttcttccgcactggtctatgacgccacctggtggcagagactggactttactgttcttgactacattttctttttttttctcctagaagccgtatagctccattcatgccccaaaagtctgtggcttttagagggacacatttaaaaaaacaggaaatcttgttaactggtaataaaatgttctaagggtcctgaagtttctatttcctgtggcccaaccatgacacttaggccactgctgtgagcctgttcctcttgaccaacaaagctaggagaggtttctgtagttgcttctcttttatgagagagaggacccgaatcagctgacctgtggggacagtaagagtctgcaggagccctgtgtgcagcaaaggaaggttctcgggctggcctcggggctgccaccccgatactgtgaatgccaccaaaaactgactacatctggatcgcctctgacctgggcaggattaataggagtgcgtggctgggatgttggaggtagccagagaaagcaggtgagcacagcacgggggctcagggaccgattccacaagctcctaggcttaggtaactttctgatagcaatattctgtgtatttttatattgcccccaagtgatcacagttagtattttggaatatacgttcttttctaacttattttatattatactgttttacttaagaacttcaggtgaataaataaataagtatatctttatcaacattcctagtgagtgtataatattctattttattgatgtttttgtatttgacttaaacaaaacctaaaataaaattgggggaatgtgctaggcggtggtggcgcacacacacctttaatcccaacacttgggaggcagaagcaggtggatttctgagtttgaggccagcctggtctacaaagtgagttccagggcagccagggatacacagaaaaaaccctgtctcaaaaaatcaaacaaacaaacaaatattgggggaatgtactaggctatttgtatgaagaggcttttttcttttcctttttcattttttgagaca

SEQ ID NO: 31174 - DNA, 1215 bp, Mus musculus
tctcctgagtgctgagattaaagatgtgtgccgctatgctcagctggtatttgttgttggttttctggtttgtttttttgttttgtgtattgtttttgtgtgtgtgtgttaaagtgcatgtgcagtgcacatgtgattgtcagaggaaaactctcaggagcctgttgtctccctacactgtggcttctggaaaccaaccttgggtcatcatcttgtgtggtaatcgcgttcaccgtttttcctatgactgccattctgactgggggacgaggaactctcgtgtggcttgacctgcatttctcaggcggctggtgaagctgctgagtgcttttttcttttttgtagaggtgttgactgtgctggtttgagaaccctttattctaaccagtgcccctttgggatgatcccggtgctcttccctagcctctgctgttgaagccctgccctcacccacgctgagccggccttttctctctgtctgtccctcctgcagcactctgtccaaatgctgccacgcaatggtggcgctcatctaccccttcagctggcagcacacctacatcccggtgctaccgcccgccatgatcgacatagtgtgctcgcccacgcccttcctcatcgggctgctctccagctcgctgcctctgctcagggagctgccactggaagaggtgagccaaggagccctgcagcctgattcctagggccacacagggagcgggggagtgctgggcaggagtgggaagatgccagggcttgctctgtggcaggtccttcccagagtctctcctaagtcatttcccctctaaatggcatggcctgtataagcagccatttagaagccatcagacatagccatctgccccatcttcctgtccccctacactgggcagagaaagcagtagttggaatatgtgcttaactggtgacagagtaggcaagagcttagctataatattaaaataaataagtaaccacagggcgtgactgggaggatggttcagtgccaggcctgatgagctgagtgcaatcctctgagaggcgcatgctgaagagagaacattggctcttgaaagttgtgttcttgacttccacgtgcatgctgcggtgtaacacacacacacacacacacacacacacacacacaaacactctaaagcaaggatgtgggtgtcaccctcctgcaccccagcacccaccaagcaaggtaggagg

SEQ ID NO: 31175 - DNA, 1104 bp, Mus musculus
cgtctgaagatagctacagtgtacttatgtataataataaataaatctttgggccagagcaagcagggactgagcaagcagagttgacctgagcgagtggggttgaccagagtgagcagaggtcctaaaaattcaattcccaacaaccataggaaggctcacaaccatctgtacagctacagtgtacccatatacattaaataaataaatctttttttaaaaaagagagaaaagggaaacgactttacgcccctacgaagccatcagctgtggcccccttgagctcccacactccatccccccaatcctggagtcactctggcaggtccactgcaccagaactgagcacgctgacttcggcagagctgaggtgcttttcttattcccgtagatcttggatgaggtggaaaagaggagaggaatctcccctgccctcgtgcagcccctcatgaggagcgtcatggaagcccctttcccagccctgggcaaaaccatcattgtcaagaacttcctgccaggctcggggactgaggtaagctgttggattcatttcctctgccaggagagcaggtggtccagccagccgcgtccccatggctggagaggctgtgtctttcagcagggcatccagttcagtggtcagtcttcacccaccctcagtccagtctgtccagcccaggctcggcccctggaagcagccagcaagagccatgctggacagcatgaggtttgtccgcagacatgcactgtgcctcattggcttctttcaaagctcagtcagtcatcagtgttatttagatctattcacatcttgggcctgcatcactttctaactttttcagtgaagactgtcttgggtgtacttgatatctaccctaggcttcaaagcctgtccttgacctgtgaggacctgggacctgatgacaacatatgttttcctctctcttttcacaccatcgatcccagaaaacatcagagcactggtctcttccggccttggatctctgttggcaaccagttgcttctagacacagaagagatgagggtgcatccggagcataccagatcaacccagttgtccagtgctgagcagttgttgggaac

SEQ ID NO: 31176 - DNA, 1163 bp, Mus musculus
actcacaaggcttgaccaggcaagtcagacctcaggccaagaaggcctttgtctgcctctctccttcaggcactatgggccttctgtggtgcccagtgagtccactgcccatgggattagaggccctgttctgtgctgacacagctgccgggaagaagtgggggaggatcaggcactgtgttggcctgttgcttcccatcaacagtctgggggacagcctgaaaaatcccacctttaaggtgctccggtggcttccctttgaggctacagtcagggtccggcgaactaccgccagttgctgatttttatgaatgacattgtgggagatttttaatgaatgaagtcttatccctctacttaccctacgcacattacatgctgtatatgggcttggtatggtttagaagctgcagcagagagggcatggcccacactgccgtggatactatctggctttgaggaagaactttgctggctcccactaggtctaaggctcacatccttgctttcagaggcttcggatgcaaacatcttcacgatggtaccattttcccccaggaccctcagaacccttggagccccaaataaagactcctgtcaggattcgctgctttttactgggcctcagactgaggctcactcccgtatcctgctgtcttcccttttatcaaacaagaagctaccaaaagcccactcctcccacaaactccctggcccgttatctgggagactgctggacccttctctccaacagtggcaccaggaggcattgcctggatgcagcctgcacatagcttctgccaggctccttggcatgctctccagagttgaataccatactctggttgcttctcatctcagatcttttcattagtcaaatatcctgtaagcaaactagcctggtataaaacttgaacagaagcagatacccaccagttgccagcagttacacagatttcagtgtcttgaaagtatcaggacattttcttggacttcactgcaggtagaattaggctgctaagaaggctgatttctgtgtcaacgtgataaagatgaccgcactggccacagcagttcagcactccactggtggaaacttcctgtgctaagcagttccttgcttcttgtacacccatgatgaatgggagaaccaaccacagggc

SEQ ID NO: 31177 - DNA, 1413 bp, Mus musculus
tatacataaaataaatttttttttaaaaagtgatagcttcagtgttgtggctggcaatttatatataatatttacatctgagtcctggcaattctctatgattggccaagaactgtaacttacaaacccctcctgtgtttatatctctgtgtctctggtacagggtcaaggcagaagttgcaaagactagggaagtacctggaaggcaaccacttgggaggcccattcctttgccgaagactcatccagcagtgcccttgggaaggagtccctccgggagcccccacaccctcatgctggaggccagagtggacatgctcagctccaacatgatcatcagtggcccggctgcagaccttggcgctaaagaagccagcagaccctggaagaagcagcttaacagtgtcccgaactctggaccatccgcccgagccagagcccagccccagcccctcagcataaaggacaagatatccaagtgggaaggcaagaaggagccacccgcctccgatcccgccaggcaaacagatggccaagaggaccacctgccatcctgcaaggtagagagaagaggcagtgagctcaccagaactaagaatggaatgaggcttgaaacagagagattgcaaaatgacagccgggcaagaactgtgtgtcaggacacagaacagttgccaggcccgaggcctatcgatggacagccagagctcagccagcaccgaggtcgtgagctgaaacccagcgatctacgctttcaaagtgaccatctctctgtgctgagacaggtcaagagactagagaaggccttgaaggatggctccgctggcttggaccctcagatgccggggacttgttattcacctcactgtctgcctgacaaaacagaggaagacctgcccagtcttgaaagccacgagaaggggggtgtcttagcagctggccggagagctcaccacctggaggtcagggagccgggccctgagatttcagaggattggaaaggccaggagagtgtctataggggctccaggtggtaccccccaaagccttttatcaaccctgtccccaagccccgcagaacattcaaacatgctggagaaggggacaaggatgtcagcccaggcatcagcttcaagaaagagaagagaaacctgcctcccctgccctctctgcctccccctcccccaccgctgccttcctcccctcctcccacttccgtgaatagaagactgtggaccgggaggcagagacccagtgctgaccacaggtaggtgctcaccagatgactctgctgctgcccgtgttcctgtgtaactgcctcctctccacctgctggctcacattcacctcagggctcttacataaggccagtcagtgtttgttctgtgaggcagcttgttggtctacctggaa

SEQ ID NO: 31178 - DNA, 1236 bp, Mus musculus
ggttctgagaaggaagtcagggggtttgggagggctgcctggtattgtctaagtcacatcatcacttcaggcactggaggcacatttgagctatctggggtctaccagtggacctagtattctctgaatccagatgttagttctgctacctactacctgggtctagggaaggaccactggggcagggctctgaatctctgtccttgtaattctagcacttgagaggtagagacaggagggtctatcagaagttgagggccaagctaggtgacacgagacactgtctcataaaattaaagccctagccaactggaatcaaaatttcctgcccaaattcttgtttgagagcattcagtagcaagggttttgtgaaatgcccacctctttgccttgtcacaggctgcccactgtcccctagaacttctgcaggtgtcccaattgatgctaggctgggagggttgacacagacctgaatggtacagtctcttccagatatttgtggataactttgtacacggagatctacaccctggaaacatcctggtccagggtgctgatggagtgtccccaagcctggagatgcaacagcagcaggtgaatgtctgtgacacactggtggctaccatagcgcctgccctgtgcccactgcgcctggtgttgttggatgctggcattgtggcaaaactgcaggcttctgacctgaggaatttccgggcagttttccaggctgtagtgatgggacaggtaagatccactggggttgggcttttaggctcttgggaactgaatatattgctccttatcctgtgtcactggtgaaagcccaccattgccagaatgctgtggttagattcgagtggaacaggtgtgggcatcatgacaatgtgtcctcaggcttggcagcgtaaggttggaacctttaggaaggcattttcttgtgtattttgcatctgtagtttcttctctcactctgtccgcaaatttgttggcatgacaggagtctacctttaaagaaaattttttattatttcatatgtgaagtgtgagtactggtgcacatgagacccagtgtgcatgtgatgggcagaggaaggctttgcgagtcagtcctgtcttgtgtccccacacttaacacttcacacacttcacacttctcacacttcacacacttcacacttcacacacttcagaggctgagctcaggccatcaggcttaggtggcgagcacctccatcc

SEQ ID NO: 31179 - DNA, 1168 bp, Mus musculus
tagagtgctctgcttctgtcctctgagcacttctctgtgcccttgcttcttggaaaggagctttggccgcacattgcctgttggagccatctgctgcatttccgttgtattaggctgtaggccgtggatgatattgcagcagacagggctccaagtcaggagaagactgcatccacttgagactcccaaatgtcacagcaggaggggagggtgacagtgagaaactgctgagatgaggagtgtgtatgaaatctgtggcctccacttcttatactccatcataaacacactcattggcttaggctgctacctctaaaagagtcccagcccctgggtagtgagtagattgaagtgggttgagccagtggttaagggcggatagtgctcatgctatgtgtggcaggtgttagctgtagtgattacattgtttctcctctcaagctttattttgaaacttaactggctgcatttatgagtacagacctttgaccttgttttcttttgatccgttgtcaccagggtcacttttcatatccagatccttcacagtggacagatgaagaactgggaatccctcctgatgacgaggactgacactgtaaactctctggacgagtaggtgtgccctaagtttttttttttttttttttaaggatacacagagtgtcatatgcattggtgttttccctgcatgtttgtctgtatgagggcaccagatcctttggaaccagagtacacacagttgagagccgccgtgtggttgctgggaatcagaagcaggttctctggaagaacagcaagcgctcttaactgatgagccatttctccagcctctaaagctttttcaaattctgacctgttttgcgcgtttgatggccttgaacaagcctagcctgacagcacgccgcaccgccgctacttctgtgtaaccggtttcatgtttgctagcctgtgcccctttattccttcttcttatcatatattaaaaacaaaaaaagtatttttagggttaggttatagtttcggaacactaaccaccaattgaataaagacaggccagttctgcacagggaggtccctgggttcagttgccagcacaaagcaaagtgtaacaaaccagagaggaccaggcttgttggttctttcttttaataccagcactcgggat

SEQ ID NO: 31180 - DNA, 3216 bp, Mus musculus
tttgcaaatagaatatccagttcgtacttatatgcatcttcaacaaagattctctgtgacttgttggatttggttcctgaacagcccatttctgtatttgaggttaggagggcataatgaggcatcctaaaagacaatctgatataaactgtatgctagatgtatgctggtaggggagaaagcattctgtaaagacatgatttaagacttcagctctgtcaaccagaaaccttgtaaatacttcctgtcttggtgcagccccgcccctttgatcacacgatgttgtcttgtgcttgtcagacactgtcagagctgctgttcgtccctctgcagatctcacctgtccccactgcacacccacctcctgcctcttgcagacctcagcatctagctttagttggaaacagttcagggttcaggtgacttcttaaaaaaaaaaaaaaaccctacctcctcagaatgaggtaatgaatagttatttatttaaagtatgaagagtcaggagcgctcgaacatgaaggtgatttaagatggttcctttcgtgtgtattgtagctgagcacttgtttttgtcctaaagggcattatacatttaagcagtgattctgtttaaagatgtttttctttaaaggtgtagctcagagtatctgttgttggaattggtgccagagtctgcttaatagatttcagaatcctaagcttaagtcagtcgcatgaagttaagtagttatggtaacactttgctagccatgatataattctactttttaggagtaggtttggcaaaactgtatgccttcaaagtgagttggccacagctttgtcacatgcacagatactcatctgaagagactgcccagctaagagggcggaaggatacccttttttcctacgattcgcttctttgtccacgttggcattgttagtactagtttatcagcaccttgaccagcagatgtcaaccaataagctatttttaaaaccatagccagagatggagaggtcactgtgagtagaaacagcaggacgcttacaggagtgaaatggtgtagggaggctctagaaaaatatcttgacaatttgccaaatgatcttactgtgccttcatgatgcaataaaaaagctaacattttagcagaaatcagtgatttacgaagagagtggccagtctggtttaactcagctgggataatatttttagagtgcaatttagactgcgaagataaatgcactaaagagtttatagccaattcacatttgaaaaataagaaaatggtaaattttcagtgaaatatttttttaaagcacataatccctagtgtagccagaaatatttaccacatagagcagctaggctgagatacagtccagtgacatttctagagaaaccttttctactcccacgggctcctcaaagcatggaaattttatacaaaatgtttgacattttaagatactgctgtagtttagttttgaaatagtatgtgctgagcagcaatcatgtactaactcagagagagaaaacaacaacaaattgtgcatctgatttgttttcagagaaatgctgccaacttagatactgagttctcagagcttcaagtgtaaacttgcctcccaagtcctgtttgcaaatgaagttggctagtgctactgactgctccagcacatgatggaaggcagggggctgtctctgaagtgtcttctataaagggacaatagaatagtgagagacctggtcagtgtgtgtcagctggacactccatgctatgggacttgcatcttctgtcctcaccatccccaagacattgtgctttcctcagttgtcctctagctgtttcactcagacaccaagatgaattactgatgccagaaggggccaaaatggccagtgtgttttgggggttgtatcagttgactggacaataactttaatagtttcagatcatttatttttacttccattttgacagacatttaaatggaaatttagtcctaacttttgtcatttgaaaggaaaaattaacagttcctataagatacttttgaggtggaatctgacatcctaattttttttcttttcagtgggtttgcagcgagggtcttgtatgcactaggcaagggttctaccactaagccacatttcccaggaaataaaatgttaacagttaaaacatacacacaaatacacaaacaccttattaccactttagtaaagtgagagatgtgcgtcctttgtctcagtctccacgatttcagctgccccttgtatgaataactcagtctcgctaaactgtttacttttatttacctggtttgactagttgcagctatataaccagttgtgcatgaggacaacagccagtgtgtttgttttgtttttggttttttgtggtacattttttgtaaagaattctgtagattgaagtgctctttgaaaacagaactgagatatatttattcttgttagcatcaaaaaacattttgtgcaaatgatttgcttttcctggcaggctgagtaccatatccagcgcccacaattgcgggttcccatctaccatgtccacaggggagacagacgggaagcacatgaggggtgtgtttacagagttgtaggagttatgtagttctcttgttgccttggaaatcactgttgttttaagactgttgaacccgtgtgtttggctgggctgtgagttacatgaagaaactgcaaactagcatatgcagacaaagctcacagactaggcgtaaatggaggaaaatggaccaaaataaggcagggtgacacataaaccttgggcttcggagaaaactaagggtggagatgaactataatcacctgaatacaatgtaagagtgcaataagtgtgcttattctaagctgtgaacttcttttaaatcattcctttctaatacatttatgtatgttccattgctgactaaaaccagctatgagaacatatgcctttttattcatgttaactaccagtttaagtggctaaccttaatgtcttatttatcttcattttgtattagtttacataccaggtatgtgtgtgtgctgtactcttcttccctttatttgaaaacacttttcactgggtcatctccttggccattccacaacacaactttggtttggctttcaatgtcaccttatttgatggcctgtgtcccagtagcagaatttatggtattcccattgctggctgctct

SEQ ID NO: 31181 - DNA, 1165 bp, Mus musculus
caacattccctagcaaccagtccaaatctgacagaaattaaacactggagaggttattcctagtaagagaaaaatatcagatgtaataatattcaggagtctaaggcagaaggtcatgggttcgaggtcatctatatagcaagatattctttaaaataaaaaagtcaatgacagaacttacaaagtcaagtagctggggctaccaatatgactcaggtggtggatggggcatgccttttatcccggcacttggagacagaggcaggcagatctctgtaaattgagaccagcctggactacagagctagttccaggacacccaagaccacacagagaaaccccgtctttaaaaaaaaaaaaaaaaaaatgaggctagagagatggctcaggggctggaggttaaaagcactgattgtcttccagaggtcctgatttcaattcccagcaatcacaaggtggctcacaaccatctgtaatgggacctgatgccgttttctggtgtgtctgaaaatagcacagtgtactcatatacaaaaagtacgtaaatcttttaaaaaaaaaagcaaaaggaaagtagaaaggtggctgtgtgaggcctgccaaggctgtgagtttgaggctgccccgcagcgtggtacccagctgggacattctccgtagcttgttattttcttgatgtggctgaattgttttttgtggattccaatgactcaaggtttaaactagtgacttatgttacaaggtttgtaatatatttagctgatcacctttcagtgagacccaaataaggcttttctgtcttgaagttctttcaagatgacgttttaaaatcagctcttgtcctccctctacaggagaatttgcagccttcaagtagccagtccatcatggcagcatctactctttatttcttaagtcttgtgttcatacagtttgttaacatcaaaacacagttctgttcctcaaaaaattttttaaagatacaaaattttcaatgcataagttcatgtggaacagaatggaatttcctattcaacaaaagagggaagaatgttttaggaaccagaattctctgctgcccgtgtttcttcttcaacataactatcacgtgcatacaagtctgcccattcccaagaagaaagaggagagaccctgaattctgccc

SEQ ID NO: 31182 - DNA, 1232 bp, Mus musculus
tgttctttacccattttcactcagcaacacaactgtagtgcctttgatgccagccatcacctatatggctcctagttctctcttagttctatggcattgaagtgaagacatttggcacagtatatatcaacaatattgtcctcctttgtacaacaccaggactacagagatttctgtatcattttgggcttgagaaagttgagaagatataaatttccttggtgtccatcatagggagtcccaggaacagggaaagatgctatccataaaaacagagatactggagtggaggacctcatatcctttcaggcattgaattgtccccttggggttctaagttgtcacactgacttttttccccaaaagaactgaacattttttaggaaggaaagattgaacattcttccaagtaggctgcacttccctctgctggatcaaagcttcatctcataggcacaagtgatgtggtcactgtcttctcatgtgtaacagggcccgtgcagtagccttcacctccttgggagggagtctaggtcatgaggaaggggttgaaccatgtaactgggaaacactttccctctagccactggctgagatgcactgtttgtactgctgtgatttttttttttttctctatccctccttctccatcaacaagaagtgagtgcagcccctggcaatgtgatgactaattattttaggaaacctgagtgagttactgtggttgctgtaaacatctaaacttgaaatctgttttgtgcaaagcaaagacagtgtttgcatgcaccaagggaaaactggtggtagaaattgctgaacaatttgcttctaactgtagtgggaaatatcctttttgagaaatacgatggatcaatgtaatttttctcttcatgtaaagctgttattgaagtaacaacttatcttattttgcagtcctaaagtaataaataaaacatttatggcttggaataaattgagagcatcccattacctgtagtagcaggcaagttcacattcttttaaagcctcaggcagtaacatcagcagatttttttttttcttccttattttctaatccagaagcttctaatttctttgtgtcaaagagcttccattctggttctgagtaggtgtcgagggaccctttctgatatgactacattttggagaacctcttgtaaattgtatttatcattagtgcccagtagggaccgtgctgtatagaaagaaca

SEQ ID NO: 31183 - DNA, 1194 bp, Mus musculus
tcttgatctgctcagccttagagccatagaatagaaaacagtttgagtaccgggtttcttctgtgtatacagatggtgaaaattaactggtaacaaagactcccgaggaataaatttagtatagactaaaggaaaaaggattgtagcatgaaaactgaatgtcccttctcatagcctgtggccctgcaggatgtatgcttataataaaaggaactaactactaccactggtaaggaaagccaggtttttgtcctaatgtaaaatcgtcattgagtaactgcatactttggttgtgatgcttgtagtgactctgttatggagatcatggatgagcttgtgctctttggctggatgacaaaaaaaaaaaaagtatgcgatcaacagctgaataaagaatttaattgaaaatgtctctttctttttcaggtgtttggcaaccagctcattcctcccaatgcacaagtgaagaaagccaccgtctttctcaatcccgcagcttgcaaagggtatttcagtttgtgacttactgtatttagtttttctaaaggcaaaggacaaaatctccacaaaggcaggtggtggactgtgtgctacagtgactgggactggttactgtgcagccacagcgttagtctccgagtggaagtcaccgtgccgcaaattgatgttcatcaaacaccaaggatttatatcagcttgagagcagtcctactgggaatgattgctctcctgctttgcataaccgtgttaggctgccatcacaaaggagtttgagagatcaagagcacagtgggctcaggaggacagtgtagtctttacaaaggagggaaccttctactggccttagagaaagttcactctccccaaacaaggctgtggcctggtagggcagtcacctaaggacggggaagattgttcctcagtaagtgctgcgcggggcttttgctagaagtggcatatttgttgcttagttgatggtacccgttgtatcaccctgaaatgcagggtactgtgaagacaaggaaaggttgtggaggaactcagaattgccctgtctgggggaaaaagccacaagcaggaaaaaaaaaaaagtttacagtgttagttaggttgtggagaatataaatgcaaaggcatcatcgaccactttaaagaaacagtttaaaaattacctttaaaaaatagaatgaaaaa

SEQ ID NO: 31184 - DNA, 1111 bp, Mus musculus
tagctgcctttgaatttctcatataaatatcattaagaaagggcctggagagatggctcagtggttaagagtactggctgctcttctagagttcctgagttcaattcccagtgaccacttggtggctcacaaccatctaatggggtcctatgccctcttttggcacacaggtgtatatactgatagagcacttattcattaaattaatcaatcaatctttaaaaatatatatatcattaagaaaggcaaagcatgcatcattgtattttaaggaaattgtatttcagtaagacagctaagtgaaaatgtacatagaagttagatgttttaatactgtttttggtgtgtgtgtgtgtgtgtgagagagagagagagagagagagagagagagagagagagagagagagagagagagagaaacagagacagagacagagacagacagagagtcagagacagagagaaatttatttgattttcaactctgccatttgtgtggagcgactttgccacttctacctttgattcctggactgtcttgagttttgacctgcattggactggagtgcagtaatggaataatgttcatgagacgtgcacaaggcatccaaaaaagtgtcacagccatgttgtttgccttgcctcagaatttacctttatgattggaagagatttattccctcattcatttgtatactaatccatcatttacttagtgagtgcatttgaaatatcccatctgtaatccttgaagttggctgattcaagaattaataaggactgatagctatttttgtaagtttcttgagttgtcctaatgaccattttgaaagctgtcctcctcgtgtgttgaaaacattgctgatgaactggtgtgtatcaagtgctagcggaataaagatgggcttctgtgcttgggagatgtagactggctttacattatccttgttagtcatctatcctaatagatatcctttgcttttcctttcctagtaaaaattcagctctcatagaaatacttttgatctgtctctacaagtttaaagatttggaatgagccctagtgtttaaacttaaaaaaaaaaaattgtgtctttttccagaagagcat

SEQ ID NO: 31185 - DNA, 1336 bp, Mus musculus
tttgtggcttaatagcagtggaggcccttagacatgtcgctgtctgtgacagggttttgaagcatgagcacacactctctgctgtattatttcagcagccattacaggagagaaagtcaactggcctggcaagatgagagggacagtgaccttgggcaaatctgtagaacagaagtgcgcaaatagcctttcaatgactagtccttcttgatcaagagagagagaggggaatgggaggtagtctgctgcctggcactttaattcattttagtggctggaagttgggtgatactgtaaaattagaaaaggaataggactttttttggtgctatatagagaaatgaaaatggggaggaataaaactccttttagagattcctctagaacgtcagcatggcgctgcctctcagaaccatgttgacttaaattctgacaggtttacagcagagggtttgtttgcatttgcagcaggtgcctgtgtggtttgctgagtttactttgcttcttaatgatactggggctcactgggacagggcagggttttataaattgtgcatagatggagctgcaaagtgaaaagcccataaaaaagaaaatatatgtaactgacattgtatctgggtaaattaagcaaggagagtttttttacatatatatatatatatgaaagtcaggcaaacccaaagttcattttccttgcccttcagaaatgccatcagccatgagaaatgggggattctgtcctcttgaactgcctgcataagtggctgccaggctttgggtcagagataaacaaaatcaacttcatttatttgcccaaaacttggataaatttttgcataagtctagaatataatctttcctgaaaaaaagaagtcatggtaatcaaggaaatctgtttttcctagtttttttttttttttaaacatagtgtccctgttgccttaaatgtaaaaacctattttgagaaacaaccccagtctaaaagttatagcaataaaagaaccctaatctatttttgtttcaagtctttacctcatgacaaagtcagaaggataattggtaagttttgctctgggtactactgcaaaccgatgtatcctttctgtgtcctcaatggagtattatttacagacctgaaggaaggtgggcttaaccccaaggctaagtgtaaatgtttcttgaattgattctttctgtggtacaagttaacacctgtgtatatcatatctgtatatatctgaaccaagttatgtgcagaggttgataataactatatttacaaaagaaatttttacaattaaagttcacattttaacatgagcctgtgtgctgt

SEQ ID NO: 31186 - DNA, 1253 bp, Mus musculus
ccactgctgcttctttgggtttagtcttaggagttctgtgagtcagagtcagactctgggatgaactgttcagaaaacctgtatgtcttcgtttgcctttgttgcatatgaaaataagataactatgtgtccccgtatggccttagatgttcatctgcttaaagacagaaactaattagatgatctttccaccaagttcaaggagtcaagttaggatcgcctagtcgtgagagggcaagtctgaaccttctctgttcgatggagggaccacaaaggaggaaagaattcttgaaatccttcctaaagtaagctatgagttatagcatccacccaccctccccactgcctcccagtcctcttggtcagtgctgaagggtggtgctggccctgagcttatagactcataagcattgaatatcctcttgaactaactaacaggttcaaataggtaagggaagaagtttccagtttctctaagagctctgtggagggatggtacacagtcagtcctacagcagatacttctgatgaattctgaaatatagccagggcccaagctggttaactcaggttgcaatgtgatgttaacaggtctctttaccaatgtgaaactcccacagacatctctgaagtagagacaacattccttaggctaagcaaggaacctaacagatttgtcagggaaaacataacagtgcctcccatccaagagaatggctggaaatcccagactaacaaccatgcctgcttcttttggtctgtgatgggactgcggtcactttgttctttggggctgggatactttggactcatgcactatgttggagggcagctgtgaaccatattcagaaagccatgtgaatagctagctagccagccatcagacatccatgtctgtagctaaagagcagccaggttgatgcccacagcagagagaacttcaaagagagggtccatgcctcttagttctgggttcttgaggcttattgcttagctcaagaatgttcactgtagctccttgataaaaaatccaagagtaaagaggttggtgtgtgtgtgagaatgccaacagacactgatgagtcagggtaacgtcttttctgtaaatatataagtttaggcactgacataaactgttccatctaattgattttttctcctctgcagtgtgggtttagccatcattccagtaacacaatgtttacagaaaacagctgtgctcagtggctgaagtttctcctgctttgtcctta

SEQ ID NO: 31187 - DNA, 1179 bp, Mus musculus
tgtcagcttcgccaagtgctgcattttaccatttccactataacaagagctgctggccgctcttaggtagcacctgcattttgccgccttctaaccattttacatgaattcctacctaatactatgagtgcagttcagtagagcatcatagaaagaccagtgactggagcaggggcatattgacatcacatgcagagtcaggtattagaaacacagcatctctcttggtttccacttatgctaaagccttttgcattgccaagacttttactttacacatactgttctgtaacaggagaatctgtgtacttccttctccaagggaaaacttacctcttttgttttattaaagacaccgggatttcagtagactgtgtatagattaatgatgagctttagaatgggaaatgcttatgggagctttagagtgggttattttgtatatgctagcaacctaaaaatgggttaaactctttctatccgtatatgaaaaacagtgatattatcataggttagtagcgataggacctatcacaaaaagcaggcctgtttattcccttatcaaagttgagttgtagctatgttagcagggcaggggttgtatggctcattcattgaagtcactgatggtgaaattccatgttgataattgaagaaatgcagttatagaagggcaaatgcttcttaaacaaccagttgctagaagcttctttgatgatgaaactgcagtcttttcatagaggagttttctaggtatctaaaatagcttaactcagaaatgatgtacagtgagagttcagaattaataaaagcatattctatatgcctcgttctcacatggtggcagcatacagcgtgagggcgtccaggacctgtgctcgccactggcatcctgtttatacttcagttgtcagctccagtcattaacgccattagcccctgtcagtggatggtcgtgtgtttgagtttctgcacgttagacattcacacctataattacacacatgctgtgtttatttaccccttagtcttacaaataaaagaagaatttatggttgttttggttgtcagaagtgttttaaagtggagggaatctgcattctcttcctgacgctcctgtttatgaggagtcagaggttctttctggtcttgggacttacctgaggaaagttatggtaa

SEQ ID NO: 31188 - DNA, 1115 bp, Mus musculus
ccaccaccctgccacctaattgtctgggtctcagttcctggaatgacgggtttctggagtgcgagcccagataaaaccccctgctggtccttcacttgccagggcggtaacggcctggtgaggactggaagctcccagttccctgctgtcttctgcccgggtttcatctgtgctgctggagcttgggagggtatgggttgcagccgtgcccctcaggtcagagtggggtgggaagaagctagttgttggcatccccttcctcctcatcaaaggactgcacacctgaggatgtgacatcagacaccttccggctgagagcagtggacatctctgggtcctctcgtggggaaagtgactccagatcccggcatcctgcatcttcttcctcctcaggggccagtggtctcttctcttcctctacaggtcccctggccagttccaccccaccaacctctgatgcccagtcagtgtctacccccaacaaaggtggaggctcctgagcagagtatcctgaagcaggttgggaaggccccatgtcatgcaggctcggctgtgagtcatcaaatgcagggccaagataggatccggtagctggagatgcaatgagggactgatcacttgcttcccaggcgtcagatgaccccagacagtacatcccctgtgacacgtaggagtgaggccatccatccattggggcttgagctagtgcatctgtaaacagaaggagcaggcttggaggagccacagaacactcatcatgggcagtaaggggagctcacagaactgtcctgttgttatgacactaatgcagaggcactggagaagctgagacaaatggaaaactcctaaaaaccagggacgggtagagggggtctacatagctgagaagcctcttaggccccaaggcttgactctagaaccatttctcaccctgactttccatcagctcctggtagttgtcactgtagttgcagtccagtggctcctgggtagaattgacactcatgtcctcaccatccatggaagaccaagccataagtgtagcctcagaaatagcaaactgttccatgacacctatgagaaaaaaaatgtaattttatttagagtcctcagcc

SEQ ID NO: 31189 - DNA, 1371 bp, Mus musculus
tggaacactggtcagtacttctaacacctacgatgggtccggccttgtcactgtggaaactgaccacccactcctctggaccatggccatcaagagctaacctacagtgcggcatccatcttgtgcctgtgccttcccttacctgcccactggttcgttgctcagcatgaacagccacataggtgtgcagaaatgtaaacttctccatggggaaccatgagctttcaaggtgttggggttaaggtatagctgagtggcagagcacttgttgcgcatgtacaaggccttgggttcaaccctccacaccacaaaataaagatggtggtgtttaaagattccaggtaatgctataaatgatatctcaatgttatattgagggaaaaattatggtctatcaaagcaaataagctgtattgtatggctaatatagctaatgaggatcattacattatgtaattcagttttgatcattttaatttagttaatcagtccatttaccttaaaattctttttttaaattttgaagcaccagaagcttttttattgtgttgccttggaatctggcacttccttaagtgcctgacaacaagggctgcctcctctgagtagctcctaacatcagactccggtctgtaatgtacaatagctcctcgagtgctgtgatagaatggcaccagttcactttgacatcatcttttcaaagataagaatcattgacttaattgttaggtttaaaagcaagcagctaatgggcttcgggtaaatgagaaatggcaattcaggattcattcaaacattaacccctgaaaacgtgaaagcacgctctctgagctctaggaatgtgggtgcccttatgaaaattgtgacacactcaaaggctttggcctgaggaatcgatcatgagcctggaaattcagtcacttttaacctatttcccactaggagcaggaaagatggctcagcggttagggacactagatactcttccagaggtcttgaattcagttcccaccaactacgtggtagcttgcatccatctataatggaatccgataccctcttatggaatgcaggtgtacatgcagagagaatactcataaacataaaaataaataaatttggagggaaaacacacttcacgctaaaaagcaaaatattactccatggaccatatctactgacattaccagaaaattagtgtgactatggagataaatgaataccacttgctgaggagtcaacaactgaagcctgtttctgcattccagtccaccatgactcgctctctctgctgtatggtgggaggaagtactcactgagtgtgtgaaagaaccacaggtataaactctaaatgctaacgtgttgcaggtg

SEQ ID NO: 31190 - DNA, 1189 bp, Mus musculus
attggttattactcttaagttttaaaatgaattaaaggtttttgcacaatatcataattaaatgcttccttcctttctgctttatgactggtctataacctctgactgtatggacatgtcagaaatcagtgaagccatctgcatggaaggaacgtatgaatgaagtgctacagtgaaacctgctgctctgctgcgttagcaggcacgtggtacagactaaaccctaccatcaagtagatcttgatatccagctctgccactttccagctcagtggaccttgaacaaggagcttgttttctcttttgagcagcaggtttgatgaatgcttttgtttttgcttatcaaatgttataatactgcaagcaccgtttgggtatttgatactatgacatgtctttgtattgttcacacttgtgacttctaattgggctttccttgcttaggttgacgtgattgtgacactgggaggtctcggtgggcgttttgaccaaatcatggcctctgtgaatacccttttccaagccactcacatcactcctgtgccgattataataatccaaaaggactctctcatctacctcctccaacccgtgagtaaacagcgcccctcatcagcattctgctcacagagccagtgttcctgcctgcctcagtctctcacaaagctcccttccttgaattgctctgttttatccactgccttgtgactgaagagcacaaaggtagaaaaaaaatcagattttctgtgggttagtgctttctgtttttgtttttggtgttggttttattattattattattattattattattattattattattactattattattattttatttttctcagaaaagaaagaaaatcttgtaacttttaattgaattgcctaagaattaaatttagcacttctgcattttgagtggctgagtgtgaatgacactcaagaaaagcctcaccagggaagcacagcttagcaagcatttcagatgggatcctcatggatttggagtgctgtcattatgattggaaactgggtttgattttcttagcacttaaaaggaaatctttagcttttactattcataagttgcctgcttattaattttgctccctcaagtaattctctaaaaaatgatgtcactcctcttcaatggtaagcatcacgaattcttctgccagtgtaa

SEQ ID NO: 31191 - DNA, 1187 bp, Mus musculus
tttgcagcatcacagtgctgaatccaagttccagggagcttggcaacgctaggggttttatatccctacataataggacgttgtatggtattccgtacttctaagagtagtccataaatactgaacagaagtagtctaaaagtacaggacacacagcaagctctcacagttgtatatccaacaagttgtccttttgtctgaactagcatatactgtttttagcctcatcatatcatgtcttttccctttggaaataaggatatagtattggaaataaggattttcccttgaaaataaggatatagtattggttaaagtttccgagaagctcataaatatctccttaacacacagtgtgccagagagataatttccagggaaaagctattgcacccagcttctgcacttatgttaggaagtatgatatgatacgggctacataggaagaaacaatgccagcttctctgtgacattcccatggtggccttggattgagagtgtagctctggagtaagcattcttgcttagcacgcacaggacatgggcaacaccccactttggaaaaggggggaagaacaaaggaagcaatgttacctcacatgtgtgagatctaaatcacggtgactgccttttatggactccaactcagctttcttctttgggctcattttatgtatcacagccttaattgttcaataaatcataggctacattataatactattttactctttatctagtgattgtacacaagcagttgaaactttcagtagtgaaagctaattataatgtagaactgaaatctgagcactcttgaagaagcttggaatatattgacaggtttcttctttctttttgaaaattactttaatttcttttatctccattcagcatcttaacacaagcttttagaaaatgaactaattttcagaagactgttctttcccacaatgttagaattctgcatggtgatagcatcctaaatttttactgaagtttgaaagtaattttttcctttttaaaatagcagcactgtcaagcccatggcagaatgatgcaaataatcctcgtgggctggaactattcctatcctacacatgtaatttcagatgtagtcaatctttatgcaagtttgaattctatgtacctgaatcaatacttcacacatgcctagatttaaaagttta

SEQ ID NO: 31192 - DNA, 1338 bp, Mus musculus
catgcgaattatttgctaccaagatggtgcccgtagggtaaaatgaggaacatctctgcaggatgatttattgtatgtttttctttttttttagcctagccagaacatcattataattttaaagaccataagatggcttttattagatgataactaaataaactgaactaagtagccagaagacagtaccttagagactgatagttgtaagtttataaaaatacaaatgtaacttatatttccattttcctctttgcccctttgtttattttccccagtagaaatgttctgtccagattttttttcccctttttagttaagccttgcttgcattcaggcttgtgtgtcagccctgtgtgccaatatgccagattcattttgtttccatccctgcactttggttattcctcgttcagtttcttgggaattgaagcagactcattgggctacatttagtacaagaaccacatgtgtgatgttaaaggacacagtctagtgatgccatcatccttgagtaaaaactacctctagattgtggtaagcttttactgtcccttaaaacaggagccactagtaccttacgaatgcagactgtaacttctatggcattttctggtgtctttctggctctctgggcttctgaaagttttcacgtagacccttagactcctctgtcaggaccattgctttccagcgttgctgctttcactcgctgtctcgcagactgtaccactgtaagtgccactgcaaacatctttaaacggcctcctccttggcttgtcaaggggaaggccacctgtaagatgtggtggtgacagccttcctgtccaccccaggctgctccttaccagctgttctagccgattctcttcagatcagctacagcccacctcctccccgccccgcctcacccctccaggctgtctcagtggtccagggcagagctcactgtggccttactgatctatctctgcagtaactgttctccctcagttgcgatggaagcaggcccctgcgatctgttcagagcctgagcagtttgcagttccgttgtgctttctgaggtcctagattcaggatgtagttaagtcgataactgagaacagatgagatgcttttaaagaacaaactcttccttacccagctttgtagcttaaagtaagttttcaagttcatggctttattaaaatgaactttgactttttaaaatgcttatatctcatttcggttcttttgtttattttagtaagaattgaaacagactataagtagttttcctgtttgtttgtttgtttgtttgtttgttttttacaaagttcaagaatgtaacaataaagg

SEQ ID NO: 31193 - DNA, 2565 bp, Mus musculus
aaaattaggaaggttgagaactacataactaaagtatactacaactatatctagttttaattcattaataaagcaataattaaaaaaaaatagccaggcatggtggcttatacctggagtcctagaatctgaagcagaggattgctgtgagtttgagatcagcttaggatacatggtgagttcaagaccagcctggattacagtgtgagcgtcttaaaagaaaagcaaacagcaatagctacaacaaaagggacagccatcccagggcaataccagatcattccagtccacattatctactctgttagggagtggtttacagcaggcaaaatgtggcaaatgtgacatttcacagtcatggaggaaggtaggagggaattcttcaatgaagaccagcggaaggcatgctgggagagaagagaactcttcccacttctccccaccaggggtgagaatccctctacttcatactcctgctttctcccctcactgccctctcaccctcctccctgctccatgactgggaaggaagctggcggtagaagggctggcacagagctggtgaagaggtgttgctgtggcagctcagaagggaagtggcggctcttacgtgcatcttcacagtacctcttgctgatggtttgccgcaagacggtggtgtccctatccaagcatgaagaacttctcagtgggacagtgtcacaccaggtttcctcatggctatggatggatggcagagaccgtgctagacattaaagaaagcaccaggaataatgtggttcggaagggttgaggaatgaggcagcttttggaagctgaacaagaaacgggaactagctttcgtatcagacacaagaagaggctactgtgtcattcagaagatagagtagatgtagggatgcaggggagcatccttccagaaggtggcgcctttgagccctttgctttagccagtcacacagatgccagactctgtacagactacaagactgtggctttaaatctataaatctgcattgtacaatgtagtaagaaattgaattcaagttcgtaaaagaccccgtgcaactccaaatctgagcaagtgttcccttccccaagcaatcttgtctagtagctactctgccccgggacaacttactttctaggtccaggtggcaatcctaaggaagaaagttttatccctagcgttcagcatttggaaactctccacatcggttctccctgggatatgcgttctcagcttcggggtgtctaaatcttatactctccctttaccagagttccttcccatgttcacaccctgtgtttagctggccttgtggattctgtctttcatttgaactcagactgctgtgcctttatttggcaaagtgtgataaacctagtctggtagagagcctggttctagagggctttactgggtgttgtggtaccagcagagaaaaacaagagcaggtgttaagcaactgtggtacccaaggctttgtgctaagctcttcttgtacggttttatttaacagatgtggaatagtgagattttccctcccctggtattactttgaaaagtctagtattgccaaagggggtgggattggccttcttagccagttatgtctgactatagaggcagcccgggcagctgcgggcactgtcttaagatttccagtgctgtgataaaaccccaatgccatagcaacttggggaggaaggggcttatttcaacttagctgtccagaacatagtccatctccaggacaggagctcaagcaaggctggaacctggaagtgggagctgatatagaggccatggaggagtgctgcttactggagagctgcttatgccttgttcatcctgctttcctacagcatcaagaccatcagcccagggatggcactgcccacaggaagctggctcctcccacaccagtcaagaaaatgtcccacaggcttgtacacagaaaaatttgtttggtgttccctcttcccaaatgactagcttgggtcaagttgacatagaacttgccagcactggtacagcttcctcaacggaagctgcctggccctgttaatcaggaaagggactcaaaatcacctgcattttaaatatttacattcaaaagagaatatgcatcaagtcagataaagccagcaaaagcctaacctgaaaagcccaaagaaatgacgtctcattttgcgggcattgccaggtggccgtctcttctcaaatgaaccctggtgcattggccacggttaagtgtaataatttcaaggtaatttctttgaggtccaagtgagctattttgctgaacattaagctggtggtcattttcctggcagttaagaggcgataagagattgtgtaaaagagtctcattaaaattaaagactgtgactccatgtgccccaggacaaccttaaggggacactaatttgttcaacatttaccattaagtcattgaaagcatactgatgctggctgggcctcatgttgtacaggagtgtaaagctttaatgtccttgcaggtattagtgtgcagtttcagctcatttccatttttttaa

SEQ ID NO: 31194 - DNA, 1173 bp, Mus musculus
ttaagcaacagttgaactttgtaggtactatctgtcttattttgtgtgtgtttagaggtgttctaaaaacccgtggtaacagggcaagttttctacatttttaagagcccttagatcgtggatatttttttctcaagaaaaactgatacatatccatgcagcctccgacattctctttcttttgcatctagtcgacttttaatgggctgttgtagcaactagtttgtgtccaaataatatttcttttggtgtcccataaaatggaaatgagaaaaggggcaaagagcctatttgcccagtcttcttcaatgacacctcagtctaggccagttttctgaaggttcctgtctggcttagccagggaagggagagtgagtggcctgtcctgcagcaatggaaccagcacacgtggatacaagcacccaagaatccagctaataaatgcatattgggcttattgcttttgttttttattgacttctacatgctgatgtcccatgtatgtagtcttagacctgtttaatatctgtaactatcagctataatattgtggtgaccaactgctataggattttgcctctgttttaactacaacatattggattgtatgtgtctgtgcctccatgggggattagagccagagggaatgtcttctttgctctgtttcttttatatttataacaaaaatatggatactttctagtgaatgcataagttagtgtgcttttcttattttgctttaaatttcaagtttttacactgctgtgataaaatcctcacagatagcatcctctggatggcacagtacaataaagccaacttgcagctgctgttactctggaatcatgtgggagacactgccatattttaaaccaactttatcacaggaactctatcatgatacagagacctgtgacagacacattagaatccgaagtcaccatcaacctgatcatcagttatggcttctcttctagagaacatgattgtctagtgaataacacatcttagggtaatcaggaatcttgggaaatttgctccaaaaatttttcttgattttatgtaacaataataggctttgtgtaagtaaatgggagcaattcttcctattggagcacccaaaaagaatttaatcactttatttttttaattacacaaaagttctctcttgaa

SEQ ID NO: 31195 - DNA, 1215 bp, Mus musculus
agtgttagcttttccaagtgttaagtgaagaatttctaaaacttacaggcaactagtgagattgcattgcttttcttaccttttagctaaactcttctcatttttctgggaatttcctaagcttgttctctgctgtgtcttcttttgagtttgtctgactattatgtaggtccaatgctctgtttcaacctttgatgactttagaaggtaaagaacgacaacagtctcttatacttgtttttctcaacgttttttcaagaacaataatagttgaatgattttggatgaaatgtctaaatatattttacatacataccatagagtgagtttatttccatgtagaaagtgagaatgtgtgaaatacctatagacacccacagattgtttctgtcagtgtcttgtcctgttaccaaccccagaaagtagaattgaccagttctctcttatttcatcttcaggtttgcctgcaatgagactttactctctacacttaaagaacattctttctgagctgctgtgaataaatttggaatgattttgtctattttcaactaatggagaactagctgtaacttgaacaaggattactgtactggacaacttcagaacattgctcacaatgtcatcaaacaggagtcagaatcctcatggactgaagcagattggtcttgaccagatctgggatgacctcagagctggaattcagcaggtgtataccagacaaagcatggcaaagtccagatacatggaactctacacgtatcctcttgcttgagctgtagttggtgtgtctagggttggattattttgtgttatggtgtttgaattattaggaatgttatgtcatatttccttctttgtttacctataataaaattctaagttcatttttatatctctttttcagcagaggtattttggctagatagatatttaaggtggtgctggctagtaaccccagatgtttgtgtgtgtgtgtgtgtgtatgtgtgtgtagcactcatggaggacaatttgaaagaatcacttcctcctgacatcacattgtgggtctcagggttgaacttaggtctttaggcttggcagcaagcacttctacctgctgaggttcttaccaacattatcctccccccactcccgccccaccatatcattagcttctatgtatgtagatttagccaactatagattgaaaatatttgaacaaaaaagtct

SEQ ID NO: 31196 - DNA, 1122 bp, Mus musculus
ctatgtctgactggagcttgtccttcctgtgaccctggttatgtcagaactcctcagagtcaagctgtctctgggatcctgagatcctggtgtgactaagctcctgggctcctgggatctttggagcgcctgggagtggagcttgctctgggtgttgtgggactggctgtggagtttgcacccaaggtctgcacagggaaccagcccagaccagaaggaacctgtgccactggtctggtggagttcctgcgtgcggggtccagctggtcccagttgttccctgtgttgggacagatcctcctcacctctgatcctgtgctcgggcttgctgtcttttaactttaccagcattttccactttagttttattgggaatctattgctatataaacagaaggaaatatgtttatgttaattactgttacgtctatggtatgtgttactttccttaactttctccaagtcatgtttataactactgtactagtgtgcatcagtccaaccaagcccggggtgctggagtccctccttccaagtcaaaaaaggggcagactcctgggggagctcagtttgttggcttggagttatacaagcgattgaaggaatttttgaagaattatttgacaaatcttcttaaggtaagatgtctcgatggtataagcatataaaaatgtccattttgttcacttttttcttacgtgcaatgatttttttgtgactgccatctctgtcatatttgctgctttagattaaaattgtgcttacactgggttagctcttgctagatccatatcctatgagttaggggctcattagctcaaaccattgcttaggcaaaggtgagtctttttcctttcattttttttcaaaatagggtttctctatgcagccttggctgtcctggaactcaatttgtcttggaactcagacccacctgcctcctgagtgttgtgatttaaggcgtacaccaccactaatggtgaaatcttttaccttagcttctgcctttggtttttagtagtttgttctgtaacaaaggaagtgggttgccttacactcagccatcaggtgatcaggtagcttcctcacctggtattgtgtatatgatgtcttcagtctaca

SEQ ID NO: 31197 - DNA, 1164 bp, Mus musculus
atataaactcagcagtagtacttgttttctttctaactgaaactattcattggtctttaagattaaaacagaactttcttagttccatcatcctccatcaaagaaagatggaacaggggaagagggtacaaacagcaagaacaattggatcagagcttccagcaacccagacagatgagaataacagaaggtgcacttgggagacagcacaaacaattcagctatgccttactgagagaactctccaatcttagccacaaaaggggagaaaggcaagggtcctggagagaacactcggagcaccctgctcatacagagaacctgagattggttcccagcactcgtgcctggcagctcacacctgcctctaaccccagctttctgtacctacacacattagatagtcttaacccttagaaaggtaaacttacaaagcaataataacccaacaacccagctgtaagatatgtcttaccagaggagctggacgtctcatcttttttctcttcttcttctttatcattgttctctcccccagtttcagtccctgcttctctgtcactgtctgtatcctttgactccagcacactgatggtgggggtgctgggtctgctactgttattcggaagtcttcctcttctgcggccccctgggcgtttaggtggtgtctttatacgctcagcagtaagagcagcagcaaactccttagctccctcctgtaaaatgaaaaatagaggcatcagagtaaagttctaaatattttggtggaatagagtaagacgacattgcataacacaagttgctcaagactctacacagtgtccattatcagtcattagatagcaacacacctatctattttccatctgcttttgatactttcaagattccaaaaatataaaaatagattcaatattttgttccaatgatgcaaaatcaggcaagacagttctacatggtgagtttgtaaaattaaattaaaatatagtaaatgaaaatatatttcaaaaaataaaggtatttttctctacatatacatacagtacgtttaaaagagaatatcaaaagacatattgaagtgtattaagtcagacttcctatttcaaggcttaaaataatacatacctctttaaaggtactatttaaagaaaacaagaacacaaa

SEQ ID NO: 31198 - DNA, 1149 bp, Mus musculus
ataatcaaaaacttagtttttactctaaaaatgtgagcccttattgcagtaaaaactagcttgtggtatagtatacataattcccataatgagatcacatatatgtaaaccttctactatttaagatttacagataaaagtatgtgtttataaataaaaatatgttttaaaagctgggcacagtggcacttgggaggcagaggcaggtggatctttgagtttgaggccagcctgttatggagtgagttccaggacagccagggctacactgagaaactctgtcttgaaaaacaaaaaaaccaaccaaacaaaaattaaataaaatcactcagtgacacatttccaggatttaactatacagagtacatgggcttttctctacaaatatcaacagtaaaaatgttttgttgatatcagtttgcttgggattaaaagatcatattcaagctggttagataagtgattataatatgaaatcattgcttttagaataatcatgggccagactgggaagaaatctgagaagggaccggtttgttggcggaagcgtgtaaaatcagagtacatgagactgagacagctcaagaggttcagaagagctgatgaagtaaaggtaatttcataaaaatgcatatataattgaaacgaattccttctacccccaagttaaatagatttacttcgaaatggtacattttcagtcaaggtcatgtttacagtaaagtcgactgagacctgaaagcgatggttcttgatttgtcttagttaaaattacatcatgactgtttggtgctgtgctgggtgcctctaatgccagcacttggggaggtagaagcagaaggacccgaagttcaagactggactgatgagaggctcatcaggtaaaagcacttgctgttaaatctgatgacctgattttgatccgtgggaccttcatggtggaaggagagaaccaggccccacaagtcctctgacagatagctatagaagcgctgtagtatgtaatgcacaggcacatgaatcaacaatgtaataaaaaataagctcaagatcatcctgggatacatggattctttctcaaaaaatgaaaaaaaatcatgctcattaatggtaacatttaaattaaggattactcagcctgctgggaaa

SEQ ID NO: 31199 - DNA, 1156 bp, Mus musculus
gccttgcggtgcggggtggtgcgggtgcttcttgtgagcgtttgccgagagagttgtgtggaaggtggggggcctggagggcgacacgactggagcaggaggaggaggaggaggaggaccagctaggagccggtgctcgtcgctcgtcgctcgtcgctgatcgctggtcgctggtgggcgatcaggcggcaagagtcgtcggcacgttggggttcgggttccgggttccgggttccgggtcggcggcgagtgtcggttcccggcgcgaccggcaggtgtcgccgtggcacgggagtccggtgtgaggcaggcgggagggagggagggaggaagggagggagtgaagagtgttgggcgggcgtattagggagcgtagctgttggtgttgtggttgtgtgtgcgggcgtgcggtgggtgtgaggtgaggctgcgctggtggtgtgtgggcagtgttcaggtaggagtatgggggcgtgtcgggtgttgtgtcgtcatcgttggtacggttcaagtagggcgtagcagcgcccgttcgctgccggtagtggtggcgcacgccggtaggatttgctgaaggaggcagaggcaggaggatcacgagttcgaggccagccggggtacacatttttttcaccctccgctcctcaccctttcctcaacacacttcttacacactcacccctgcgctcctcctcttctttgcactcttcaaaacacccgaggcccaacacccgacccggcaccaccacaactccacacgcccacaacacacttgcgtgcctcacacccttgcctcacgcgctctcaacagcctctgcccacaccaccgggaccttcatgctcttcatgcccttcatgccccttcactcccttctccttctccttctccttctccttctccttctccttctccttctccttctccttctccttctccttctccttctccttctccttctccttccccttctcctcttctccttctccttcgcctcaccttgcctctctttgctccaccaacgaacacacggaacacacacacacacacacacacatgcacacacacagagcacagtgtgccttctcctcgcaaaacatgctcgcactggaatccttggacagctcccttgcgcctactctgggcaaaaggtccacc

SEQ ID NO: 31200 - DNA, 1251 bp, Mus musculus
tttattgtttgttaaacattgatggcttctgaaggaaacggcaagaaaattcgtactttttctcccccggtagaggtcctatttcagctgcgtgagaagctttgacctccaatttatttttgtcctctgtactgttgagtcgacaaaacccagtaacttcccaagctgactccgattctctcgttctcaagaaaatgcggggtcacattctcagatttctcttgatttaaaacttactttcttaattcaccgcttttaatactctcaggattcctgcaattgtagcgggggggaggggggggagagcgggggggctattttgcataccgattacccagcatgctttgaaccagacgttatccggaagccctgtaaggtcgttgaaatgtaaatagatttttcttctaaattaaatacttttctgtggttttattattacgtatgaggtatgtatttggaatacacaaacatatttttaacagtttatgctcataatccaccatgacttgtaaagggtgaatattataaaccttatatatctacaactacaggcctaactttcggttggtccgagagtagtggtgtttacaactaattgatcacaaccagttacagatttctttgttccttctccgctcccactgcttcacttgaccagccttttgttgaatgagctattaacattccctcctgtcggtggacaaccaaacattttttaatcactttaagaaatgattataacatcactatctaccagcgtaattgactaagtataagcacatcacctaccactttaagaagggaaatccctttgtgtcagatccttctgtttactgagagccttaggtttatgtgttaaagtgacccatccatatacattcacctccctgtccccagtgtcaaagagagggcaaaacagagcaaactgtagaggaaaaagcaagatctgcaggttgcaaagttatatgcatacgggtttgctctcactccacataggaaatgagtgtgtctttttcgtaagtctattttgaaacaaagttaaaaagatgaaggaggaaacgtgcaaggctgttaacctagaaatgattctcctttctaagtagggggaaactctggtgttcttatttatttcttggactctggttcatgaccttggcttctccaagcttttcttttaaaaatggtaagattgtgatactgaaataaaattctgcttctgttctgaaatgattggcttttggaaatcagaat

SEQ ID NO: 31201 - DNA, 1419 bp, Mus musculus
tgtgctcaatagttctcctgcattggtcagtgtctctgttagactgaattttgtagagactgggagagtgaagataattttattatagaatattgcccgttgttggggaaggttttaaaggggctaagtccccacctgtgagtggggctaataactcctggtagttcaggttgcctcagtgcctggttcagatagagtggcaggatccatggggttttaagtactgacacctcctctttttgttttggcaggaaaactaaagccagtcatcaaatcacagccagtacccaagaacaacaagggaccagtcaaggtggtggtgggaaagacctttgatgccattgtgatggaccccaaaaaggacgtcctcattgaattctatgcaccctggtgtgggcactgcaagcagctagagcctatctataccagcctaggcaagaaatacaagggccagaaggacctggtcatcgccaagatggatgctactgccaacgacatcaccaacgaccaatataaggtggagggcttccctaccatctattttgctcccagtggggacaaaaagaacccaattaaatttgagggtggcaacagagatctggagcatttgagcaagtttatagatgaacatgccacaaagaggagcaggaccaaggaagagctttaaaggcctggctgtgtgcagaaggtggaggcaccaggcactagtggacagcattggccaccaagcatgtgagccatcagtgaaatggcaggatcttgacttttttttatattttgttaatgccacctcatgctctgaatactgaatagccacgagtgacttgatgatagtttagatcagatttttatggaggatacatctatttttatcattttgggtcttctttttttttttttttttttttaactatttacttcagtatctcttcagacaaataagttttggatcttctgtttaagaatcttttttttttttttttaatttaaactttaaaagtctttgccaaatcatgttgtttgccttttattttcttgtttagcttaaaagtagataactatcggtatgtttgttttttatttcttcctgctgatgacaccaagttgagggctcactctcccctgacagttggccaggatgttgtttcagcctgatgttagagccatgtccgtgtccaggttgaacagtatctgatgctggatggacatagccattccagtatctgacacaccgtgatgacaggtagtaatggagtgtggccactactggttcctcaaaccagtcccgctgctaaaataaaatgatctcagacagccttagaaacttcggggtgtgggctggtgagatggctcagtgggtaagcgcacccgaccactcttccgaaggtccagagttcaaatcccagcaaccacatggtg

SEQ ID NO: 31202 - DNA, 1175 bp, Mus musculus
tacagctgtttgtgtgaatgctatgccctcagcacacagcccccagagaaaaaaagtgggctcggtgtgacagctcaccaaccacgtctttcgcctgagtctaaattctaatctgaggcttccctgctctctagtacaatctgaatgctctctagtacaatctgaaggttaaaggtgtggctgcgtgtggccagctgcagcgccttgcctggccatttattagctgcaattgtatctcaccttgtcatctgtaaaagggatttcagggctcttgtggacctcagttaactgactatggaaaagcccgcatggttcagtccatgtgtatagttactgtttaagaccattaagctttttctcattgggtttggagttccagtcagaagaaatggtgtgattagatggggtgagtgagctcacacaaacatctgtgcttgacagtgactctgacggcacgttagctagagctcccttttcattgtgcttgctcttagtctatgctgtctttgacacagggctctacagaagcatcagccattaaggactatgtagtgaaacatgccttgcccctggtgggccatcgtaagacttctaatgatgctaagcggtacagcaaacgccccctggtggttgtatactacagtgtggacttcagctttgattacagagctggtgagagaccctaccaacacctttatagggcgggggctaccatttttagacatcttgttctagaacccttaaagttagtggtatgggcatatttttgcctctagcatcggatttcgagttctgagccataaagtaccctttttccttcctgatttagtaaaaggggagttaagagtcaaacctagggctaaagagttggctcaacaggtgaaaacagtgccaatcctgaggtattatactatgcattctataataaaaattaaaacaaacaagaaaatagacgataaaaaaaaaagtcaagcctagtaccttcatagagatgatgtagcagatctggtgctgaactggcttctcagacagagctgtgttgccagtacccaggtctcctggggcttagttggagttctatccttaagccagctgcttacacagtgttgctataccagaaatcctttcctatctggtcgaggtacttctgggtctgggccttgtcggagagcgtc

SEQ ID NO: 31203 - DNA, 1198 bp, Mus musculus
gcagtttgctccagaatatgagaaaattgccagtactttgaaggataatgatcctcccattgctgtagcgaagatcgatgcaacctcagcatccatgctagccagcaaatttgatgtgagtggctaccccaccatcaagatcctgaagaagggacaggccgttgactatgatggctccaggacccaggaaggtgagctccaggatgtgagctgttggggaatggtacctaaggaaaagcacttaaggttgacctctggcctctggcctccatacaccggtatatatacatttaaaagaaaacacacattctctcacgcatacaaatggtcgcctttatctgtatctgtcatagttactgttctggtcctatgaagagactatgaacatggcaactcttagaaaagacatttaattggtaaggaaggtccttgcttagggtttcagaggtggtggggagcatggtgagaggcagcacacattggagcagttgctgagaggtccgtcctggtcatacattgagtctcatgtttttctgttgttttattttttagaaattgttgccaaagtcagagaagtttcccagcctgattggacacctccacctgaagtcactctttcattgactaaagataactttgacgatgttgtaaataatgcagacattattttggtggagttctatgccccgtggtatgttaacagtcagattcatgatattatgataatgagtgttgagaattctgctaagcattggtgaagggttgcagtgcacagccagcaaggttaatacagagcaaggttaaggtagcgtctgggactaagggaaatcatgggaggggtgtacatggaaggaaacaagtcctcactttaaactttactctgtgtgtgtgtgtgtgtgtgtgtgtgtgtgtgtgtgagacagcatgggtggtagtaagagaacagctttgtggaatacttgctctctttccatttttgttctggggagttgaactcatgttgtcaatcttgcgtgacaagcactttcacctgctgaaccatcttgccagtctgttttttgatttcttgagaactttctctggaaccataaggccacacaaattgtgtagtgcaagctggcctcaaactcccagagatccatctgcctctgcctcccaagtcctgggattaaaggcttgccccaaccactcttttgcc

SEQ ID NO: 31204 - DNA, 1199 bp, Mus musculus
gtctcggatgtgggaagagcttccgcctaaagcagtacttggtgagacatctagatatccacacaaggaagagaccaccccagtgccctaagtgcaaaatgtgcttccatcatgaacgtacccttttcagccaccacctgaagaacagttcttcccagcaccccacatgtgacacgagcttccggacagatagcagtgttgacctgtgccagcagattcaagagaggccagccttctggagagaagacaccaacgtgccctcaagacagaagccgggtcccagtctggactgtgaggactgctgccacatgggtagcaagctgaagggcctgcagtgtggctgcatcctaggtgaggacagaccccactcacacacagagtatggcaattgcttcctctcacagtcgaagcaggcaggtctctgcaggacacacacaggagaaaaagcctctcagtgtccagaaagcaacaagcgcctctgcctgagaggcctacagaatgtccaccaacatgggcttcgtggagaaaaaccagtcttctgtagaaagtgtggtcaaggattcaccaagcattgcggactcacagaacacacccgaatcctcagcggggagaaatctttctggtgtgcccagtgtggaaggaacttcagccaaaagggacagctgctgaggcaccagcggcttcacttagaggaaaaacccttccaatgcacaatgtgtgagttgcgcttccatctgaagagcaggttgagggcccaccaactacaacatggtggagaaaggccattctcctgcagtgagtgtggccgagccttcacccatcagtgcaagctccgtgagcatctgcgagtgcacagtggagagaggccctttcagtgtcccgaatgccacaagagcttccgcctgaagggcgtcctgaaggcccatcagcgcatccacagcaaggagaggccattctcctgcggggaatgtggcaagggctttataagacagtctaagctcacagagcacttccgcgtccacagtggagagaggcccttccagtgtcctgagtgtgacaggcgctttcgcctaaaggggcagctgcttagccatcagcgcctacacacaggagagagacccttccagtgcccggagtgtggcaagagctaccgtgtgaaggctgacatgaaggcgcaccagctgctgcatggcgggcag

SEQ ID NO: 31205 - DNA, 1203 bp, Mus musculus
tgcgggcagtggctgcggtagctgctgcccaggcggcctgcggcggagcctccttgctcacggcgcgcgcagcaagccctactcttgcctggaatgcggcaagaccttcggcgtgcgaaagagcctcatcattcatcaccgcagccacaccaaggaacgaccatacgagtgcgcagagtgcgagaagagcttcaactgccactctggcctcatccgccaccagatgacgcaccgcggtgagcggccctacaaatgctccgagtgtgagaagacctacagccgcaaggagcacctgcagaaccaccagcggctgcacacgggcgagcggcccttccagtgcgcgctctgcggcaagagcttcatccgaaagcagaacctgctaaagcaccagcggatccacacgggcgagcggccctacacatgtggcgagtgcggcaagagcttccgctacaaggagtcactcaaggaccacctgcgcgtgcacaatggcccgggcctgggggccccgcggccactccaggtgccaccagaaagagactagggttgggctggggggcggggaggaatggactggagttggggcgggttagggttctcctgccccaccgttctcagcgcacctccccgccctctcctcacctcctgctggaaatcggcacaggaattgcactccagacagggtattccaaggggtggacctgggtaccccagtactgtccaactctagtggacagtccagctcatctcatagggtggacccagtggccagggaaggtcccagagggacagcaaggcagcaggaatcgttgggacacacctcggacacaccactggccactggggttacagattctgatcagggaaagcgaccagagagtctccaaccccttctgagaaaaggaaatatgatccatcctgaaggtgaggagacatcctgaaaaggagagcaaatctgcggtgtggaagctgagggaagcgctaagggtaacatcctcatgacaacactgcctcgcgctctaatagcgctttatacttttttaaaaagtgttttctatccgttatctatttacacccttagcttatcccttcgagttaggtggggtagggttttcctgatgtggtaactgaggagagtgagacacaggtgagatagttgtttagcaagaccacatgagaacagtgcggccaagccgcaccagggct

SEQ ID NO: 31206 - DNA, 1117 bp, Mus musculus
gaattgagctgcaggcagtgggcatggccactgtatctgtatattctgtctttggtctatagcctagaatcccagagactcttactgtggtcctggagtcactggcctcctgtctgcgagaccttggtattgtgctcaatggcattgctttgtgtttctaggtatttctctgagtccagagcaggccccaagtccagctagccctgcccaggaggaactgaatcaaaggcagacacctgagcagcagcaagaggaagcaaccatgattccacctgagccaggcactggtaagtgagaacagctggacagcagcaacaagccagatgttgaactgtgcggagtaggctcttgggagctgaaccttgaacaggtaggtttagtcttttcagtgctcagatgtctgaatagcactgtgggggcctggacacacccatctgcctggagtaaggggaagagtgtgaatgagctttctaccgtggccatgtctctgtctcacctcccagtgtggcactaggttggcacactatagtttctcaggattctttctgaaaacttgagaactctgacttttctctttcatccaggatctgtgtctgcttctgtttacaggtgattcctgctggtccttttctgagactgactcagagaatatgagtgtcatacacagaactgggcttactatattctcttattcttctcttactgatgacctcactcctaacccttgttgccttccttccgggggtttctctgcatttcccccacagcacatgacttctcctctggtgttccatccaaccagtataaactcaagctgtatgcatgaaatttgtgagatgagacctggggcgggaggagaatgcctccacccattgaaaaactgggactctgttctgggaccttccctaaccttctgttattttgagactgatgaaggtgacagatgtagaggggcggcctgggcctacatgggattggcaatgtggcctttatagctctattctcatctcagaagccctccagatggagcctgaggatctgttcttcctgccagacccttgagtatgtctagggcttgctgaggaaatggccatactccgtgatacttgtgtcaaga

SEQ ID NO: 31207 - DNA, 1203 bp, Mus musculus
catcgccggcttctgcagaggattccgcagcggtcttggggccgcggtcgtggtctaggccgtggccgtggtcgaggccgcggggctcgtggaggtaaagctgaagacaaggagtggatccctgtcaccaagctgggccgcgtggttaaggacatgaagatcaagtccttggagatctacttgttctccctgcccattaaggaatctgagatcattggctctttcctggatgcatccctaaagaatgacgttctgaaaatcatgccagtgcagaagcagactccggctggccagcggaccaggttgaaggcattcgtccctattggggactacaatggtcacgttggtcttggtgttaagtgctccaaggaggttgccactgccatccgagaggccatcatcttggccaaactttccattgtccctgtgaggagaggctactgggggaacaaaattggcaagcccctcactgttccatgcaaggtgacaggccgcttgtggctctgtgctggtgcgtcccatccctgcccccagaggcactggcattgtctctactcctgtgcccaagaagttcctgatgatggccggtatagatgactgctacacttcagccagaggctgcactaccaccctgggcaactttgccaaggccacctttgatgccgtctccaagacttgcagctacctgacccccgacctctggaaatagactgtcttcaccaagtctccttatcaggaattcactgatcatctagtgaaaacccacaccagtctctgttcagaggacccaggctccagctgtggctaccacataagggtttttctttttcttttttttttttttttttttttggtttttcgagacagggtttctctgtataggcctggctgtcctggaactcactttgtagaccaggctggcctcgaactcagaaatctgcctgcttctgcctcccgagtgctgggattaaaggcatgtgccaccactcccagccacataaaggtttttatacaagaaaaaaaataaatgaattaagtccgctaaaaacaaaacaaaccaaacaaacaaaaaacctaaacactgagtgtttgctgggtaaataaaaaatgactgccaatgactgtggcaataggctttgggtgcctccatgaaacagaacaatagattatttagtctggtgtcaggaatcctgtggatgtttg

SEQ ID NO: 31208 - DNA, 1175 bp, Mus musculus
caggcttatcaatctcatggataaatatgttacatgtcaacaatgataaaaacttggcctcgtgggaacagatttttggtttttttaaacaggatggaactaggtagccctgactggtctggaacttgctatgaagaagactaggctagcttcaaacttacagaaccctgcctcttcctcccaagctctcaagaccaccatgcaacaccaccttcccaatcagaaatactttcttaattatagacaatcccaaaccagtgccctgtgtgggggcacagcaatgtcagtgttcaggaggctgaggccagcatgtgctctacagaggccagccagggctatagcaaaagtctgcctcaataaacaaacaaaaaatctaaaacttttaaacgatactatcttttagtatgcattcactccagtaatgcctctcatatttagcccacgtactcggtagcgtctccaggcccctgccaaaccctccaaatgggtgcctgctatgtgagagaaaggtacgtagaggtctcatgaggaatccaaagacaggcaggctgaaagcgagacctaaggaagatggtgtggtgtgcctcccggtaccaaggaccccactccacctttcgaactgagcataaactgctggaatccggaataagccaggctttgggactctggtttcagatgcctggcttagctgtctggccactctctctggcacgattagaagctctgaccttgggaaagatctccctaccccatcatctaaccccttccagagggggcaagcccttcagacgcccagagaacccccagaatggcccatctcttctgccccaaggacttttaaagaaacctctcaaatcccaaacacgtgtgtggcagtgagacaacgagccaaggctccaaaaagccatcctattttctaatccccgaacagtattttttgggttctatatttatattttcaataaatgtaaatagatcattgtttatacctttaaaccaattttaatggtgtaaattccaaatgtccttcctcccagcatcttctccctggcctccataggcctggcacactacctaagctcctgcaggcccccaccacgtcgggctgtgctggccgttgtgctgccccctggcggccagcaccgagagggcctcggaggccggcgcccacctgg

SEQ ID NO: 31209 - DNA, 1177 bp, Mus musculus
tgagctcaggcaggatgtgatggttcttgaggctggttttccccactgggtcttgtcctccagcagcttcacagtatgaccagcaggaggctgagaagcctgcttcttcaacgagatccctgttaagctctgggtttcatggctagttgtctgatggtaggattcatgggacaggaagctagatttgccagaaggaggaatgtggacaaatgtatgtatccgtgtgtgtgtgagtttgtgtagcacaaagtctgttggtgaggttgaagccatgttgtacttatccaggataaaggtgttctagaaagtagataaatgctttctttctaactttggaacagaggggatcgtgatcaagacagaggagcaggaggaggaggaggaagaggaagaggaggacgagctgccacagcacttgcaatcccttgggcagctgtctgggaggtacgaggccagtatgtaccagacccccctacctggggagatgtcccccgagggcgaggaaagccccccacccctgcagttgggcaacccagcagtgaagaggctggcacccagcattcatgggcatacgcatgggcatgggcacgggcacgggcacagtgaacggcacctgggtgagaaccgtgggaactctagccagcagcagcggaatcggcgtggtgagaggcccttcacttgcatggagtgtggcaaaagctttaggctgaagattaacctcatcatccaccagcgtaaccacatcaaggaggggccctacgagtgtgccgagtgtgagatcagcttccgccacaagcagcaactcacgctgcaccagcgcatccaccgggtacgcagcggctatgcctcccctgagcgcgggtcagccttcaatcccaagcactcgctcaaaccacgtcccaaatcgcccagctcaggcagtggcggcggccccaaaccctacaaatgccctgagtgtgacagcagcttcagccacaagtcaagcttgaccaagcaccagatcacacacacgggtgagcggccctacacgtgcccagaatgcaagaagagcttccgcttgcatatcagtctggtgatccaccagcgtgtgcatgcaggcaagcacgaagtctccttcatttgcagtctgtgcggcaagagtttcagccgcccgtcgcatctgctgcgccaccagcgg

SEQ ID NO: 31210 - DNA, 1167 bp, Mus musculus
cttttatgtgttgttcctaatagagtatcatcgatgtctagatcagtgacacttttggaagagatttgctcttttggaatgtgtcttcttgcttccaaaactgagaaccttttagtgtgaacgcttgtctcttggattgttttgccatctggagactgtgaccttcaatcctgtctttccttctctccttgaacacaggtccagcagctggacatggaggacgatcgctcgtcaccactgtcattctccagtgtcccacacgaagagtctgtgcgtcaggcccctgctcgactccctagagaaactgtgttcccttcttgcattcttcctccaaaagaagttcctcctttgtctcccactgcctcccggcaaggtgtcttgccccagactgacagtactactaagcaagagacatccagccagatgtcacatgttcttcagaaaggaccttcactcctgtatcctgccacttctgagcaagacacacctcaccaggtatcccttgcttcccaggaagaaacccagtgctctccttcagcagctgctcaggggatccccttcctctcgcactccgcccaccgtcaggaagctccactccactctcctgaggttcctgagaaagactcgctgactctctcacccacagttcccgagaccgacatggaccccttgctccagagtcccactttgcaaaaggacactcccttccatacctcttctgccgcccagaaagaacagccactgcccactgcagagatcactcgattggctgtgtgggctgctgtccaagcagtggagaggaaactggaggcccaggccatgcgactactgactctggagggcaggacagggacaaatgagaagaagatagcagactgtgagagaacggctgtggagttcgcaaatcatctggagagcaagtgggttgtactggggaccttactgcaggagtatgggctgctgcagcggcgcctggagaacatggagaatctgctgaaaaacagaaacttctggatcctgcggctgcccccaggcagcaatggagaagttcccaaggtacacacatttcattggggtcttccagaggcatctacagggaacgtggtttagggattctgtcagttgaaagaaagtgaaagtggtagttgggaaaggaaaaacaagaaa

SEQ ID NO: 31211 - DNA, 1149 bp, Mus musculus
gtatgttcaccgtgtcttaccagtgttagaaagatggtcagtgggagaagggcactcccagccatggaccacacagccctatgggaggttgagttccaggtctgtccaggcatgttggggcttacactcagcagtaagaaccctactagaagcagcccttaccttctgaaaagaccctttaagccaaggcctgactttttcctgttttgagccatctgtggtacctgtccaaggtggtaactccactatagtagtgactccttggcctggctaagaagaatcatatggagctgtagtagtgttagatctgaagtcacaggaagccagggcctcccatcttgggctatctccattacccacagatgcttctgttggctgcccgttgtgtagtatgttcattttcaaaatggcttcactggttccacctcacatctcatcccaccattaaccatgactttggaaagcaggcagacaggcagttcttcttagagaataggaaataaagggctcagaggggacacagcctctctccatgagtactgtattgtaggagctgggaagagccgcagctgataaccagttctcctggaacaatggtttagggaaggaaaggttttgagatcttaccctctgaaaagatttgtgccacacccatggatcaggccatcaagtcacagaactcctgcatcagcagctcgagctggacagcccctgtgtgtgcttatgcatcactagacatgcaggaggtagttggattgccaggtaactgggtaaatggctctcaggcctgcctggagtatcttcacagtggaattagagctaggtccaagtttctgtcataacagtgctgtccccaccacacatagccattcccattttgttaaagcagccactggtctcttgcccaaatgggtaatgactccctgaagagggcagagaccatggcacccattcagctccttctgcatacttttattagaaatagactagttaagaaaattgtttctatgtactgtatattttgtacctgtttacacttctaatattgatataactgatattttgaaaaacaaatgaacagaagacatcctgttaaaataaaatctaaccagcaccaaggctgtttcatggattccattcttagatatt

SEQ ID NO: 31212 - DNA, 1148 bp, Mus musculus
tgcagatttattttatcttgtgtgtgtgtgaatgttcagcccatatgtatgtatgtgtaccacatgtgtgtctcatgcctgaggttgtcagaaggtgtcagatctcttacaactggagttacggatggttatgaaacaccatgtgggttctgggaacagaacctgggttctctgcaagagcaacgtgctgttaaccactgagctgtctctccagtccccgagagtaggtttttaaaattaaaaatggtcttttagtactggaattcttggtttatgagccctatataaacagggctaggtctggcctaggagccatactttgtcaacctctgagctagtgagggaactgatgatatggtgactactggctgataatgagctcccactaactggtcaggaacaccaggtgagtggctgtaggtttatgggtttgccactggcagctgtctgggtgcaggtgcagagcagacagtcaatttctcgggattacagtttcaccaagtacagtgaatacagggaaaggagagtgtataagaagggggcaactaatgatggccacagggacaggaggatgaggagagtgtgaaggctttgaggatcctatagactgaagacctgttggactggaaaaatcaggagcaggaaggagctgtggagtccatgcttgaaatgtggaaggaaactaacagtgccaggacagtgaagggagtaaagccaccacatggatatagcagtcttagctctaaggcagggtagagagagagagagagagagagagagagagagagagagagagatttagattattgattagcaagggtcagtgatgagtaaggacacctgaaagcccaatgtcaaaaggacatgggaaagaggacaaaacagctgctgggcagcagcacttgggaagagccaaggctcagcctgagcaagacagatgggtataccctggtcctaggatactgttgtatgttaggttctataaagcaccacggagaccataggaggcaaagagaagagatgcggactgataagggcatggaccatctttgctatcccgagtgagaggagggcagggacccgagatgactggactgaggtgggaagaagagcctgatgacaggttccaatgaggtgggctatgagga

SEQ ID NO: 31213 - DNA, 1146 bp, Mus musculus
ttaattccagcgcatgctaggcaaacactttaccatctgaccaacatccccaattcgacttcttccatttgggaaagctctgaagggagcatctctccactcagagcgagttctcatccgcatcaaaacaaaaccctgtcagtgaggatggccttttgaggctagttggagagaggcctggaaaacattgcaggcaaaggcctaaaggagccagctatatttagccttgagataaagagccacctatgctgccccccagagtcaggagtggtgtatagaagagcctgaggtggagattaggcagatagccttggtgacacgagccacagcatttatgctagatttattgtagcctatggtaattaatcctgtctgtacagtatccctgtggactaggatatgatccactagtacagatgagtttgctaatgctcagatagggcagccatttggctgaagtcccatgactaatatgtggtcattccgtgcaccttaggttgtggctctcaaaaggactgagcagtctcacaaaagactaatagaaatgctgtggcttgacagtatcctctgaatttcacctgttaggaacttaatgcctagtgtcatgtttatgctttgttggaaagtcattggggttgatgggtgactgggggagtagtcttgtttagaaggcctttctggcttgctttctctgtttccccatcaaactgtcacgtaccatacgatgtggcagggaggccttcaaccagcatggccccttgaccctggatttctcagcatctgcaactgtaagaagtcaatttattttctttataatcaccctgtctcaggtattctgttatagtaatcgaagcacaggaggagggaaaccaggtgcctacttctagtgagaaatgaagctgacaaactgaaaatgcatgcagatacagctgttgaaatatcttgcctcctgtctcctttgtatttctatgttaaaatacctaagatgggtcacttataaagaacagattttggctgagtgtggcagtgcacacctttaatcccagcacttgggaggcagactctcttgtgagtctaaagcttgcctgacctacataagttctaggacaaccagagctacaatagtgaggctgcctctcaaaaagc

SEQ ID NO: 31214 - DNA, 1173 bp, Mus musculus
tgataagtccggcaatcgcaaaggcaccatctttcgggtgacgtcaagaggacatttgagggcaggttcccagaggcctccagtgcagtcaccaggaagcacttagctcgcccagcatgatgttgaatgacctatgtagaatgttcactgtgggaatcttgccagagattccagacccaggattgttagtgagaacaggtcagtcagtccactagcacttgacccagttgaagacacctagaaagaaggtgtatgttcagcacaaactgcatcacacagattagcctctatagctggtctttgttcctttgtaggttctttttcccacggtttatccccctcctgtttgtttcgctatcactagataggagagaaaggatagaggggagacagagatagagacctctgaatccaatttctttccttttgtttcttcttttaccctgctaccaacaaactgcaaccaacccccctgaatgaccgccaaccccacctattgaggctctagcatttatatacccactgaaaatccccagaactccagatgtcacacaatctcagaaactctgcatctggcagaaccatgcctctgctaaagcataaggcaaatcacagtcagctgcttcggagcagccccgtagtcccacccctgggattaaaacaaaaatagtcttaaaatgcttttttctttttaaagaaaaagaaaaaaagaaacaaaaattccagaattctcaccacaagcctgtgttgacctctaactggttaggtagaaacccttttgagatgcacatttccaggtgactgcctggggccacctggtgctagatattttgaagggcagtagtgccgttgcctaccctgttggctctttattacagaacctaagattgtccacattttgtgtgctaggaggccaacaagaaatgcaaaatggctccctgctagaggtttgtggaatacctgatatgttcctgagggatagtggccatagtgggccagagccacaagttaagcctgggtagagagtctgctgggttgcccagcaggccatagagatggttgggaatgcacagtgagccaagaggcaaagtacactgcctctgatcccttctgggcttccagatgtcggcagtcagtggagatgctgtccctggccagatgtgtgactggagc

SEQ ID NO: 31215 - DNA, 1261 bp, Mus musculus
aattttacattctgtttgtgttatttgcatggttaatttctgccatcattgaagctcgtgcctatcagatgttggtcattgtctgagttttcatggctgttttaatgatcacttttaaagtaagagcttttgcttttatcttacaaagccgcaggaagcaggtgagcatagtcgctaaaggtgtggagtgtagatgtaaagtgtttcctgaaggccctgggattctgggctccttctgagcaggaggtccctaatgaccacactacaatgctatttcgatgctaagtggcaatagtgggagggctggggtagggagcatggtgaggtggatctgtcagactgcggcctagggggctttgtggacatcacttctgctgcatgcttctgctgcgtgagcctggtggtgggtgtcacagctctccgcagtggaattgaccaaggctgtaccagggtttgtggacagttgaagccatgaagggcaggtaggactggaaaagtggaggtgggacctcctgccagcagctaggaacctggacccacactggagctgagatcaggggccctaagcataggtcaggcctatgagcgcctgactcacctgctacctggctggcaggtggaaaagggtcagtgtctctagatcttcaaggcttcctgaggtttttgttgctgttcctcccccgccttttgatggtgtttaatttctgacataaattatgtcatccctgctgaagagcattaagtgagattttatttaattttatttatttatttatttatttatttattgctatgtgggttgattaaccccagttcagaaatctaagatggaaaatgctccagagggcaaagcttttgagcactgtgatgccacgtgtggagaagtccacatctgagctcctttaaatgtttgtagtcaaagtacaacataccaaaaacactgtaaaagttaccattagctaggtatatacaaaagaacacagttgagtgtcatctctaaaataactcattatgtacatgaaaacattcaaaaccaaatattcaaaatggatctgtccccaggaatttgggataaagaatactagaccttggctgtttttataagctgatgtccccctttcaatgccacagtgctagagttccaggtccttggacattcacttcttcactgacagagtgaatgtagggcttgcctgcgtacttaggaatgtagtttcatctttccaagttacacccatggtgaccttgtttctaaaaggtt

SEQ ID NO: 31216 - DNA, 1160 bp, Mus musculus
tccttgcacggcttatagacgcagacagaaagaataggatgctgtttggtgtacctatggggggtctctgcagtggagatgctgctggtgttaacaggtacacctgctgtggattgtaggtggctctagcaggaccttgctatttagtctttgcagtgggtagaatgatgacacttagttcatcagtggctctcagtaaactgacagctcttgcatggtgctgaggagagagtctgctaagaagtgggttggcaaccatctacccagtaggaagggctgctgagcttgcaagactcaagacctaactgaaacctgatcgggagttccacatcttccaggaacttccagagagttctgaagctcacttagccagggacatggctagcttctggctttgcttctctgcctgtgaccaggaagtaagttattcaggatccactagagcccaaatagggtgtggctgagcagaaaaagacaaatcccgagtgcctggctatccagactggtgctgtcaggtaccagtcggtgaactcttctcctttgtttagagacagccaccatgccctcccctctgcaccgcctggagaactctctgagggggatcttgcctgtgaggcccttgcgtttcacctgcgtgactggccctggccccagtcccagcccttgctccagctccagcttcagcagctctgatggagaagacctaagaccagagcctgcattttggcagtcacccctccagcgtgagtctgctggcatgggggtgggaatggcagtaggctgctctttgcggtgcctgtcagtactctgatgctagcttacttatgacgcagagaaagaccagcctccctcctgtaaggaccctgttcgtctgtgccctgtctctggcgcatctccaagagtcaacagcaatagctgttctgcggaagaccgtgagagaacagagcccagggactgcagcagcctcagcgcaggtgagcctggagtctccctggatgacagccacatgtccccagtgggccagaggtccagacttcaacaatctccgagtcccactgtcaatttgctggctttcattaaaatgttcctctaattttttatgctttacagcctgtaaagctgagccagagagaaagcgagcctgagtcaagagctgtgct

SEQ ID NO: 31217 - DNA, 1191 bp, Mus musculus
cttcagccaccatgcccctgtggcaggtccttgcagcaggagctgcataaccttggtactgccctcacggacaagctagaccggcttgcagcagccttggcaggcctgactcaggaagttgcaaccatgaagacccaaatggatcaactgcgaaggcacccacggagccttggcccaaaaggtcagggttcctggcagttggccctcccccagagacctcgctgggtcaacagactgggccacagacatctaccctactggagacagaagggccccaccaggcccagaccaaagattctgcggacccaggcagaaggctgcaagactagtgaccgcccaggactctctagagggaagggcagtttggtgcctcagctgcctccagaggcttccttggtagaatcttccaggcccacctgtagttcatcccagcagatctcctctacgcctggaggccacactgtgctgactgcacaccctcctctggagcacactgcatgccaccagaatcccctctccccttcagtgcctacttcagtgcaggtcccccttgtggcctcacctgcaaccagtgcagacacagaacctccggctgctagagtggcagccatcagcattccaaaccagcccaaggaacctgacagcctgctaggggaagccctcagcagagacctctggggaggtgaccaccgggacccaaggtggggggcccattaactgtttgtctgctcagccttgctggagattctgggtggcagggatgtcctgatgggaccctctggagtccagccatcccaggctgtctgctttccaggggttgtatcttccttcttacctgttcatcaaccagccctctcattgctgctgcaagtctggctctttgcctctgctgtgccaggcctccatggtgtctgcatagagccacgacagaggcattcctcagctgtacctctgactttcttggctcaggttcagtcagttgctcttcctccttggcaaagccatctaggttccaggtgggtgtcatgcataccacatgtgcacagagccagctgcagagggcaccacaagggcaccttaaccagctcctgatctcaagaacactaaaaggctagccgttgtctgtctagagtgaatacttcacagatctcatttagggagagcctggtctatggactaagctgaattttc

SEQ ID NO: 31218 - DNA, 1131 bp, Mus musculus
tgttttggaagtttagtaattttgaccattaaaactatgtttctatatttgtatggtcagccagctttttatttgactctgtacttggcctgctagttacagtttggaaagtccttttgaaggaggaaggtactgggtagtcttgaatttattttggatattacaaaagattacaggtaaacttaagtcactattgagttgctctggaagggcagcccattgtacttaggatcccaactgtgcacttagcagtttcacgcatgattagcctgtttccatctagacgcccttagggcggaagccacatccttacccgatgcatccattcactgggggttcacatgtgctgggctggagtgaagaaaatggacctcttgaggaagggagcttgggaggccaaactgccttgggagtccaggaccgttggaatttggcccttcctctggaagggaaagaccagggaaaaggaggaaaactccatttggttccctacgcactaaaccagtcgctcttgcccaggaaccctacctgcagagccagtgtgactgctgtagctacagactggatccggacagccccgtgcggatcttgaacctcctttgccccgatggccacacagagccagtggtgttgccagtgattcacagctgccagtgcagtgcctgtcagggttggtctggcctgggaggagagggcagggctcctggtgggcagggctccacagggctagccgaggctgggttggagttctccttaaggaggccttaggaacatgcacagcgcacgggcccacccttccttgggttttgctagttcactctgatcctttcccttcctcgatattctgcttctctcctctccaattacacataaacttggttcaaatctcagtcttccactgaggtcagtacccataatgccatccctcaaatgggcctggcagctacacaggcttgcagggagcactctggaagggcccgcatatgaaatacctggcaggttaagttacagatttgatgtgtactaactgaagtcacaccatattgccaagtgtggggaagatgcagtggaaggacactgacacaccctaggtgggggctagagctggttacacttccttccttctggaag

SEQ ID NO: 31219 - DNA, 1210 bp, Mus musculus
ctccagctctcaacttttgccagcaagtaggatttaacagtaaactgttggtgatcagggggtcagtcggtacctcagctgttcctcacagataacattgtagggagctctaccgtggtggagtttttcagaatccagaggaagagcaaagcttcttctcttcatgttcttcttggttttcagtgttaggaggtagtaagaacaggtctgctcttcagagcctcaggactctgggaatgtggtgagggtgaagcccctcctcagttaaaagcatctctagttctttttagctgctgcttccttcacatccaactgggatatcatggagacagtcagtcccctctacagccgcagtgggtataaggtgacctcgggattccacaggtagccgtgtacaatcagagatgctgttctgtgagtttttcctctttcttgatgatccttagatttgactgagccagtttggtttaactgctatctggagcttgtggatttgatgactttcagcagggaattcattcctgagcctcttggtgggctttccggggggaaaggtgtcttcagaaggctgcagacatgcctcgtgtctcactccaacagtgggctgctctttgttgcaggagcctcctgacaaggagtgggctaaggcttccaggacggccggggagctccctgcaacgtttgaggacttggccgtgtgtttcagtcgggaggagtggagcctgctggacaagcagcagaaggagctctacagggatgggatgcagatgagctatgagctgctggcttccctgggtaaagctttccatcggctgttttactccactgtcattggtcagagacctcagggcagctgtggcagtctcccatttttgacctttccttatgggtagagaatgagcctgtcttctgtgccccagagccctgcctgctttggttcactgtactgtctcacctcttcattcatcttcctgcccatgcatgccccagtcttctactcccattagttggctatcagccatatgctgggtgtccagagcactcgtggcatctgcaggcctttgagtgaaactgaaacagctgagttccataagaggtttggaagagtaccctggggctagtggctcctgatgtaggaccagtcagtctgggtatgagagaggggagtcaagaagccttcagcgaagtattaaaagggacataaatccag

SEQ ID NO: 31220 - DNA, 1157 bp, Mus musculus
ctcttacgcctcccagggccacttctctcccctccatcctctcagaacggggacagcaaacttttatggttgcatcaatgtaagttatttgcctgactgtgtttgtgtgttatttactgccgagtgctacattgtgctttgtccttcattgtagaattttttcatatttttttgggggggggttaagattttttttttgtacttgcttcgattcttcccaaactctcttcagtggagctaagacactcctttgctgtctttccctgtggcttatctcagcacttggaccttctaaacgagttaccaaactacttacttagccttccacacagctgtggcttagcgactccctggtcacgttgtcacttttcagtgacacatcttcaagtagcttcctaacacacagtggatgcaaaagcttctttttaagacactgcagatttgcaggggcctccatggtacccagaagactgagggatgatttgattcgtgtgggattccagatggaaaccatttccttagcgtgatgtgaaagccctgctctgctgtagttttactaatactgctgagaacctgagtggtcttcttactcctacatctctgaacacagcgtattacttctcctctgagagcctttaatgtctaccccagtggctcagcagtcagagcgtcacctgctcttgcagaggactcagctctgttcttgtctcacacacggatgactccctgacacccgacccagatgcacccacatctgccgctctcagccacctgcaactccagcctggggcacattacccctctggtcactcgtgcacacatgcccactacagacatgtgcagcattaagtaacaattactgtggaagtctagcccattgttctaaggtatttcgtgatttgcctgcagagggtattagtactttctgttccctccgtagtgtcatagctggggcaggtatcctcctgcgattttctcggtgatttcttttatcttttcttctgttatttctcaaaactcttctctgttttgtttctttttctctattttctgcttttgttccctaacaattcagttttgagttgcttttgtttgtttgtttgtttttaaattttctatttttctttttcaaatatgctaacaactcttctaataga

SEQ ID NO: 31221 - DNA, 2124 bp, Mus musculus
tcagccggaccaaactcctctaataaagggaagcatggcttttccgataaccagaagctgtgggagcgaaatataaaatctcatcttggaaacgtccacgaccaagacaattaagtgaagtgtctgagactggggtgtgggtgggtgcagttagaaggagcagtctcctttttgtaaagaatggtgtaagactagctttggagccgtttttctttcttctttttttcttttccttttttctttttttttttttttaagattgagtggtacactaataaatgagagtttgcaattagaggtaatttatgttttatatacagatttcaagacatttgctaattttgtagtttcacatgattagtttccaagggttacagataataaagaaatcacaagtggtacctttctaagaattgcatatttttttagacacaactattagcacattaagagggaagccaaaagttattgtctgcttcaaactggaagcagttcctctcctgacttctccctcgttacccgactgtccggctccctgcagcagccttaccgagagggagattggcttgagaagccagtgttactgttgtgactgttggctgagaggaagtttagatgaggttcaagtaaaccctttcctgcgggcatttcgttttgtttcgggccattctagctagtactgcttcgctctcagtgggtaccgatgcttgctctgtaaaaataaatttttttcattaaaaattctttttttttttttttttttttttttttttttttttttaacaaatctacttttatttatttactctccattagtttaaatccgggatgggtacagcatcacacggattctgtgtccaatggcctttgcaggaaggttgcttcggaatttggcacgaaccataccgctgtttccgtgggcccgagttacctttccccagatcactctggttttgtttggtttacctccaggagtcactgtattgttttttgctttatacacataagcacatctcttgcctaagtagaactccgtttcatctcgggcataaacgccttcaattttaagaagagccgtgtgctctctttggttccggagacctcgcttgtagccagcaaaaatggccttgcaccacagccttccagacatacttgctgttagaagtcctgttcccagcaggcctccacaggcgccaagatggcggaaagagcttaaaaattcttatatgaagaattgagtattatgactagcccactctaacggagtgtgtctccgttgaggaccttcagaggacactatttgctaccaaagtgaaccagtattctgaatgtgcttctcttggtttctgttctagttcctagaagcatttccaccagaacttgaggcaaaacataaggaagctgtttcttttaaagtacaaacaccaccaaaaatatcagtgtacatagtgctttatgtattggctggcttttattttttaaaaggtttaaataacaaaaaaggaaaaaaaaggtgtagcattgtatgaaggcagatgaggcgacacaccttctgtgacatttgaagcatttgtgttactaacttactagatccggtttgaattgaattcacaaggtttcttacttgtccaactccatggcttattttccgtacatacaagctgaccagtggtttcaaaagcacatttagtgactgcaataggacagaaatgcttctctagacacatcttcattgcgagcgtctcgtcgcatatgctcttagagttctgtgtgtaggatgtttgttttgtatttttgtattgtatatgggctttttaaatgtgacagttaaatgcatctttaatagtcacagacaaaagagatgataaaatgtcctttgaaaatggcaatgttgagtttggaggcagcttcggggagtttcctgggtggcgatgattcactgggcagtttttaatgtagtgacttcaagaagcagcctgcggatattcctaacacttggttcactacagtttagtttacttcataagccccaagtaaaacgatggaaatgtacatagcactattagttcatacatgatttaagtatatcaagatacataaatttaacatttatgtctgcaaact

SEQ ID NO: 31222 - DNA, 1196 bp, Mus musculus
atcctacacacagaactctaagagcatatgcgacgagacgctcgcaatgaagatgtgtctagagaagcatttctgtcctattgcagtcactaaatgtgcttttgaaaccactggtcagcttgtatgtacggaaaataagccatggagttggacaagtaagaaaccttgtgaattcaattcaaaccggatctagtaagttagtaacacaaatgcttcaaatgtcacagaaggtgtgtcgcctcatctgccttcatacaatgctacaccttttttttccttttttgttatttaaaccttttaaaaaataaaagccagccaatacataaagcactatgtacactgatatttttggtggtgtttgtactttaaaagaaacagcttccttatgttttgcctcaagttctggtggaaatgcttctaggaactagaacagaaaccaagagaagcacattcagaatactggttcactttggtagcaaatagtgtcctctgaaggtcctcaacggagacacactccgttagagtgggctagtcataatactcaattcttcatataagaatttttaagctctttccgccatcttggcgcctgtggaggcctgctgggaacaggacttctaacagcaagtatgtctggaaggctgtggtgcaaggccatttttgctggctacaagcgaggtctccggaaccaaagagagcacacggctcttcttaaaattgaaggcgtttatgcccgagatgaaacggagttctacttaggcaagagatgtgcttatgtgtataaagcaaaaaacaatacagtgactcctggaggtaaaccaaacaaaaccagagtgatctggggaaaggtaactcgggcccacggaaacagcggtatggttcgtgccaaattccgaagcaaccttcctgcaaaggccattggacacagaatccgtgtgatgctgtacccatcccggatttaaactaatggagagtaaataaataaaagtagatttgttaaaaaaaaaaaaaaaaaaaaaaaaaaaaaaaaaaaaagaatttttaatgaaaaaaatttatttttacagagcaagcatcggtacccactgagagcgaagcagtactagctagaatggcccgaaacaaaacgaaatgcccgcaggaaagggtttacttgaacctcatctaaacttcctctcagccaacagtcacaacag

SEQ ID NO: 31223 - DNA, 1229 bp, Mus musculus
tggcggacgctttccgtgccgtctgactacctatggcaaatccaaacttggacatctttgtaggctttgttgggaggtctgcagcttcgtcttcagctgatcgcttttcagcgctgcgactggaactttcccctccattactggaagaaacagtcttagttttcacaggtttttctgcttcttcttcaggtcctccggcggctccggctcgctgcggcttctctggcttctcctctcccgccttcccgtccgccatcttcctcgccgcggcctccccctgcagcccgggcaagaacctattttttttcttgaagtcctttatttttaaaagtattactttgggggctgaagagagggctcagggttaagaacatttgctgttcttccagaggacttgggtttgattcctggcacccacatggtggcccacacttgtggaactctaatcctaaggcctgtgaggacaccaggtacacacatggcacacagccatacatgcagacaggacactcatacacataggtaaatgcttttaagaaagatttatttttatttatgtgtatgtttgtgcatgtctgccatgtgtgtgtggtgcccatagagattaaaagatggtcatatctcctggagctggactttggagcagttgtgaaacaccagtgtgggtgctggaaactgaacttggtcctctcgaagagcaggaagtgatcttaactgctgagccctactccaaccctcaggataaattcttagctcctgttttaaggttccatgttccctgtagtatctctagaccttccagtactttcccctgcttgttttcatagaggagggttttcttaagctattatttttaaagttcatttctatataaaaataaaaccttgttggatgtggtagcatactcctttaatctgagcactggcgggtggatctctgtaagttccacgacagtctagtctacctattgaattccaggacattcacgactatatagaaaccctatttcaaaatgatgatgatgatgatgataacttttttaaaaagcctttgaagccaacaggaatctctgtacatggctggaatcattgaagggtaggtgacactgtatacattggtgtttggaaggaagggaagcataccaacacagacacagacacacacacacacacacacacacacacctttctgttcctggtgcagaaggtacaaacccagccagggctccg

SEQ ID NO: 31224 - DNA, 1875 bp, Mus musculus
tcagggccaccacaggggcttcctttggactcaggaattagtttatttagcaaggggaatgaaaggcaatgctagtagtctgaggagctttccaaggaacggggtgggggtggggggttgtggggtgagtcagggcaggggcagggcgggggaggagaaggttgtctcagtggtaattcttaatggtgtgtgcttttcagatgccctgctgtgaagggtgaatggcccagccttgatgtccctggagaccctgcattccctctggccccacccatctgtatgaccatcctgtgctcgccctgccatcatgctgtggaatccataacccccagagccaacctggtttcagtttctggtctcagtttcccctgtgttcccagctattagcggccctccatgttgggcaagccccgtgctcagtcaggccacagtgggagcttacctgagcttaaattcccacacttggcacttccctctttcttccaagcagatcccggtcaaggagctggacctgctgttatctattttcatccagggagcagaaggcaggactcagcccagtaccagaaaggacttgagtctttgtggagaagggacatgtggcccaaaatctctaggctttttaactctgtctccaccgtgttgaaatattgggtcagggtcacaggcctcctccagctctgaagtgaatgatatccatttagtctctgacacttgtagatgtgacattcctggaggtgctgatgtcttaaagaagcagtcacaccaaaaacccggcacagtcaggatcaaagcctccatgtttagcctttagcagcagggaaatcacttggcatgggagggaggtagtgtgtctttggaatgttctagtcactttcctctccctctgtagataagatcgcccactccctagtacctgtcagttggggtacaaccctttttgccactcttcattgggttgtggtggggcagatcccagtaccattgaagagatttggagttgaggttgggggatagacaaaggtgacgtttctggggtactactagcactatgcctccctggcttttgagaccctctgtccctaagctcatatggttctgtgccaagcacagtgagacagaaaatgtaaatgacagaggatcagcccagggcattcctccagcccatgccctcacctctctgagagggtgagtagggcattcttgcctgtgttgccagggcttgctaggacagaggcctatataatccatggctcctaaccagtggctgtttgagttcccaggggaagaaagcccagtcttgattatctattgactatttatttggtctccctccccttataggggggtcgttttgggagtggcagcagaatacactatagctcagattgctgggcattaagtgtgctagtggctcagatctgcagctggggcctctgtgggcaacccatcccgtcctaccctgactcctgaagccttcctgtgggggtggggcatggtgagcatgactcctgttgaaagccgattcctgtctaataaatcatggtgatgcaagattggtttagttagccaaatgtctggcctctgctcagtttgccagctgccacatggttttgatttgtctctttgtcccctctgctcagatgttttctgtttactggtagctctggggacaggaaaaggggctgctcttctgagacttggcaccgaggaccctcacactttcttgagatctgggggagagtttggctctgccctgtgcatggcccagtacctgtgcagtgggaggaagaccaaggcttattcaagtggcaccttaaccactgacctttgctctctgaccttccctgatcctgggtgtcggggaccatttct

SEQ ID NO: 31225 - DNA, 1217 bp, Mus musculus
cagattctagcttttgtcacgtttcacaagtcctttctcaacccaatttccatgccaagggctggctctccccattaaccacttacctgtctagggcttatttggttctcagggccctggagaaggcaaactgtccaggtaggaagtagccgtgggggtcttcgccagcctgtgctatcttaatgcattgcaactcctgaggatcctgctagaaccagtgtttgctgcagcagttctaggaagggaggcaccgccacaacccccaggggaatgtcccgaggtgggggtggggggacccagctcttcttttcaggtttcctgttcttctcccatagacccagatttgatctgtccctccaggcttctccctaacctcgtttccttcttacctgaggcccttgcttcagaattgggcagtggactatccggcctagaattttacccttggggtccattttaatgcaggccaggcatttccgccttctctggggaggagaacagggatgtcagagtggagactagcctctggcatgctctggagtgggcgatgtagtgatttgaataagaatgtcccccataggctgacatatttgaagatttggtctccagttggtagtgctgtttggggaggttttgaaggtttgaccttgatggaggaagtacgtcagtggggcaggctttaagattttaaaacctcgaaccactcccaattcactctttctgcgttctgtttacgaggaaggctgtgagctctcagcttcctgctctggccaccatgcctgctggcatccacatctccctgcctcccaccatgatggacttttattcctctggaaccctaagccaaaataaacctttcctattattagttggtcttggtcatggtattttatggcagcagcagaaacataactacatccaaggggcgaggtgacatgcgagccagatggacatgcagcttaccctggcataggagattttagaagttctcttctttggacagtctcaagaagtagcccagactggtctagaacttgcagttcacctgctttaacttctcctatgctggcatttcaagtgtatgccacccttggcttgcctgcagactatggtactttacctgtgcaggtatcattcctgtgtgagcatgcatatgtgtactgctcatgggcaatataccacgtgggtgtattcacaagtgcctgcgttaatgtgca

SEQ ID NO: 31226 - DNA, 1103 bp, Mus musculus
tgatgcctgagaggggccgtaggcctaggaagacaggcctggatatccttggcaacagggtgtcagtggtccgggtggggtacctacactgatgctgctagaggaacaggtaaagatcccagagggatagaggagacagtgatctgggctctgtttaggaatggactttcccctaggtatccagggaacccattttagaattcgggggacctggctttgagctagttggcccccagccccagctggtttttctaagggtcaactcagactgccctgtaccctggaaaaatagcaatagcagccccatctaccctttgagtcctcaactaaacaccagtgggaagagaaccgttccatcctctggtgttaacgccttaatgtccccagtatttactatgagttgcttcaggtcattttttgattttttgttttttcttttggaagtaggtgtggtatagtcgttagtaaatgaatccctgggcagggaatatgggctggccggctgcaccttggtgaacctgctggttagggcagcagcagaggtgaggctgttcctctctctctctgtctctctctggtctctgtctctctctctttttttaccagaacccttctgcaatgcctcctgcataggtcccaagatgtgtagcgatccatccctggttagcaattccatcaatttcttgcatattatcctcccaggacattgatttactcctttaccagcctggcttttttttttttttttttaatctgcctgctctcccctaagtataggccttcctggtggttttgtttaaccccatgaccctccccaactcttctcagagctttgggggttatgtgaaaggctgactagttgagggtttagctgcagggaaggtcctgggtagatttcctttttaaggttcccagggtgtggatgccagcctccacccatgcacctgggtactggggcactgttacctccagaaggcactacttctatcgtagggcgagtctaattgttagacatttcttacttatagtgattggattctgctttcctatgacttctgcctactgggtcttgttttgttccttggatcgaaacagaaccgttt

SEQ ID NO: 31227 - DNA, 1344 bp, Mus musculus
ggtgcacgagctgtggccagagctgccccagccgtgcagcactgcgagcccaccagcgtgtgcacacagctgcggagctgctgcgctcgcagtcggcagtccgggatggtgtgccgggctctgagtcacaagctgagattgcccagagtgtggttgtgaagccccaaggtccccagggtgctaaggaagtgctgtgtggccaggagtgtgagaccttggctgtgcccagcgagcagcgccagttcatctgcaacgagtgcggcaagagcttctcatggtggtcagcgctcaccatccaccagcgcatccacacgggcgagcggccctatgcctgcccagactgcggtcgctgttttagccagaagcctaacctcacacggcaccggcgcaaccacacaggcgagagaccctacctgtgcacagcctgtggccgtggcttccgtcaaaagcagcatctgctcaagcatcagcgtgtccatcgtggaactcaggcccctcaccctggccccgaggaagagctgtagtgtgccctgtgcagctatggtggtgggtgcgggagtgtgtgcctgtagggtgtatgccaggaacaggagatgctccccgagttaggctcatcaaagttctgaggcccgaggatggtattctagaagcatctcaaaggaagtctaaaaagtgcctcgtaggggcagtgagatcaaagctgtgggtgtttaagatgggctgtgattgttagtgtgccattcagaattggcccccagccgtaggcaccttgtgaggagctgttgggggtcctagtgaagggctgttggggtctctaggaaagccactgtgtgtgaaatgacctgggacagatcattggtagcactagcctatcacatacgctacaagatggtcagtgcggtggtccccatgggagagacggtcagagactccaggataccaatagaacaaaggctgtagctaagaaggtgtaattatttccccagctccaaggacagtgccaagcagccacgctggatcatttgatggcccagactctgagcatcttgctgcttggagcactaggtacagcagactggcctaattggcagtgtgtatgatgattggagggtgcggtacagtcaggtggtctcatccatagcttggctgcttggggaagtgactattcaagaacaggctgtgccaagtgtgtgtgtgtttgtgactgccttgggtccttacccttactggtattggagaaaaatgaaggactgaatattccacatggtgtcactgttctttctgaatcatccttacccgagcccaggtgtgtgagctccaggtgtgtgagctccaggtgtgtga

SEQ ID NO: 31228 - DNA, 2276 bp, Mus musculus
accatagagccatcttctccagccccataaagattatctgggctcacttttttttttccttttccttcctttcctttcttttttttaaaaaagagagacaaggtttgtctgtgtatccctgggtgtcctggaactcactttgtagaataggctggccttgaattcagagatctgcctcggcctaccaagtgcggaaagtaaaagcgtaagccaccaccatccacacggtcctcctcattccttaaactactccccaggcaatccgtctaaatcaccgtttccggttacagacccgcccacttcgtgacgtagaatcccggagccgcccggaagctccaccacctccccccagagaagtcgcggcgagagctatgggtccgggctggtcgcccgcgcggcgtttatggccgctgctgtggcgcagggcggtcttccagagagccggccccgcaatggcttcggttccctggcttccgcggctggcagagcgatggcttcccgcgaggcccgcgacctgcctgaccccgagcctaacgcgcggcctgcaccatgggcctcagcccgaggagcggaccgctggcgacgctcgcctgcagcccggacccgcaggtacgcgggcaggacacctggtggcccggcctgacccaggcggccctgggctttcctgtgcgcttcgggggcaagagaaatagccattcgcgcagacgcagagctggaagggatttgggaggtggtcggcaccaactttgctttgcgtacccgagagtcctagagggaggctaaggtagcgtgttgtcgtcaaaattccagtcatagagcgggcaacatccggctcttggcttcacagcccaggatccaccccgtctcacgatctgcccagggtcgtagcaggtggactggttggtcttagtagcactagtcctagcagcctcgtttcttcatatctgttgaaggctgtggaccaggtattgtcttgagaacccgcctaccatacagtatagttaagtaacctttttaatctgcgattcgatttaacgtgtgccctaggatattgtcctctccctcaaatcatgccgctggttgttgtgtagcatctctgcatttgtggagtgttgttcctttcagtactagtaaatagaaagacatttgcttctgcttccgtttggtaatcgcagtatccagtgtccgtaatctgaaccttctacctaggaaagctgagcagtgctttagggaactgttgtccgggttcagttttaagctggtttttggttggttggtttagtttgtcttgaatggagatggtattaggggttggacccagggccacgtacatgccaccactgaagcacaccttcagtcttttagtttaaaaataaaaaatctttagaccttgtctttctgagttgctcagcctaacattgaacctgggatcctcctgcctagtgttcaccaaagcattttagatataaatacacttgtagggggagcagttccactgtctccaggagacttcgtgtcagtctgcttctgtagacaaatgtaggtctgtattctcctcagccatctgacacaagcgtttctgcattttcagatcacattggtgccaagtttgacatcgatatgctggtttcacttctgaggcaagaaaatgcaagagacatttgtgtgatccaggttcctccagaaatgagatacacagactactttgtgattgggagtgggacttccacccgacacttacacgctatggtccactaccttgtgaagatggtaggatgctctcctttgttgtgaacctttacctagagagtgacacacagaggctgcagaggaagcccactttctagaattcccaagagtgatttttatggtttctcagagtaaaatatttgggagcaaatacttagctctgtcgagcccagataatttctaattcgtgtcttttgtgacaaggaaaattaataacatgaaacaagccagaagacactaggagtctgttctagagtagcacctatgtgatagcctctagctagtgaaaggctttaaaaattatttaaaagatttggaggtttatttttattttttatttcatgtgtatgtctagtgtccacaaaagtcagaggaaagcatgtcgtcttcctagaaatggagttcaagggcgctgtgagctgccgtgtagttgttgggaattgagcccatgctattaacctctgagtcaactctcaagcccttaaaatcattttgaattaggtgggtgtggtgggacatctttaatc

SEQ ID NO: 31229 - DNA, 2627 bp, Mus musculus
gaggaaaattcaggaaattctgactcaggtaaagcagcaccagcagcagaaagctctgcagagtggaccacctcagtcaaggcggaagtaaaggctcaggagacagccaccacagaggcagatgccaaaccaaagacagatttgcttaaccaacagacgggtgctgacccatccagaaccacgtgcacgagtttttacctagctggttgtttccgaggaccaggcactcgatcctgtctctgtgagaatgtatactttatgctctctgaaatatatgacacccagctttaaaaaaaaaaaaaaaaaaaaaaaaaaagtgggggtaaggaaagagaactctgcacttcccttgtgatatcaaagtataacaaacgtgctaatttttcttaatatccctctataatgccagaaattggcataaatggtacattcactaaatttatcaaataaatttaaaactagattgttcctaagtccaattgttgaaattggatcaaagtagaattgtcagaggaacacaacattaagccattagaatagaagagctgttgtctcctgtttctctaacactaacatggataacctaagggaagtgccagccgctgttggcagggtattaaacgtgcatttttactcaactacctcaggtattcagtaatacagttaaaagcaaaattattccttttttgaaaattttatatactttataaaaactccaaccgtttttttaaaaaaaataaaatttaacagttatcagctgataggcaagtcattgaaaaagtaattttacgtctggctggtgagagtaaagttggaaaaataattttgcattttttgagcctttgaaagttggaaagtccactaactgttcaaagataaggagcagtgcctattctcaagagcagccatgccatgtactcctttgttcctatctgggaaggttgttgacggtactgaccaagcaggcaggggctgggacggccagtgtacaggacagctagggtaaaggacagctagtgtacagggctccaggagacttggggatttgtgtttagctatgtgtgggaatttgcaaatgctttgtgctttgactgtcaccacgaaaaggaagaaattcatgtcagtgaagaaatgcagaatttaaacaaaatcagcttgagtttgttttaccagatgctcagcttgctaacacacttgagatcagaccatactctgagcagacatggaaaggattgctttgtgaagaccagggggagtcaggtggtatgacagggccgaagggcaacaaaatctccatttccttgtgcctggcactgtctcgagcctaagctattttaaagatgttttaaacagtggaagaattaagtccaccaaaagtcttccatgaaatgtagcagagtttctgtctgccctgcattacctgccagcgagtcaaggtaggggatccagcaaacggttttgggaattcagactgtggaaacatcggacttccctttgcccttcctcaacttagtggcaaagccctgtatggatacttgtaggtgcgggtgatcctcaaggccatgctgctttctgagttgttcttgttgctttgttcataatgtggttacagtcatattacactgaccctgagggtattatgtaacccttcagaaaaccactttgcctcattgtgtttcaggattaacttctacatgcctttaagtttttctgagtatcagcatatcatttagacattgtgaaaatgaattcctaaacattttcataaaaccggttaattttgtagttttagccaaaaagtgccccctttttacaactgaattcatctagcattttcatatggtggatttaaactgcttaaaaaagaaaatgtgaccggctctcctgcttgggtctcaggggagatatgcttaaggccagagctcttcctcagtatttgatttttccagtgtttgttttttaaaaaactgacaggtgctacatttctatctgttggtttcaattctgccatatttcatgtctagcctttagagtggccaatcatgttttactttcatttaagcactggtagtctggagtacctggtactgagtaactctataattgtgttttgtgttcaccatatacagatcatttctcatctgtagtgtgccccaaatgcagcttcactttccaggtaccctgatgcagaataaagttttcatcataaaccacagcttctgtagtatgttttcagatgagtgagtgttcttgagttattttctatgataatcttacagtaaacagtaacctaccagcacgttattttttcaggccctgattcaagaatgtgaaccttggttgtcctatttaacacaaactaagatctacagatttacatgactttccataatgttctaaatataaatattgtacttgtgccacgtatttatagaaatgctatccttataccctagcacccagccacttactattgccctcagacatatttggaaaaaaactggggaagggaggcaggctgatagtctaaatagagaacttgagtcagtcacggggtcagtgctacctgaggcatcatgctagaatttcaagaataaagataggatgctgaaaaacagggactgaat

SEQ ID NO: 31230 - DNA, 1217 bp, Mus musculus
ccttccagtgagtagacttgggagcaatttacccagcagtcttagcaacagaaagtatacacatagtttaagcaatccagagagtcttttccccttaaaataagaagcatgctaccttgacagcattaccctttctctgaaagctaaggagagaccatggatgtgttagcctcacaacttaggagcccagagcttctaacatgttaccgcacttcatgtaccactggagttataaccaagagcacaggcagtggacatatccagctcttttaactatacaattatgggtcgggccctttaatgtccccagcgttctgtgctcccattgtaaagtgattattctttagctagatgtagtatgggttggctcagtggctgtacatgaagttttagattagagtcaggcaccattttaatactcagtaaatagtgtgctatacctgactggcccatattaatcatagcctctccataattcctttccagaaggcatttaattctgcagctcagtcaatcatgtgcagatgtcaggctggtttgcctaaggtttgtcagtgacacccgaaagtatcataactggctggtgatgggtctattacagatcgctccagccgaagcaccagatgctaaagtgcggatggtgattatcactggaccaccagaggctcagttcaaggtatgtgttgtggagggcacagggaactggagggagcaagatgatgatgttaccttccccagcccctgtgtatcagtggaaatcccaaagatcagacttgagccacacagaattatttcacaaccatgaaccaagagcctttagttttgagttttgtaatggtgttggtttactgtcaccactgagatggttgggactttaacactggcagagacacacctgcttgctaatgaaccttgtaaatctgtttttcaacatcccattctgtcttggagatggtctaatcttgagttaaagtagccccttttctcttactttcacctagcactgtccttggattttggttagaaggttagagctgtgatggcatgagatctggctttaactactgaacatttatgtgtatctatggacctatggagctggaagatctctctgttctgaggtgatggagacaacctggcagctagacccctatttcaaatcctagtttggccattcaccatttgtgtgaccttagacaagttactcttctcccatt

SEQ ID NO: 31231 - DNA, 1234 bp, Mus musculus
ttttttaatattgttgtctgtttagggtttaagtggggtcagtatagaccatttaaaaatttagtctagatgcttgattatgttacttcctttaggtaactttaatctaaactccgaaaatattggagaaaattgagctcactcacacagatgctgatctgcctttggggagggctttactgcgtccacctccttatttcaggaaacacagttgtcagcggcttctgactaggattgaccagaaaagtctaggtgcttcctggcagcaccaaacatccctttgctcactcctcctcggctcactgtcagggatggaatgaggggctcaacaaatgtgccacgtctacaacacagacgtatgaaaccatgtgcccagttgctgctattgagggatgggagggaggtcactacaagatcggatttgggtctttggtgcttgatcccacactttctcataatgctgagccagccattgtgacagctgaatgactgtcacctgtcctcctgacattcttgtttttactctcctgcccatagattgcaggaactgacgctgtacaatccggaacgcaccattacagtgaaaggcagtgttgagacgtgtgccaaggcggaggaggaaataatgaagaagatcagggagtcttatgaaaatgatattgcttccatgaatgttagttctggggtggggaggtcattgttctgatggacagccaagaactgtcttttgctaggaactcttccagtgcttcaagtgttgtgagttgtcagcacagtcccaagtccctgagatggcacacaagcctttgcgctgggcctagctgtcagtgattactaacaaattaggtagcttccgagccttggcttcttgatacacaagggatgattaatacctgtctaccaaagggtattcctgtgttaatttgaggatgtgagcattagaggtaggagaattaggctttatttcccgccaacagtttgtgagccacagctttcttctctgtatcaggtagctggtatctcctattgtacatggaaagctgaggtgggtggactgcaaggtcaagtccaccctgagaatgtagaggtccatgtcttgaacatggtacaggttgaggggccagtgtgccttctgtgctagagtgcttgcctagcgtgcctcagccctgcactgcagagccataaagcagaaacacaggcttgaatattaccgtgttacccacataagcctgcg

SEQ ID NO: 31232 - DNA, 1141 bp, Mus musculus
tatatccttcagaaactggtctgtaaggttcaaatcaagcattttttgataataaatcctttaaaaatgcattcattggtattcatgtgattttgccatcaattaaagatgaaaactgattttgcacagtaatgagatagatgccttgttggctgccgcatgaagaattagatcttggcagagtggttgaccactagatcttggcagagtcaggccatagggtggcttcaggttttgcacagcggatcggtgctttgattctctcctccgtgctgcgcatgctgcatcacataaatatgtaggacaaaatggcacaagtgtatttaggcccttctaaaagttgttggaaattctgtcccaatcccaagccaaaaatcatttaatgaattttttttttaatgaaactcaaattgacaactcaaacaccaatttctaaaatcaaatattcttacacagtgcaattcagaatatgccagtttgatgtatgttggggaacgatggtaggaaagtgtcaaaagtcgttgtttcctcaattaaggtttatgtttctaagaacaatggctctgcacataaccctgcatctgaggtgctggaggcagtgtccgggctgtaaaggaaatacacacagggtgcgtgcgggtcaaagtgcgcatgtgtctgctctgaactaaggctgcagtggttacaggatccatgtccaagtgctcccagaaacacaatggattcattccacttgagattaggaaatgaattttggtcacctcctgtccagagaccttttctattacaaaaattttcacagccctcacatttagtgatggggcccatgtgaggttgtgacccatagtctaagaagttggatcggtttacctggctttcatctaacaatggagagagaggccttgtcaccttccatcccttacctttgggaacttagtacactgttgcttcttggtgtagcagcttcagttcctttctagactgctaatgagatctgtcagataatggagtcataagctgaacttaaggtaggcagatggggcaaagcagaagggagtgtttttgttgtatctgatgatgcggttgctgagtggtgctggtggatttaatgcattcttgccgtcataactaatcattacca

SEQ ID NO: 31233 - DNA, 1186 bp, Mus musculus
gaggattcccaagtagtgcagacccagtcccctgtcactaacaggatgctttagtggggtgtgtctggcacacgatgaaccaatgttattcacctttatactaacctaaagttgatgcttgataaagattatatccttcattcttcctgcgactgctccaggatcctgtgcaggacctgcccaacatgcagttgtgggttctcctccactccctgctgttgtggcagtttcttgcctcattgtttttgatgaccttgatggttttagcagtagtaaatatttcgtagacagtcttagttggggttagctgaggtttctctcctggttagtctgagcttatacatttgagaggagatgtcactgtcagtctatcgagtgtacactgctgtcagcacaacttgccactgcatagcaatcctggtgccctgggagaagcagtgtgggtagtgtgtttgttgtaaagctacttccttgcctctcacagaccgctgggagactgtcactgcaagtctggagaggtagcttagcagttaagattgcctgcttctcttgcagagtgtcctcgtcactgttgaaccaagagcccaggatcttgagagaactacttgtccatgaagcagtgtctgctctgtgtagtcatctggacttgagaccacttattttgtattttagggaataatcctaatctttccccctctccctgtgacctcctttgattgtgtttattcctttgtaatttatgtgtgggggcgtttggccttcaggtatatctgtggtccacatgtgtgtgcaccgtgtcaacaggtcagaggtggtgttggagccttagaactgaagttacacacagttgtgagtcaccatgtgggtgctgagaaggaacccagggcctctctgttgtctcctctttgaagcctatcatacatcttgagggcatggctagtgtctacagggcagatagatggataagtaagtgggataatgtgtttgcctaattctgtgtgtagagatgagtggagagtctctcctgcctttaagccttcaagtgtgactatctgagcaacttgttccagacagcatggacgcaaggactcttactcagacatgctgagtggcctgttggattttgctcagacaaggcccccccccccccccccactaagttcaaggtcaatcctggcagattatg

SEQ ID NO: 31234 - DNA, 1099 bp, Mus musculus
ctattaatgatgtgacttcattgtgttgggttcttcctggcttgacaaaacacgagcaaatctttcatcagtcagagctttgtttctctatcataggaattttatctgacttggtgtttaagcagtgtttgcttagaaagagaacctttgctcgggccgccccttcactactggagacagagctttgcagcgcatgacagaatctgaggcccttgccaagcaggtttagtctgggagtgattgctcccaagcttaagggtcacctctaccttattgtatatttttagagtattatcactgacttcttattaatttttaactttaagtttccctggctttgtccccaggccatgcatattaaacaactgaagtggctctaagttgcttcattttttgaggagtagttattttgcatcagtggttttgttttttttttttacaaattaaaaacattttcatctaaaagatcttggcatgtgagttagacccatggctccacccttagaatctcacaattgtaacgtgtgtgtgtgtgtgtgtgtgtgtgtgtgtgtgtgtgtgacatgctgcatttgttttacagtgtgtgcaggccgtgccatgtcgtggcagtcctttgtgggtcagaggacctttggggttggtccctgcctgctaccttgtgtgagactccctgcaggtggggcgctctgctggtctgagaacttctggatgttgttctgtctctttccttctcagcactgtactttacgtgggctcgcacacttgtgtggcaagtactttatgggcacgaggcaagcataccctgttagtacccaacagctagttgtaataaatcaaagtctcatggtcaagggaacatgttttaattctagaacttgagaggctgtgaaaaatctttttcccccttatcagtgtaggtgtagtgtttgagggtttgtcgattgagctagcaatagataagaacttatgtctatgaaaaagatgtgggcctctgaacaactagggagggtttttataacctggctgaggagagaaggcaggaatagtacatgtcttctcggtgatcaaggagacaccaatcacaaaggaaaccaga

SEQ ID NO: 31235 - DNA, 1471 bp, Mus musculus
ttttgaagacatggcctcaattatgtagccctgactggcttagaactggctgtgcaaaccagcctggcctcattaacagatactgtcttccaagtattgagattaaaaacctgcactactctaatggctagggtttttttttttttgttttgttttgttttcacctgactgtggttatgtgatgtactaattcagctctcatttcttacagaagaaggtcgccctctccttactacagtcgctacaggtcacgatcgagatcccgttcctatagtccaagtatgtaaattttacttctgtagaattgaaaccatctttctaagcagtggtgtactttgggatatgtggttgctgttaatattgggaagatattagaccagtcagactgtaattaattctctttgttctatttcaggacgctattgatactggagtgattgtgcccgaggactttgctttttcttctttttgattttggattcccaagcttccatgcttcctagtcctttaaaccaaaaccaaacaacctggtttatttaatctctgcctgaccagttgtgttgctgtttccaccctttgttatactctaaaggtgtaattgtcttttcagtagtgaacatcctgagtgaaagggagcccgggttctgctttgtggttcttctttgcctttacagaggattgacttcttatttgaggacagaaaccatcttttgaaaactttttctgatggatattgtggtagacattagaaatctgtggtatgataaactgctttttaatcttcttggggaaggtaaataacactttaagtaggtcagtcatgccagctttgtctggagtggcatggagcagttgaatagttgagtgtagaatgtttgaagctctaggagaaaatgtgggacatttcttttgaagaatataactttgaacctaagaattaagtcaccttttagaaattaaaagcttgtaattcctataagacatgttgtatttgaatttacatgttaaaccttataaacttaaagtgtgatttttatgttaaatttacagaaacttaagtattcccttaatcactgaaggacaacctttatttattaactagaacaattgtataacttgctgttagaaattttggtattgggacattggttacatgggttattgtataggatcctaaaatacatgtggggaagagtaatttcaaataaaagttaatttgaaaatgggattgtctctttatttgataacagtgggaaatataactggattaaaagccgttttttgttttatgattgagtgttttgcttgcatgtatatatgtgtagtgtgtgcataggcagtgcctgccttgggagctagaaaagggtatcttagctcttggcctgttaacagttgtgagccactatgtgggtgcttgggagtagaatggggctctggaagagcaaacactcttgtctctccagcccagtag

SEQ ID NO: 31236 - DNA, 1167 bp, Mus musculus
ttcgaattctaggcttaaggattcagacttgaatccagcgctcactaagggccatctatgagctcttcattttggaaacctatgattaaaaagactggcacaggagcagtagaatgcaacttgaattatttatggcagaaacccttttcaagaaatacaggagaatgattgtgccattacaaaaaaaaaaaaatccagttctgggtgtgctgtggcacatcattaattccaggcacttggaagccagaggcagacagatctctgaattccaggtcagccagggtgtaagtaaggtcttgcccctcaaaacaaaacaataaaaatcgtaacaggtccataaacaacttaacttggtccgcacatatatcaatttaggaagatgccgagatgttttgagacagggttttactgaagctcaatcacgtgctttccttaactcaggaacctttcctttcagcttctcctcggtactggaatttatagccagaggccaccacacccagtgttcttttgaaactgggaaagagggaaaggtggctctgttttgctttcatttctctctttcagtgtctttactgtttactcctggctgacctcaaactcagatctatttgcctctgcctcttgagtgctggcatctgtttgtcaccttaataataataaagagttatctgctttatcaaacctatccaaaggtaagagaaatgtccttaatgtcctttggagaaattgagaagaatggacataactcttatagttcttattctggcctcttaaaaacccaatttttaaaaaaggagtcctagtatgaagtcaccttgctacggaatgatttgtcaataaaagtgaaaaattaaacaaatttacctgtatccgctggaattaaaagttgtatttgtgtgctgtagaagatggctcagtgaggaaagtgcttgctatagagcatatgaacctaagttctgaagcctggccaatattctaaaagccaggcttggcagagcatgcctctaatccaaatgtttaggatcctcaggagtccttaggcacttcagctaatgagtagatgagctctgggtttagtgagagaccaaccctatctcaaacagttaagtggagggagatacatagagcgagatgtctaaccttctgtcaacgggtatatgagcg

SEQ ID NO: 31237 - DNA, 2843 bp, Mus musculus
gccgggcgtggtggctcacgcctttaatcccagcactcggaaggcagaggcaggcagatttctgagttcgaggccagcctggcctacaaagtgagttccaggacagccaaggctatacagagaaaccctgtctctgtaaaaaaaccaaaccaaaaaaaaaaaaaggggggggggcagatactggggataaggaaaactcagctggaaaagtcggtttgtttgttgggtttttgtttgcttgtttttggttggtttgttttgctatgcaagaaagacctgagttccatacctaaagagaacaaaaccaaaaaaactcaagaacaaaaccccacaggcaaagccaggcgatgacacacgcctttaattccagcacccggaggacaaaccgacccaacgccaaacagcaagctcttgaaacccgccaatctcccgcgctaggccaggcggacacaaagcctcccggggcggaggcggggttcgcgacgacgtcatcacaggtccgccccttgacgtcaggcgccggggacaccaggaggtttctggcggcacgggcgccattttgcctgaacgtgcgagctggtgggagtggaacgcactggccgttgtagccgtcgccttcttcctccccacagtccgaacagcgcggtgactaggccgtcggccctcgagccgagacatatctcttatttagttctcgggagcgcctggccgacatgagtgatgtagaggagaacaacttcgagggcagagtgagtacaaagccgcgggagccgtcttcggcggcggcccgatgctccggggctcggggacgagcgcggtcggtcgggcgaggtggcggggccctcaggagcagccttgagggccaccgcgagcgcgtcacgtcccaagatggcttcggggtccccctgcgtgcccagatgccccactagcccgcagcgctcctttctggcggctgactggtacctggcctggtcctatcctctcctgtcgctccctttcctctcagcttcccatctctgctccgaggtgcgggtccccggcgcggtggggcaggaggcggcggggcgctccctccggccggatagtggtaggtgcttcctgcggtggcatctcgggccaccaccacccctcctccggccatcgcagcggggtctcggggtcagaagtgcgcggggctgctgtccgggcggggaatcgctggcgcgggactagctggggcctgttgtctccttggctctctgttgcagtgagcggccgcgtctccgtcggaaccggcggcgtcgcgtctgtaaaggcgaaagccttgaggttgaaggtgggacgagcccagtgaagtggttagtcaacgaccgcagcgacccttaagagtccttaagacgagagcgagcggggaagggaaaactacgcaagagcctttccccttaatgtcctctttcctttcgcttctaaatgaatgtggaaatgcagtgacgcctgttttcctaacagctagatgttgggttctttatgtctcaacttccaaagctttccttcctgtgaccattcctctgaaaactcctttacagatctttatggctaaactgccaagacatcttactttaaaccttacgtaactgaacaaatttcttgcctcagttttcaaaaaagaaaagaaaaaagctaatcattgttaactcaaaagattatacctgaaatttacagaccctcccccgtttttctcacccattccccggaaaagggactcaagactttggttatctgaggtcttgtgagtataaaccgtatattcacaaagcttgagtatattattagaacgttaccggtttttgagttttattccgaagttaccctagtattggaaattaatggaagtgagtcctggtaaaaccatggaaggaaaaaaaagggaaacaaaagtcccatggtactcgagggctggcagttgtgttggtattctagtggaggaggggcgggtggaaaaaagccgctggagggctttgctgaaggaaagaatttgtcccttttggaagctcgggatttagacacctgtactctgtcagtcaagtcatatacggtcagttagggttttgatcttgagaaaagagggtgcattttgtttgtttatttttttatttaatgcactaggacaaggtcataactacatttaactttgattggattatttgaatgaaatttgcacacaacgattgagttgaacctgcttactatttttaggattgttttattgtactaacaacttttaaagactatgaagtaaatatttcacgtagttgtattacttgtgaaactaagtaattaggaaaagacggttggggtttgggtgtgttgttttgttgttattgttcctggtttagtctgtgggacttgtaccagtgttgctctgatggctctgattgctgctctggttctcccatttgtcctctagtggaaggagtagtggataattaccaccttcccacaaattattgaagattcctatccacttttcagtttatttaggtattaacaacctagttaacagatagggactttctagctccctctcttctgccattagtagtacagcagtacctgtggttcagtttacatcagcgctttcagggtcagttacagctctttaagatgtaacagtttttgttttgtattcttaaattatgattgaacagacttgtaattacataaagaattagaaggctagaggcttgtgggggggttcatattgatttttgttgtttttgagctttgtgggagtggaacccaggccttttgcataccaggcaagtgctgtaccactcctcttcttaaagcagctaagtatttaa

SEQ ID NO: 31238 - DNA, 1099 bp, Mus musculus
atcactacagtatcagaccctctgctttcttaaaacactcaacaagattaaaaaaacaaaaagaatgggcgtgattccgttctgcatgtctgttctgtggaacatcaagcagttgttttctggtgggatttctcccacactgaagtccactcgatggacatgcaccggagccctcttaggcctcagaactaccttttcggttgcgaactaaaggctgataaagactatcactttaaagtggataatgataaaaatgaacaccaattatcattaagaatcattttaggagcaagttacacattgtagaggcagaagcaatgtatgaaggcagtccaattaaagtcacactggcaactttgaagatgtctgtacaaccaacagtttcccttgggggcttcaaaattacaaccacctgtggtcttaaggttgaagtgtggttcagggcctgtgcacactagtggacagcacctagtagctgtacaggaagatgcagagtctgaagatgaagatgaggaggacgtaaaactcttaggcatgtctggaaagtgatctgctcctggaggtggtaacaaggttccacagaaaaaagtaaaacttgatgaagatgatgaggatgatgatgaagacgatgaggaggaggattttgatgatgaggaaactgaagaaaaggttccagtgaagaaatctgtacctgataccccagccaaaaatgcacaaaaaccaaaccatcaacttaaaacctttaacaccaagatcaaagggtcaagagtccttcaaaaaaccaggaaaaaactcccaaaacaccaaaaggacctagttctgtagaagacattaaagcaaaattgcaagcaagtatagaaaaagtggttctcttccgaagtagaagtcaagttcattaattatgtgaagaattgtttccagatgactgaccaggaggctattaagatctctggcagtggaggaagtctctttaagaaaattgtttaaacagtttgaaatattctgtcttacttcatttctgtaatagttgatacctggctgtcctttttataatgcaaagtgagaactctccctactgtgtctgataaatgttgtccag

SEQ ID NO: 31239 - DNA, 1225 bp, Mus musculus
tccttgtcctcatcctcgtccttgtcctcctcctggtccttctcctcctcatcttcttcttcctcgtcctgctcctctacttccttgttctcttcagcaatcagtataagcccagacccatctctcttcgtgttttggctgaggttacttcaaggcaagggctaatcctaggcctgcttcattttttttttttttcttgtgttcgacctaggattcttcatgctcaagggttggcccagggccaacatatattattctttgggcctgggccacttccgggattggggatagtcccagtcccataactcctattagggccacagccactttaggaatcagtataggccaaggcccacatttctttttctttgggtctagacctcttttcaggtatatgggtagtgacaggcccacatttctacatcagtgggccagacatccttaggtttagtgattgacccaggctcaaaagtttggtttttttttttctcacaataattcaagtgttggggacagaccctgacctacatcttttcttctatgggctcaggcctcttcagcacaagggacccagaactctgaagggttagggctatgtccagctgaacatcttcacttttttcaacccaggcttcttcatgctcatggactgacctaggcttatattttcttctttgggcccaggccacatgaatggttgaaaataggttcaggacccatctattgttctttgggccctggtctcctcaaggttatggaaaggcccaggcccacagttcttcttggattgggcccagtatccttcatgtacagggatttgcccaggcccacatcccttttttttttttttttttttagagccatagcaacttcaggaataggaataggaataggatttggcccacatctcttctttgggcctagtttatttcagggttagaagatgatcaggccaccatctcttccttttttttttttttttttgcctaggcccctttaggaatagggatagtcccaggcccatatctcttcttctttgggcccagaccacttgaagtttagggatacacccaggcccatatctcttcttctttgggcccaggactcttcaggataaatagtagactcaggcccacattatgcttctttgtgtctaagcctcttcaggaatagggataggcccaggtccttatctctcaattttttttttgacccaggctacttc

SEQ ID NO: 31240 - DNA, 1160 bp, Mus musculus
tcattgatcaatcctctgaaactgtaagcatgcccccaggtaaatgttttcttttgtaaattgccttggttatggtgtctcttcatagcaatagagcagttaactaagacacatgataaacaaaatgacacatgctttcaatcccagtattccagaggcagaggcaggtggatatctcagttcaaggccagcctgagctacataaaaagaaaataaagtttctctccctacccttttttcataagatgaatcattgctacagtttcagagtcgctacactagtgatgtttcctaccagtcagtgacgagcgtttttggccagatccttggtggagaatcacccttaaagctacatgggcccttggcacagcataatgctccagcacatttccaaggccctctcagcagaggagtggcactgttatgtttaaaaataaactgtgtgtcttagaaaacatctgtgtcttcaactttacacagcaggtattgactgtctgtcctataaaggaaaaatatttgtatttacacattctcaagggaggcccagagaaaatcttgggacaagcttgtgtgtgcctctgagggctacagtgcaagattacccagcgttccctgctctcctcttcagcagcctgccttcctattgtcttttcagttaggcattttgaactttgtgctcttgcttggctgggtttttattcaaggtaattccatgtagcctgattaggggcacattcctccagatgtttactaagggtttttacagtaacttctctgctcagtttgaactttgaatcctttactggagaccatgagtaaatccccatacggaagaatagggcagaaccacaggaagaaattggattttgtacttgatggtgaactagtagaccagtggacttcccaggggggaagcacatttgtgtacaggaacactcacttagagggtgataatagagattatcttattcattttaaggttagtaataacacatatcacagactggataaattaaggaaaagaggctatttggctcacagttctggaaggtttcatggccacatctgccgttggccttcatgttggtagagtgtcaggaagcatgtctgtcctttttccctccctcttctaagatttaatcctaatgcactccaaagcc

SEQ ID NO: 31241 - DNA, 1442 bp, Mus musculus
ggattattttcatttgtcgcagtgatgtgctgatgccgactaatgttgcatattagctatggagctcgggtggaagcatggtcatgcacacagagagtgccttatcctgcaaacttaacttagagaacatttacttattttcaaatataaaatttcaaacctattacttcagttttgttttttaagaatagtcagcaaaaatatgcctgtgcaaatgtttgtgatatttaaagatgtctctaagctgcaagctgtttgttaatcatcagatgtgatttctgaaacaggaagtgatttgttagggtatttgttctctgttatgtcaaaaaccaaatccattgaacagtttacaagatttggaaataattgccagctattcatatatatacacacctgatactcattatgtaatatatactatataatgttctatattcttcagatttctgttaagaagtacactttttttttagggttaggaactgcattgacacagcgcactgatttccagtcaccttggttgatgccctcctctaggatccctgaatggtacctgttcctccataaacactggcactcagtgacgcagctcgctgaacttagacagccttagtttatactgctgccagggtttctttctttctttcttttcttttttttttttttttttttttttttttttttttttccgagacagggtttctctgtattgccctggctgtcctggaactcactctgtagaccaggctgacctcgaactcagaaatccgcctgcctctgcctcccgagtgctggcgtgcgccaccactgcccggctgctgccagtttttcaccgtcagaagagtcatacttgaaagggtttggtgcttaaatattgatgagtgtctttggtgacagtcgatagacacctgacttctgattttggctttccccttatcagagttatacatccatctatatgaagattgatttagctatacatagacatgcatataaaggtacttatatatggtaagaagcaatattatacattgctttaaattactttcataataaaacacctaagttaccgtattgtaatagtggtaatctgcaggcttttacattttaattctagaatttcatagccaaaattatttttctttctttttttcttttttttttttttttttttttttttttggtggggagggagcagcaaagtgttaacaaagtggaccatacacttaataactttgtaaactacatgtatttgctaaaactcatggattctcattgtaacatgagtcagagcacaatatttgcatgacaccttgtaacttagtgtttcagcacactgtaatgtaagcttgcagagaaagttcagttctgtgctcacaggaaatgttccatattccccagtgtaccttcatgctgtcttatgaagcctttctcagctgctt

SEQ ID NO: 31242 - DNA, 1138 bp, Mus musculus
tagctacatatctttctcatgttaaatataaaaatgcataatgtctagagtatcatctgtatttaacattgtttctgttataaatggtactcatgagccatcaacatagctacattagatttctcctaatggaatgatagttttgctcactataatataaatgccaatattaagaaaatacaactgtttctcagtgaaaaatcaccaaatttgaaactcaagttcccatctgagtctatagaaaccatcaggcctgacaaaaagattcttcctagatgacatgatcaaggaaatttatacttctctcatggggagagtctaacataacagactcatttataatagctttactgaagatgaaagggcatacagtggtgttcaataattggtactatgtaaaaaaatgtacacacacatgcatgagctttgggaagacacacgtgtatccataagtatactaaaagatgagtgtccatattcagcgttgagggcatggttatttctttataactaatggttacatgtattatttcattttcaaatgtgcaaatgcctgtagaaatgatgtctctgaacaagtcatttaaccttaggcaatggagtatatttactgccctacagtagagttttcaccttcagtcttacagtgcttttactgtacagtctccatttctgttttttagttaatatctgatgtcaaatacagcaaaagtgtttgtttttgtctgacttgatataattgctgaccatagctttctgaaatagatatcatcataaaccaaataggactaagccctagattccagagtctggtaatttataataagtttaaaacacttcttttaaaatgacaaattgattattaaaacttatttagaaaatagctcaagatagcagtaaaatccagtagtaggacgttgattatggccaggtactaacctggccaaaatgctgatgatgccaggcctagtagtgcaggcacctaggaggccgacggaggaggagagcaagctggagtctagcctgggtaacatagcaagaccccggctcaaaacaaaacagaacagggcccagggctattgttgtcagagtatgtacctagcacatatgagatccgggcaacacaagaaatgatcct

SEQ ID NO: 31243 - DNA, 1132 bp, Mus musculus
gcaagccccttcctaatttactcaccagaatcaagctgccttaaccttttgtggagcgggaagggcaggaggacagacaaaggacttggtcacacacaatagttagcttctctgtgatgtgctttctaaactttggggattaatcagtgcagattgatggtgttgcccaagtttgtccttgtgttagctgttctgcagggggtcttcatggatctcggtggaatttttctcaagcttctatgatcaactagtgtgctggctggcaggatccctggcctagagcgctgccatgggaagctctctcctacttggcccctcatcttgcttcaagccagcccctgaggtagcacatcaagagaaagagaagccaaaacctgggcttgaatccacagctagcactcatccaacatcctgctgaccaagcgaaccatgtggtcaggtcaggagatggcgaagcagaattcacttctgatgtcacagagtgccagagacgaggacatagatacaaaatggatgaagagttagggatactgatgaagtctgtcagccatggcgtgagaagacagtgggagaactaacccgggaagaagatgaccaggctcacagtgaagaagacagaacttgctccctgatcctgtgtctcctgcccgtgttctctcatcctttcctcaagcactggaacatttatttgatgtttgtgtaggaacatttggtcttgtctgcggaaccaagggtcttttcaccataggcattttgtgcatcttggcagagttacaacatgtcttactttcccttaggagaaattaaagattcctactggctatttactcccagaaaggatgccccagagtcttagttctaaggatagggtgtttctaatctacattttcttttttttgtcttctaatactatggtgaaaataataaagtaaatattgaaatctcctcaaatttctttatatcctgatggttctggctgaccgtacacttataaagaccacaccctgaagctctcacaaagatcagatgaaacgcttgactccagggtttaacttgacccaagggttgggaggggatggtgcagtcagtcattatgtcattatgagggcagagaaagagaaaggggccacat

SEQ ID NO: 31244 - DNA, 2910 bp, Mus musculus
gaaaggtgtgtcacacttttcacgtgcttttaatcattagtactcaaaaggagtaaaatcactttatttacattgtagggcagccaggtctgtgtacagactatcacaaggctgaaagagaacttaatttccacaatacagacataaaccttcagatttatatatgttctaagtgtgctttcttgtttcaatcattgcagggaactatggtcctggaggaagtggaggaagtggtggctatggtggaaggagcagatattaagcttcttcctacttaccatgggtaagtagtttttaagttttacaattattattatcttgggagaactagctgcaggagttaaaagcattttaggatcatgttatctttccttaaaatctggttagatggataatttcataacctatttttttttactctttacttctgttgaaacaggcttcactgtataaataggagaggatgagagcccagaggtaacagaacagcttcaggttatggaaataacaatgttaaggaaactcttatctcagtcatgcataaatatgcagtggtatggcagaagacaccagagcagatgcagacagccattttgtgaatggattggattatttaataacattaccttactgtggaggaaggattgtaaaaaaaaatgcctttgagacagtttcttagctttttaattgttgtttctttctagtggtctttgtaagagtgtagaagcattccttctttgataatgttaaatttgtaagtttcaggtgacatgtgaaaccttttttaagatttttctcaaaagttttgaaaagctattagccaggatcatggtgtaataagacataacgtttttcctttaaaaattttaagtgcgtgtgtagagttaagaagctgttgtacatttatgatttaataaaataattctaaaggaaattgtgtaattatagactttttattttaaataagttaaggagtgggtagtataattaaggtccattgcaaagctgttgttgtatttgtgtaagataaaaatgctggtcagatttaagtgtgttgtctgaaattcatcaggaataaattacctagttaacttaagggatatctctgcaaagagaaacacctttttagatcttttagatgctgcttcttcaatgcaaggaaaggaaataaccccagcgaggtactcttcagggacacaggtctagtacaagagaactcttgacgactaatcgcagccagtcttaaaaaactgtgctgtatctacaaagctttaactacagtagttgataaggatgccaacgaaagctgagggtgtagagcaaagtagttctaagcttcagttaaacttctttaggtaagaacttatttactttttctttcttaattttcctcccttaaaagataaactaataaactcttcaatggtcttttcagtatagttcttatgtagtttaacatagcttataaattgagtttaacaataaactcaagataattttataaaccctgttttccaatctgtcatttacttaaattattttggttgttttccctttttttccttctttctcaccccctccctttccatgaagattcaggtgcttaacatatcatttttttccctgctggaattttagcattgatatgaaccatggacaagtatattctgctgccacaaagactgtaaagtgcttcatttcaacagctgaggcaagccaagtgatcattaataaagcttttcttgcttccttcagtggtgttggtagtaaaatggtaggtaaaagttaggctgcaagttcaataaatgagatttacctatcattccacccttgtgtattcattcacctatcctggttcaagcagtttgagtcaactaggcatttaaaggcattgtgtttattgtggtaacaactatacatgcttatcagggatgagtctgacagtgttttcttacagtagaagtttctgtgcaacagcagcagcaaaaccctctatgtaccctgtactaaatagttggggtaaaatgtggtaattttttgcccattgtcctgccctaaaatgttgtaggttggctattgaaatttcctgaaacagccctcttgatttctaggctttattgccttttcagaaatgtgatattgagcgcttattatacacatcagtgagtctgctttaatcctaaacccaccactgaagttacttaggttctgtggacaaacatgataaacttcttcagatactttttttttcctttggcaggaaggtgtcttgctgcaggtaactaatgaagaagtggtcaaccacagagtcttcaagaaataagaaattctgtaccatctgaaagtagttcttgttggtgccttcatttaagaagcacttttaagaaaagggaatgttttctgatttaaaacttcatttagtacaggttcttaataaaattacaaaaatgctgattgtaaagggtaacatcaaattagcaaaggataatgtattgttttaggatttgtgagtagacagataagagctctattttaaatacaagttttataaaataaatacttttgtatccaaattacttggtgtaatgcttacacataagtgtgaatcttgttctatcaacatcagttgtctacaagatcgacactataaatgctagactagttttgcacagaactatacatttagttctcattcaatactaataggagaaaaaagcattaataggcattatttactgtctaataaaatataccttactatgaattgtgcactgctacaacttgatgctgaacactaatggtggcattttgaaaccatggattttaaccagatagtgttttgagttaccacttttgcagaacaccaaaacactgatttttattccaattgtgaatgggtagcagtggtta

SEQ ID NO: 31245 - DNA, 1183 bp, Mus musculus
tggagcacgaggcagatcatagtcagctactgtggacagtctgaagcagccccatatcccatgcctgggattaaaacgaacacacatccttactgcatttctgtgtttttaaagttggttctctcctttcaccatgtgggtcccagagattgaattcaggtctttgggcttggtggcaagtgatgttacctgttatgctatcttgttggccctctcagacattttattcgtaagaatcatgggaaaagaaacagatttctgggcctcagggctcagtaggcctgtggtgaaacctgggagtctatttcccattctccgaggctggcgtatacctgtataagtgagacttgtacaaattattgataagccagagactcccttctgtgcaggagatggaactcagagcctcctagagcatgctggacaaatactttagtgttgtactatacccccagtttttttttttttttcacaaacttaaccccttcctcactgatggagaaatctaacgatactctagggtttgtctgtctgttgaccctcctaggttaaaagagaagccacctatgtagctccatgtccctcctgaattccatccagcacctttgttctgtaactgtggacaccactcagttcttctttcatttttttttgttttgttttagctttatttctttattttctatgtgtatgtaaaggtatgcagtggtttgaatgactgcagtttgtagaggctcatatatttgaatgcttggtctccagttggtagaattgtttgggaaggatttggggttgtagctttgttgaggaggtatgtctctggagatgggtttggaggtttctgaagactcccatgattcccagtgctctttatttctgcctgtagttgtggatcaagatgtgaactctctgttattcctttgctctgtcatcatggactgtaaccctctgaaaccataagctaaattaagtgtttttcttttcttttaaagatttattttattttctgtgtgcatgggtattttgtctgcatacatatctgtctaccacatgtgtgcctggtttctttggagtccagaagaaggggttggatcccctgaaactggagttatagacagttgtgaaccaccaagtgggtgttggtaattgagcctgggtcccctgagtgagtaacaaatgctct

SEQ ID NO: 31246 - DNA, 1149 bp, Mus musculus
ttttgttgttgttgttttttcttgagacagggtctccctgtgtagctctggctggcttggaacttgctgtgtagacccaggctggcctaaaactcgtagagatccgtttgcctctgctttccaagtgctgagatttaaaggcgacaccatcacgcctagtcaaaagaactggaattttaaaaaagtgtacagattattattattgtgtgagtgtgaatatactgtgtgcatgggccaggatggggaaaaccagaacataaaaacaaaaccggaatccagcagtgtaaatctaacccccccaccccccactcagtcctgtaatctttgaggctgtaatcctgtggtctccaagggacttgggcagccccacctctccagctttgccatccacagcacccaaagccaccctaggccccctctatctcatatctcatatgctctcataggtggatattttatggtcctggcatctccaatatcctcggatctccatagcaactagagactgaccttcatcaatagccccttagaccctcacttgtagtactctgaccttgccacgagatgccaagcctctcggaagacgttttctctgaaccctcataccttcaaaaccagtaatacacacagaacactctaccgttgccaagttctgctcaaggtgtagtctgatcttggaccacagatgtctcagctttggtgtgttgaaatacttctttctcgttccagcgaagcctagaaggattcacctcagtgatgccgaactcttgttagcagtagctgtttcttcagacagtcctagcctgatcaggcctagttctagctcacagtccatcatgtgggtcacagtagcaggagcccaaggagcaagtcacaggacacgtgtgcaggggtctgaggataactccccaaagtagtgtttctcctgcagtcggcccccggggattgaactcaggttggcaggcttttgcagcaagtgcctgtatctgctgagccatcttgctggtcctattctgggttattcagaccagtccttgaaagccaaccgaccagctgactgtggacagcgggagaagtgacctcttaggcctggtggttgcccgtggacactttgatgtttagcttgaagagccccatgtccagctgtga

SEQ ID NO: 31247 - DNA, 1237 bp, Mus musculus
gttcccctctgttactcaggctttgagtgtgttgtgaaaaccaatttcctctttttattattttccccctctcttcttttccagttcatcctctgggcttggacacagtagtgatgacagcagttctcatggatgtaaaacgagcccagctctgcaggagtcctgagaaggaattctggggctaccaccttaggaacgaaattgtgcccagccagaaagaatgctggctcataatagattcttacccaatgccactgtcagtatcccaggtagtgaaattcttaaagtggtggggtattagtactagtagttttatgttgtctaattctagccaagcttctgtgtgaagctataaggtctgtgaatgccatacggccctttattgccatcctatacttgtaaatacgatcctgctctcaagtgaaatgagttatatgagatatatatatatatatttggtcttaactggattttaaagagtttggcgtattagtagcatttaaagccagatagggcacccttgctgtgtcaatgaggaagttactgtaaacacagtgttcgactgaagctagagtgcagagtcgcagcactgctgactgcctgcctctctgacatgtggctcttgtttcgtggggacttttcctctggaaaatactttgccttcaggtatttgattgaaatatttaagagtatttaagctttccagtatcctgtatcatgtgtaaatggaaaatatgtcttacaaatagagatgcactaaaacaacaaaaacaacaacaaaacaaacgtttacatcctaggagggaaaaaaaacaaaagtctttgtaattttgcttaaatttgccagacacagatttagaaatacattctcactgtccaaaatcagcttaaacactggctctggcgatgagtcattgtgcaattagaatcatatcttatgatttattttctgtcattaaaaaaatgtacattaaaaaaaaaagtcaccaggtagcttccatgaggaatagctcctcacggttcattttttcagttagaagaaggtttttatgagttaattttacccataaatatttcagtaattttggagtggaagttgggttgctaacatcagagctcatgttcatgttttagaagccctttctttctaggtgtctctcaaaagactggcttaattggaataaaatagctttttttttttaagtgtcccaaagataagatatcttggggtccacca

SEQ ID NO: 31248 - DNA, 1200 bp, Mus musculus
ttttatttttgttttattttgttttgcttcagctttaatttttaaaaataactctagagaatttactttggaagtgaacagattacttaaagttcctttgataataaccagctgtgttcgtaaacctcctcctagctagtaaaatgccacttttatggccttcctgaggaaattaattgaaaaccgttgagcaaattttcacttttgtttgagtaaaaatgttttttctttctaagcaggataaataaagagcatttctactgaagaagaaaacttaaatgtagctttctctttttgcctgcagagaagtcttgtgtctgtctgcaagtgccttggaacatggaatgcctgagtgcctgctcggagccaccttcctttgggtgaacattcctgcctcagctgccattcgatgtagtcacgcactaaagcactctgatgtcagattgagcaggcagtgatgggttacattagatacaagcagtagagataagacctgttgctgttttgcaaataataattagttttaatttacccgtttggtttgtatggtagaattcactgtgattgtacgtgaatcttagtcattgaagcgccggtgagggttgctgtttctcttagtcgctgggtgtaagttatttttagagtgccacaaataatttcctagactttgtacattttgagtcaataataaagacttctttaaagctgtagagatgacttagcctggtattttattcttcatagagtaataacatgttttcattaaagaagttgtatagactcacgggtttacctgctgtaggtaagaaagaataaaccggtgcttgaattacagatagagggaaagtggcagcctgctgtccgctggcgcacagatcaaaccagagccgggttgctgaaagcccttcagtatcctaatttgatgatgggcttgccagtgttttctaatataattttatttaaatttaatgaaatcaaagattcataagaaagcccatttaccattaatacaatggtataaacaacttgggcatgttttcagagtccgaggcaggcaggtattcgctgacctctctgactctatcactgcactatcacaatcccaccgctaagtagcagtcctggccgaaactcctgtgcgctgctctggaccaaacggaagagacagactcttgcgggatggcagcagttggcagccag

SEQ ID NO: 31249 - DNA, 1300 bp, Mus musculus
actgaagagcgtctcggttttgctcttgatcctactttaacctttgccagctcctagtcctttactaaagcattgaaaactgtaaaaagcctcctcagttcaaatgcccataagcagagccccgatcgaatggaatgacatcccattaaaccaactactaggcactgagaaagggaaaaagaaagggggctgagtgagggggtcgagagggagggacgtgggaatgcttttaagtaacaatggggaatgattttcaagatatattggggggaatgggagatgcgcaaaatggagcagtaccttttgtgtttgaaaaggtagaaaagcctaatgacttccatactcatgtagagaccctgaagatgacactcagatccactaacaggagaaccggggtccaaccgtgtatcaaaccagcaagatgacaggcatgcgaaagaggattctcatgactgcctttctcatatgtcttatttttgaactatataaatatgtataaatatattacctattcagagaaaggaaaaacagtaggatgctaaaagaatggagacatagaccagaaaatctggccatgggcaatgtaagttgaaagaatatatgtcaataattcaaaaaactgaaattttagtttttaaaatatttttttagattgattttatgttatgtgaatgaatgcttgcctgcatgtgtgcatgtgcatcatgtgcatgcttggtgcccaaggaagtcaggggacggtggaccctctagaactggatgattacaaatgattgtgaaccaccatgtgggcacccaggttctctgcaagatcaacaagtgctctcaactgctgagccgtatctccagacctggagcaaagctgagtagagcttccagctctaccaacccctcaagggctgcctggcctgcgcacattatttgaccacccagtgcctgctccacaagagttgggggtaggattgagaaagttagaacaaggacaaggataccacaagaagatctacagagtcaactaacctgggtgcatgggggaagctctcagagactaaatgccaaccaaagagcctgcaggggctgggcctaagccccctacacatttgtagcagatgtgcagcttggtcttcatgtgggctccctaacaattgcaccaaggactgtctcagtctctgttccctgcctttggatcccctttccctagatggactgcctggtcaggcctcagtgggagaagatgtcccaagatgggttagcacccaaggggggcttccccttctccgaggagaagaggagaggataa

SEQ ID NO: 31250 - DNA, 1181 bp, Mus musculus
aaacctcaaaatggaaacccgttctcccaaaatatttagatgtctgcattctatattttaatttactaaaggattagtattttttttttcttgtttactgtgttaggagactgcagtagaaagtttagggactcatcgtcacagcacattttaaatcaagcagtaatttcagttcacacattcgttctgttcatattcactgtaaatgctatcttgtaaataaagacattcagcacactgtgaaaatgtatttgtgcacctgctttttaaatacttccactaaaaatgaaaaattagatctgtagatagtggtattagctctgttaatgaaataatcactgccattaaaatctgaaggaaacactccgagttacttttctacgcggaacttgaactgcacaaaaactaaacaagcaggtttgttttacacaagccaaggaccagtcttttattattattattgttcaggtttttctaaattttttatgagaagaggaaaaaaatctcacataactaaaagctcacaactgaaaaggtttcgaggagatgaaagtgttaggtgttctgaaagggagagaaaggaaaggagggagggagagagaggaggttcccagactccctgtggcaaatgaaaaccagttgttgagtatcagcaatgcctagactgtcgtattttaaaatctgctcttaagtctgcatgtgactgaaaggacaggtttttggtatttgttgaaatgacaggactaggaaaggccttaaaccttgaccttgacgaaaaaagacaatttgtgaccttgacttttgacagctcatgaattggtctcagccagattcgtagatcaagggcgccacctcgtgttgacaagcttccttgacgttcttcagcttcaagggaactgagctctgacttgacttgttttaaaggtttagtagtcatattttttttttttgctccaaaaggagaatatttgaatatatgtaaattatacatgtgcttgtatatatgtgaatataatatatgtttatacatgtatttgcatatcagtgtttgtgtgcttgtgtacataattgtagaatttgtacagatattattaattgctgacgagtgaagatactgtaatttaagccgatttctagacttggggtacaaaatgctccttatgcggtgaattttgcttcct

SEQ ID NO: 31251 - DNA, 1161 bp, Mus musculus
cagtatcaaaggacagaaaacatgcacacatacaatgtgtgtaagaatctttttttttttttttttcagattctatttttccttccctacccacttctccctttagcctagccgagtctcccacacgtctcaatatgcttccttctgcctttgatctaggatctgggattggctcaagactctgccaccagcaccaagaccccaattctcctaggaagcctggcccatcagatatacaggatgatgtgttcaaagggctactcaaagaaagacttctcatctgtgttccagtatctacgggaggaggagcccttctgactgcgccctgaggacgtggacgctgttaggaaccaaactctgtcctgagcttcctctagctcactctagaagtaatggtctaatcaaaggtcgtctgtctgcttttgattgtctacatcacagcaatccctgggaatttctatccattttaaatgctgccgctttcatctgtttagccagcacacccaatggtttcactaactagcccagttgacctttttgaagtttgagccttgagcaccttcaacaaaattgagcactctgattaggatatccactttgcaaataaaaccaaatgttttgtcaacatgatggtaaaaaggaaagaaatctgttacaaagacaaattagagggaaatttgtcctgttaaccacatgctattattccttcattcagggttactgacctactgtccagggcttgataggtaaggcagcttgttggcccttgttacagtatcttagtgtaccctcctgttacagcttccacactcagccggcttgcttcagtatttttgcttcctgtatattcttatacatgtttttgactccagaaaaatgacacctttagactgtttcagagccaatgatgatatttcctttaaataattattacattattctaactatagtcatattattttggatttaaataaatttctatcctgataacatttttttggagctttttgttttgtctcttaaggttgtttttgtttgtttgtttgttttttacaagcaaatgggggaaaggtgaaaagaacaaaggagggccaaggtcaaagggtacagagcttagagctggcgttgtcaagccagcagcttgctgcccttctgaagact

SEQ ID NO: 31252 - DNA, 1202 bp, Mus musculus
tttctcctctaaagtggacagtgcaggtttttctcagggatgcccctgttaatcagcagctcttaatactacataattgaagattggatgctccacttggatttgattttatggatttgtttgtttgtttgtgggttgttgttgttgttgttcttttggtgtgttgatttttctggatggtgtgatggggttgagacaggatatctctttgtaatcctggctgtcctagcacttactgtgtggaccacactggccttgaactcagagatcttcttgcctccagagtgctggggttaaaggcagatacctccactccaggcctttattttagatttttgaggtaggctcctactctgtagcctagttggtctgacacccctctatcccaagctggtctcagactagtgactcctctgcctcccagttctgtggattttagatttatagtgaaggaacaaagaggtggaatcccttcacatgttaatgagtcacacttgacctgtacatcctgacatttaatatttttctttgacctttgacaggtcaggccttgacccaaaactattggctaaaatcctgaatatgagctccggacgatgctggtccagcgacacttacaaccccgtacccggggttatgcatggggtcccctcatccaataactaccaaggtggatttggaacaacactaatggctaaggtatgtaactgcagaggttagctgggagggacagacgaaatatgtaatagtttcatcttcccctgcctctccccactcctctctctctctctctctttctctctctctctctctctctcacacacacacacacacacacacacactttcaacaaaccttgcttctatccaagaaggcaaaatgtttacaacagtgcatcagttttccactaaaaattagtgtaaatttggctttgattaaaaaaaatctttaccttggtcattttatttctggctaaggatgcactgagatttttctctgaggcttgggtttatttatagtataagctaataaaattttgttcttcatcataaatttacattaacttaaaaactccttagattgggagcagtgtgatttccaagttgttaatgctcttgtgttaagtgtgcgaagggatttcatgtataaattagtcgtttaaaggcatttatttgtttctgttttggtttggtttgattttg

SEQ ID NO: 31253 - DNA, 1204 bp, Mus musculus
ggttctacctcctctgtgcctccctgcttttagcgatgaaattacgagtactgaactctaagattgactcagttcttcctgcccactcctaacacatactcacattcactcattcttcctgaaccctgctgtctgctctaccacgtactttaccatttattgctcatttgctcatctgttccctttcatatagcatatcattccaacttccaaattagaatgtaaatccattccttagagagcactgctgtatggatcattcatccttagagttgaggccacagtcataatgccatttattaccaagcaaaagagaccctaggttctgctgaggacagtgtgttaggttcagagggaaatacactggatacattcccttacctccaggagagaatccacaactgaatggtggttggtacattagttggttggttggctggtttaagagagaaccctgtagaatcaggtaaagaaaacttttttagaagttataacttgaaaataaagaatcttactaatgctctctgtttttagtctgcaaagatctgcaacaacatgctgttggctataagtatgattggaaccgctgaagctatgaaccttggaatcaggtttgttgaaaagaacattttcatatactaataattttcattgtcttccctatttgattttttatgttagaagaatgacgttcatggtaataaatgagttggttcaggagcgtgttgaaagtgtttcattactgagttttgatagactttgcttattggacaagcaataggcctctagggaacatcagcactctttgccacagccataaatgtagtgcactgtgcactgaagttgtgttatgctttgtatattggagccccatatcttctgttctacttaagtagaaaaactgtaaaattcaaacctactttggcaatgttgggacagatttgaatgaaacatgattcaaatgagtcatgaattcaagtgctatgctaccatgtgactagttttatatgcctgttttaaacatacttctcagaatctgtactagcaagatcttggtgctctgttgtcagaacaatcaggcttccattcctaaaggtacaattcatgtatataacttttattttagcttgcttggttatcctagattagaaagtatcttttaaaaaatacaatgttcactaattgtttacttagagtgagtcca

SEQ ID NO: 31254 - DNA, 1196 bp, Mus musculus
ttctgtgaccccatgactttacattttagatttcctgggatattaatatttcaaatgttcttcaaatatgccaggaaacagatcttaatttttgtttcaggaaacatatttaccatgttaccagattccatacacctgtcttgaacatttcctgatttttcttttgcatttttcaacaataggagtccaaaaaaaaaggaaagaaggaaccagaacttggtggtgattgccatctgtcatctgaccctggttcatatgatgctattttttgaacatatctcttttctatagttatgatttagatcttttttcttttaagattataagtgtatcattttcatctccccactcccaaactctcccattacccagcctagcttgttttcgaattcatggcccctttcattaattgttgtgtagatgcatatatacaattcctaaatacaaaatgttcagtgtgcatgttactcatgtgtgtgttttcagggctggccattttggtattggataagcagttgtgctcttccctggggagactgtttctcccactaagtattcctaagctcgatattgttctctgtttaggcctggtctcccgagcttgccttatccatgttagcatggcttgtgatcaggcagtcgtgttggtgagacttttgggctgtagcttctgctactcctaggagccgcgatctcatagcaactcccgttcctctggctcctcgaatccttctgttcccttttcacagtggtccctgggctttagggttaggcgttgtataggtgtatccttggggagtggagggtagagagagagtctgggtctcccatggctttacattttagatttcctggaacagtcttatctcaaatgccaggaaacatatctcatttttgattaggaaaacatgtttacgaattgaaccttcttacctagcaattgaagcactgactagataacttgctgatgatacttttctcctttgagtcatttatacttctctagcttgcatagaattggattttattggcttgtgtggattttcttcacccttgtcctcccaccaacagtggatcttgtacatcttaagtagtaagagctggttcttagtaccaggttgcaaaccactgaatgatgggtctccagttgtggaatttgtgtgtgtgtcaactgtaagtctgtttttaaaatagga

SEQ ID NO: 31255 - DNA, 1100 bp, Mus musculus
tatgcagatcatatggatgcctggagcctgtagagaaaaaagaatgcattggataccctggaactggagttacacatggttatgagccaccatgtgggtgctgggaagtggacctgggacttcccacaagaagcaagagcaaagtgctcttaattaatggctgagccatctctccagctcttacagtaagaactttttgaaaataaaataaattgagacgaatctcagcctttagaaaaactcaggctatatagttgcctattactataagcttatgcatctgtctgtttatcgtagtatgcatttgactacaaaatctttaaggaactttttcttttgggggattcatgttaggaagttactggggtagctctcaagttgaaagaaaccaggtttcagtcctggtactgttttgggctctttctccttgctgcagaattctcttggttttgttgccatgtggatggggtactctgttcatgtttttttgttttttgtttttttgtttttttttaatttgttatcagaaggaggaggataaaaaactataccggtcagaaacaaaacccaactgtgaatttctctctgtaaattgtcatcagggtcctgtaggtgccagtcagatctgaggtgccaatcttagtgaggctgctgtacagcccctagtacaggtgagtggctgtgcctgaagaagaaccactttgggggtggctggaggagaaggtgcagggtaagtgttaggacatgcgaaattgtgtctgtgagggctagcatgttgtatgtagctcatggctgtgcatgctgtcaagaagtagggtgtattaaaggatgaagagctgaaaggttaaagaaagatagataagaagtagaactactgtaattctcacaaaacagatggagatttcacttaacagttatcagcactcaagtaaatagttgcctttaccctatacatgggctcactgcatgctataaatgtatttactctaaagttttagtgcttgaagttcactacaataaagagattgccaggtgggtgcaaactgtaaatagtaatgtgtcctttacactcatgcaaatatggttggctatccttcctt

SEQ ID NO: 31256 - DNA, 1174 bp, Mus musculus
gtgttagtggggagacttcagacttgcattgcctacttgttcccacacggagccgggcttttgtgttttctttcgtcctgtgtctgacagtagttagtgcattgcatttggttttagtttcttcattcgtctttaatctagaacagttctgatgcttcatctgttaaaagaaacttttatgataataaaatcgagagtcttataggttgctttttaatctggatttatttctttccttattagcctcaggctactaagaacctgctttatattttaaaaaaacgttgctgttcaattgtagaaatttttgactttttctgcattgtctcagaagtttttcttaagagtctcagtctcttcattcaagtacagggaagctgaaattgagttaactttttgcaggtaaagaaacctattgtgataagaaactttgtttttgctttggataaaaatcagctgccctgatttatgctgcactcacctttctgaagcccgatggcgggatttgtgcttttctgtgcccagcaggatctggaagtggtgttaaatgattccctctgaagtgccactttcagatttacatcctctcaggagcggcctctgtaaaacagaaacaggctgaactgcaagagaacgagctccaagcgtgtatggagcaaacgaaacatgtcacactagcttctgtctataaaaggaagtgggaaatagattggtttagtctggttatttttgaaacatatttaagaagaatttaataatcaaatgatatcttactgtaatacaaccatacatgctaaggaaacagatactttaatatgctgaacttagagaatgtgtactttcaaaaatgtttcttttagttgttaaaaaaaaaatctcacttaactaatgtcaccagttcttttcaaacccaatacactctgctccttagcttcgaggtgttgtctcagtgtaacaacagtcttgctggcagatcttcatactcaggaacagcagatgtttataatcgtattctgctgtggggaggaaggtagttttggttttgggtttttttttttttaaggtcatcagtgtttagattaatcaggctgacatttcttgctggtgggtcatgagctgttgataatagcactacatggtgattcagttgttccattgaatcatcagggaaacc

SEQ ID NO: 31257 - DNA, 1201 bp, Mus musculus
gatagggaagtgggataggatcaggaaagtgttggaggaagagtgagtctgatcaaaattagttatttgaaagtcttaataaaatgttcttttaaaaaatgtttccattgttaaaagaatatatcctcttgaagcaaatagctatattttacttgcttatatttattcttagtgaaaatgatatgggtatgagaaatttgcagtatagcttactaaagacttaaactttttaagacccagtgaataaaccaattcccttatgaaattactagggtttcaaacttgcttacactttaacttcactgtgtcagcatggccagtgtacttcacctgatcctaggctttcccaattcgttatctgaatgagtatgggtttactttgaactgtaattgatctgaacttgagtaaataaatgtaagatttgtcaactgtttcagtaccaggccacaggcctccttgacggtctggctattttgacctgattctgattgttgcttagttgcatgaagtactcattcagtgttgtaaacttgaatattttcatttatacttagaaaagtgaagaaaggctcattattaatagattccagtactattgatccttcagtttcaaaagaattggcaaaagaagttgagaaaatgggagctgttttcatggacgcccctgtctccggtggtaagtgctgtctaaaacacatgtgcactgtgtcatatagttttctgcttatccaaagtagctagctgtcctgcttttgtgccacccaaggtatttaccattgatttcagatgtgtaaagattcttagtctctcattaagataacaacagaacagactggcatgatgtttagtgctttcacatacagcacagtaagttacctgtaaattcctgtaaaggtgttagagcttagaagagtcacatggtttgggttgagttgttgtgtggtagacagatcactgcctagaagttcaagaactgggtcagggaataattagtttggggctggaactgtagttgagttggttgaatgcttgcctagtgcatatgaagtcctggtttgatccctagcactatgtaaactacatgggctggtacatgcctgtacccatcacctggttggccgaggcaggagaattagaagttcaagtccgtccgtcagtacataggcagtttgaagccaacttagagtgactgatgtctta

SEQ ID NO: 31258 - DNA, 1130 bp, Mus musculus
gcttacatttgaattaaacaattctcctttgtgatttctttaaaggtagcatcctccccagcagaagtagccgaaaaggctgacaggattatcacaatgctgccctccagtatgaatgcggtagaagtttattctggagcaaacgggattctaaagtatgtatttctcaagggtacagtttttcttgctgtagctctgggttttacgttgttaaagctgctagggcatttaaactctattggttaaattttcctgtgcattttctaatttcataaagtgaacagtggtttcctgcttactgtgaagagttaatttttgcactagagtcaagtatgtgacttgcgggactccctcctccagccttgcttaacttgcattacactttctcactggcagaatggttaggagccttttaaagcttgcattctaaattgtacctactctttaaaacatgattttcttctggtgtatagaactccagaaaagggactctgtgaaaaataaaagcaaacactgaaaagcacactaacttaagactttattatatagtaaaacgttatggactgtcctctgggctggtccatctgcagggaggacacgaggaagctggaatctagtgttagcagtagccctttgggtgacgtgtaattcccgtcagtgtttcctaccagtgtctggcttccctgacactgtaagcctgctggtgaattgctgcttcctgccaaacccttgtggtgtggttatgtcagagtgacagtggttgcattccagtttccggctttctgttttgtattcctaacttactttgctgtcgagtttaacagagaactagtacaaagtcatgtgccatgcagacacttgagtcaccacactgatttctaataatgcttgctaaaagaaaggaagatttgctttgagaaaagcgtaatacaatgagatttgaggtttgggaaactaacacacttgtaaggaaaagacatgtggatattagacagaaaactgataggataaatgtttaggcttcaggggttggtagagtcagcggccccacagtgtgggtggtcttgaggcggcctggctgactcgctacccagcctgctccagttgtgccctgctttatttctccagga

SEQ ID NO: 31259 - DNA, 1178 bp, Mus musculus
gttgaggtttttttcttaagcatagagcttcaaataatttgcctttaggatctcactgtactcacatacactcatggtgagtcggaacacttgagaggatttgaaacttaaaaatggctgagcttagttgtcacacagagtctcaaaaccacagtcattgaaagagaaaggaagaataagacctgtaaatgctagggcaagtggagctctttctaattctttcagtagattatcaacttttcaggggcaagtactgtgtcttgtgtctttttaaaaccctgtcagtatttcatgcagtgcacctttagtgagtggtatttgttcaacgtcactgtgaaatggagaaagtgtatttaatgttatttccaaggtgaggcaaagctttcttaccctctaaagcacttgtttatgaggttaagccaatttttttgattattatttttagcatatatgaatattttgcctacatgcatgtatgtgtaccacaaattacttttttatttataaatgtattgaaatcagtgtgttctaggtcaatggcttctaagactccagttggattcattggactgggaaacatgggaaatccaatggcaaaaaatctcatgaaacatggctatccactcatcctctatgacgtgttccctgatgtatgcaaggagtttaaagaggctggggaacaggtaaggcttggctctggatttgctttagattttgtttttaaatttttttttttttttaatcaaagaagcaagtacttcttagaagcatacccaacagagttgtaaaacctaattgttgctgtctttcatttttaatttaatatcaggtcaacatctggatccacatcaaaagagcagcagagctgccgagaggggtctgttttctgctaggtggccagggcattgcctgttcagtcatttcctgagataatatcatctttgattatgttgatgaaacacttattttgtggaattagccttcttgttagattaagtcagggataattgtcttaggacaggaatctgctttgggacttaagctttgcccgagtccctgatcaaatacttaaattttgtcttaatgggagaagttgttccctcagctggtttccacatctgtgaaatgtgaatgatgactaacttctgtgtcattagattatcaaactcagaggagaa

SEQ ID NO: 31260 - DNA, 1124 bp, Mus musculus
ctctgggacccctggccttccagctccctggcttcaccctaagcgggggctccctcagacttcaaggcctaatttgtgttttaactactctagtcggtggcatggcggtatcctagaaatccagcaaagtttgtcacccttgaccagcaagcagagcgaactccattatgaaatggagttgtgctgcctcaaagtggtggacttttgtcgaaatattaaccacaattctttgcctcaaagttgtgtctataacctaaccgactactatgctgtgctgcaagtatggaaagtgaccaggttttaagcttttagagcgacatgaatatctgagaactgcttttcacatgaggatctcccaaggccttagaatgagtaaattgggacttctccaacaagatccaggaagtaccccttgtttctccctgactcttggattttctaggacatcaagacacctctttaattaagaattggttgaaatggtcattaccaaggcttttagaatgcagtttctcatttgctgtggacatgaccataaagaaaaattcccatgagggttttcatatgctacttgtctagcagttaacctgttgggaacatgtgttgaaaaaaaaaattggttgatttgtgggagataccgaaggatttttttttttaaatgtaaaagtttattttaacaatgtgctggttagcactatcatatacaggactagcaaacaaaacaccgttgcctttgcttagcatgcaggaggctctggattcagggtgcttgtgttcacttgttttaatttttgtgtaagaaatatgttgggagttgatttctgagcagctcccagtctttgccctcaggaaaaacttatgaaatttctttctgctttggaagagcatttgtgtgcaataggtagcagatgacagataaggaattgtgattagccagatgcaaacacatgattttggatataatttttttctttttaaaaacactttgaagggagcagcagttttcttatcagtgtacaacattttgagatctgattagttcaggatgatatatttgctgtttagtgtttttacaaggtgactaatgatagtttcttgaaccattcatgtaccttttaagggtt

SEQ ID NO: 31261 - DNA, 1185 bp, Mus musculus
agagcaagctacctgactagtaagtcaaaaaatattatccttttaaggattaaaatgtattcagtggtgtaggaactagtaaggaagctataaccccacccaaggccctataagcaactttaatgaaaccccttaggtcatcagtaactctgaacgtagatgaggggaagaggacgagaatcattgggaggaaggggaataggaaggatagtaggaggtgcatatcacaaaagtacactgtggatgttgtgtgtaattgatgcgttaatacattttaaaaggataaggaaagcaaggtatggtggccccaccattgatgtctggagtctgagataggagaattgagagagtgagactaacctaacctagttctagtcagcccggcgacataaaactggtcagtaatggcagctaatacacagactgagaactggggaaaagaactgaacttggtgatagaaaaattaccttgatagtagtggttcaagtgagtctcctgtgtgaggagaaaatagataatacaaatactaacgataatctctcttttaaattcaggttcagctggcggagaaagagaaagaaataaatggtctggcttcatatttggaaaatctctccagggagaaggtattgagcagtgcactcattgtgtacagcatgtaaccgatttttgctttctttcatctgacttctctttgaaagctttcctccaggtcttcaactattacctccctggtagtaaacagtaatttgtgtaccattctcacttccagatttcacatctgccaatttttgaaagtatgccaagtgttgaaaattgctagttttctcgaaaaaaaaatgaaaaacgaaaagaaaattgcttgtttgatctccatcacatactttgcattagataataagctaagtttagaatatgcaaatgtagggaagaagtgaatttttaattgggtatttgctcaaacttagatgttttcttgaagtgaatttgttaattaaagggaaaaaattgatactgtttcttgctaatataaagttcaaaccttgaaccaaactaaaattttgacaacttgtgtcttctgtgttaatttgatgctgactagtgtgtacaaatgtatttaacagtctggtggctgaatttggaagatcttaaggagtagatcctcaggttggatggtgtaactc

SEQ ID NO: 31262 - DNA, 1554 bp, Mus musculus
agaatctagaaacagagaaagtaaacgtgtgaagactttgaggataaattgtttagtgtaaatatcagctaattaattaattcaacttgtacactgacaggtgctatatcaagttaattagaaaatacctaattctttattttcttctttctttaaaagctttgatgttcacaagaaatgtcccctctgtgaattaatgttccctcctaactacgatcagaccaaatttgaagaacacgttgaaagtcactggaaggtgtgtccaatgtgcagcgagcagttcccgccggactacgaccagcaggggtttgaaaggcatgttcagacccattttgatcagaatgttctcaacttcgactagcttgtaataagaggtagtacaatttagcaattacaaaacaaaccacatctcagaggctaaggagatgccaggtgtcactttcaggttcctcctccacactttcctgatgatggagaacttctttagcgtgtgctgtcactagggccagggtacagctgtgactacatacaatgaatacagttttaatctctgttaatcttgtctgctgtaagaagagtgcttctgggtttgcatctctgtctatcctccagttagcagaagtgtgtgaagaacacaagaattattttaatgttaccgaattgcaaacataaacatgtagtagttagatcctcagcacaatcacacttacaagtttctgtacaccttggcgattgagcatgaccactgatatgtaataaaaagcattgatcataacagttctgtgaaataattctttgaatatagaaaaacccttactcaatgaaatgataaattttaaaatcgtacttagatgtggagctgcaagaagaatgagataagtggtgtgaagaaaccctttttatatgggaacgctggcttatggcatatttagataattttatgataacattttagcataatctagatgactatttttaaatgattgagtttgtatttataactagctataattgtatttaactataatggaccaaaataaatcaaggcattatctgttctcattaaatgacctttgtaaatgattcggggcataaaatggcagactgtgtaccatggtctttctcacattttcctgatgagcatacacgttggacataacgttcctcaggaagtgctcagaaatacaatgcacaacccagacccaacaactgtgcttctcagtcacagctaacattatagaagacagtgtggggggctgtcatgtcactgtagcattcacacacgtgcacgcgagcgcgcgcgcgcacacgcacacacacacatacacacacacacacacacactcccttttatgatgggaatgttaaagtactttttgctgctttagtagtcactaaaatagaggcccattctgagcaaactaggtattggagatgttaaataaatattcagagttggtagcattctagattgctgtctgtaaactgctgtataccatgctgctggtatttatagaagagtttgtgtattaattgaatcatttgaaaaggtat

SEQ ID NO: 31263 - DNA, 1198 bp, Mus musculus
ctttctactcacaaatactaactccattatgtaaggcatgataaccagtttgataatgaaggtattattttggttttatgtgagtcgatgtgttgaaaagcttcaatcacattacaatcttaaaacatctcagtgccagcccctcctctcccagttgacatcactgcaatgtggttaaacaatatgcaacatgcccttcatttattttgttttggggaaaatgtgctgaagaacctagagcttgttttgtttagcaccttatatcaacgtaatggaaatgggcgtgatgattacatgtgcaaatgtacaaaatcattaactacaaagatacatcattccaaaagtacagaaaaggttaaagcatgcatttaattatttttcattaaagggttgctgagtgcttcccctgaaaaaaggtggctgttttcaaaatcagcaactgctggtgaggatttcttggcacagttctgaccagcacgctactgctgcatcttcctgatcatctcggcagacactgggggatggaaattgattgtgtggtgccgcaggccctgagctgtcttgtaactcttcccacaccggcatttgaatggtttgcggacgcgaatctgtgttcggtgaccattcttagcatggtactttatgccattcacattctgtggagaagataaaaaaaaattacctattagggtcaccaaatgtcctgtcacactcgtgcaaacctcagcatgggtcagattccagcaaagcagctcctggatggatccagagggtgggcttcatgtgggtttgctggtcctgggctgtgtgtgccagggctttgtaagaaaattaatggaacacttcccttggtttcttgaagccttgcttctcagctactaaagttttctgcttggaagagaattaattggaaattctgtgaatatttcagaatgaccaatgaacacaatgttctaaagaatacaaaaagtagggtaaggcagactgaatgtaagacataagctgtggtaagtaccctctaaacctcacctggaggctttggcagagttagctggccgtgcttcagcataggtgagtgctcagagcccatgggcactgcttttgatgatgtactgcgttcagacagcatgcttttaaacctttatttatataaagtcagtcccatgaaaaacaacatgctgagtagatttcttagcag

SEQ ID NO: 31264 - DNA, 1096 bp, Mus musculus
agactcaggataataagccacgaggagaaaatgctctaaaggtgacagtgttctcagccatctcttctattctgaggttgttaggaccttatttatgacttatgatctgatgtcactgggatcaaaattaccagtgtcaaattaagttttaaatcaactaaggacacagaaggccttagacttctaccctatgaaaatagaacaatttttaagagcaaaaaatttagattcacttaaatatccattaacatcaagagtgctcaaagagtatatctatataatatggaatagtatgcagcaattagaaagaataatattgtctaattgtttaagcagttttatatagtcttatatgttgagagaaaaactaacttaaagtatgtatttgtataggaaacgttgtgaagaagaaactgagatgagtgagactaggaggttgtatttactctatgcaagtttaaaaattattttccagcatttaactagtgacttcaatattcttggaatgggattactctctgtcagacgcgtgacttcctgtaagtaagtaaaggtttcacaggcagaaggaggcgtagaggagcctcgctgctctggatagtgaggggaattgacttggaaacagatctgcgtttgctgcccatttgagggcacagatgtggagaggcccggaggctgtcggtagctctctgtccttgtctaaaggaaaggcatgttctctttccaggaccacatcctttttcatcctttacttctctccagaaaatgagagcatagcccagcaaccattgttgctgttgttataaacattgtaataagcactcggctgcaggatccttaaaggattcccccctgagtgggttgtcccaaaatgcaccacgtaacgccatgtcaattcagtcttgtttgggcaccattaaaaacatagtagttttacacagctctccaggcaagaatgacctcattaatgagaagaggcatataacagttaaagcctcaaacgctcatgaaggtattattttaaaaccttttaaatgccaaacaccaggctgtttaaatagcttgtttcatgtaatatttattagttattaagcct

SEQ ID NO: 31265 - DNA, 2087 bp, Mus musculus
gagaattcaagtcttaccattggtgacagggaggaagcctcaaggctgaagcaggttggtgacactcagaggggctttccagggactgtctggaaaccattgccttctgtttagaccagtatccgaggcagaggcactgctcccaacccttgagaaaagatcctccttcctccctcacctttgttctctgccttctccctctgccattgacccttggctctctaccttcagattttgatggtgtgactatgactatgctagctatcgaagacgtgctttctgagttacacatattcatcttatttcacgatcatctaatagacagtatgtttgttcacactgagttgggtaaagtgctgaccctcaaatatgtattatggaatctgaaaatcagaactaccaatgtcagaaatttatgtatggttttcaaaattcctttcattttacactctaaatcagagttggaagaaaattgcattttcttgggtccaatgagatgacttggtaagttaaaacccttgctatagaaacctgaggatctgaggtcaatatccaatcttttttccctcattttgtaactagggctaacttgcagtatggactagggctggtttagaactcagatattcacctgcctcagtctccctggaacgggattaaaggtgggtgctaccactcctaggcctggggttggtacccagaagccacatgatagaaggacaaaactgaaagttgtcctctgagctacacatgtgcactgtggcatgtatatgcttgcattcaaacaccatacacatacatacacactcacacacttcacaggtgcatacacatacatgcatgtatgcaccacacacacttatatactctacagacacacaaacacacatcacacacatgcacacacataccactgacacacgtgcacacagcacagacagacattcagaaagacacatagacacacacacataccctgcagatacatgcacatacaaaataaaaatttcttcttaaagtaagtgctagaaagttgagatactgcagtcattttcactatttttaaaaagaccagctgcaagcagggaccagataatggatgcttacattaaggataaaatcttttggcaggagacaggtgtactgtcttgggtcactaaatgtatatcctgcctagcatcaaaaaatataaataaataaataaataaataaagagagagagagagagagagagagagagagagagagagagagagaaagaaagaaagaaagaaagaaagaaagacaggcttctgatggggtaattttttttttgggggggggtctggttcacccactgacacctgaaggaagaggttctcaacctgcgggttgtgacccagttgaaggtctaatgaccctttcacaggggtttcctaagaccattgggaaacacagatattttacaattcataacagtagcaggattgcagttatgaagtatcaaggaaactaatttatgggtagggtcatcatagcaagaagggtcacagcataaggaaggttgagaagcactgtcctaaggaaagagctgttgattgtttgccagtctgcaaccgtgacctttctaaggtagaccatatatgtggggatcggtgggaatactatatgtactatatactataatatatactcagcatatgtatgatatgtataaatggcatatatattgcagctcatttgtgggagataaactcaaagacatagtagagagattcatatattcagaaaagtagtacctaaatatatactgttatttacatatgcatatatgtgggtaatatataacaacatatattgtatgtatatatgaatactgattttctatgtattgctattggtggtcagaacatattttctgttatgttttctatctacagcttttttcattttaagtaggcactcaggagtatacacactgtgattgctggctttcacagttggaagtatcagagcacagcgagtacacatttctttgtcctttcctactgtcttaagaaactgagcaaatagtttttttttacttattcagcttacaacatgagctt

SEQ ID NO: 31266 - DNA, 1175 bp, Mus musculus
gtaccgccagccggggactgaccatcatcacagaacacaccctagagggtgagcacagcagcgtgtgtggccttggctagatctggttttaaccagggccatacaactgctgagtatgaacttgaagctcaggatggacagttgtatgaacctgaagtacttcatctctggaacactgtattcaatgttttcatccaaacagcaagggtaatgaaaagagatcaggtgtataaaataaaactggtggtgagatgcctcacaccaagccagcacacaatgaacctttctttgcctcaaagagaaacggataaagtttgtaatgcaagttgtgtgtgtcttcacacttgccctacccccttccaaccctgactgtaagagacatggaatatcattgaaaaacccattccctagttcatgttctctggcttgccttttctgctgtctgtcagattcaatccatcacaatgtaattatattatccatcgccttccctaggaataacaagtgagggcatgggagtttgctttctgcagtttctgtatcgtcggagactatgctgtagacttcagctctgtggctgaagggcacaagtaataaactgccttactatcctgtgatggaagtagggtgccttagggattgcatggtggtgacggtgatagcagacttccttgtggtcctccccttagacgttgtctgctctggtcactggaggatgaatgaaaaccttatcattctactgtgtgggagagctcaaaggccagacttgcagcatggctgggtaaggtacaaacagtcgtgagactttctcacaagccttggtgaggtgtgggtggacacacatggctccgtgcatcggaatgctaaggaaacccgtcctcacctgcttcactgggtcctgggtagatatactaacagaggtagagacactgtacgtccaagggtgcctaacattgccgagaaaggcttcaagagtctcaatgttagggatactttaagtgtggcgtctcaaaagcccgcctcttggcagtagctccttcctactctataggcttgcactttggcgttgccaggtatagacactaatcctaaatattcaactcttttggcttattacattcaaactaggttaatactgggaaaaccacaggtttgggggccctcatacatttaaa

SEQ ID NO: 31267 - DNA, 1136 bp, Mus musculus
gctgagagacttattttcagtctggtgttctcacctgcttttcaaacccattctgattcctcaaaccccatcttcctcttgggcctctggcttatggaaaataaaagtcagatcaatttccagaaccctgctgctcctcacccttctcctcctgcaggaaggactgtgagctgtgaagacagcagcctgcacaaatggagaaggatggggtggagtgagggtggggtagaaaatgcccaagagcttagacagagggcaagcattcgagttccaccagagaagcagtgtatgggaaagtagttatactgggcagggggtgggaggacagaggaagcaggtatctcacatccagttagatcttgaaggtcgctttcaatttacttggatacagcatgatcaatagtcaaaagaaagatagaaatagaagttgggtgtgcttgccggtaaataatctcacctgactgcaggtaggagaaactaaaagatggcagctggagccaatttgtggaaggacttccaagccagggggcttgatgttatctgttagcgcctggcagtcactgagccagggtgtctctgagttgagcattctagagcacaatggcagcatggtctaggtgggtggaagtgggctggggagtggccagcagcaagacaccgtctaggagttgtgtggcactccagagaacacacagaccatgcatggcacctgctgggcacaaggggaggctggcagctatgcaaagaggattgttctcagcaggagccaggaagctgctggttttgaagaagacagaggatgccatgtctgcttatgttagatttggttccacagggacacatggagctgtagacagtgagctcaggtcaggctactccctttggccttctcagtcaagagagagacaaggtcattgctgagaggaaaggccacccacagggtcacctgggaacctgagtatggtcacagttttaaccaactgctagactgaatgtaaaaaaaaacagtcatttgttgaggaacagtgccctctctgtaatctcaagtctcttctccagtaaacaaggttctcctgatgtccgcgtatgagacctatccaggtagatgtaaggggaaagacctttacgctgggaat

SEQ ID NO: 31268 - DNA, 1151 bp, Mus musculus
tgagtgctacagcaggagaggggaagggccagctctccagctctgatgaccccagggtcaggtctcctaccttccacaggtggtgaggggtcaaggggaagacagggtcagctccaatgcttgtatccttggggcaattcacctgcaactccagaaatgtacagggcttgtggcagctcagatcagagacgtttgcctggccttcggtgacaacagacccctgctgctgcaagtacaagatgtggcctccagtagcagcacaagccaaggtcccaggtggtattattggctacttgaatcaggctgttcctaattaccctcgagtctccaggtctgcccctcttgctgcgaccacgttcttctgtttccctttatgtcccatttctctactacttacttgctcttcttagtgtgcctggggtggcctgagtgtctgcggctgtctcaggagaggtctcagaagtgtcctgccctgctcatgtgttatggtgctgggcagggatcatcttgggtatggtctgcctaccctgcaggcctgtgaggcactggactggtggtcatcttaggctagctttctgtccaggccccgtggctcttgtctggaggtcatcttgggcttgctccttccctggcccaccccaaggtatggaggattgtctctcttgggtttattctcaccaaaggcctatggtctcaggaaggtttctagtctccagcttacactccatcctgggaacctgtctgggccttgatgaccatctcaggttccctgttcaggcccccaggcaccagactgagggtcatctaaggctttcttttttttttttttttttttttcagggaatcttaggctactaaacattcatctattcacaaatcagaacactcaacatagatgtagcctctctcctctctgccacctactgatgtacatgtgacatagcagccacacctgcaaagcttctaggaacaggtctattttcaaataaaggggaaaaaaataattctccagtgagccaaatcatacctgagtgatgcgtgctcaaaacctaagtatgctgtagaatttcaaagacgcgtgtgccaaagagaaatgagccccgatgtggccgtttagtcagaagaacgctggtgaatgtatattcccaaac

SEQ ID NO: 31269 - DNA, 1169 bp, Mus musculus
atgggacaaactcatgacaaactggtatctcttgctgatggacagagggacacaggtagagcagctaagctgaaagtgcccagcaggtgcaaaggggaaaaagaacaaggtttgaggaggaagtagttgcctgtcccagcctcatctgctgagctctttaaggaaggtggtgcagaaagccgtgctgtgctttccctgtgtggtctgccctccacctctgaggccagctcatcagatctgacctgcctgagacaacccaggtaatttggggtttgatcagaggtctaatggtagcaaacgacacagcgaccttcttcattactttggccaaggttgaagatggctgtgacgctattatgcaggtgtgcactagaaaacccagtggttgtttttattattgactgtagtccagcatcacggagaaaggccaatcctcttaggagcattggacagctcaaccatgttgtcatcttaccaccagagggcacagcagccctctaagggttttctcctccggcaatggataaggagcccagctatgaaagctttgcttactgggatggatgggggcagacaagaggacagtagggaatctgccgaggtgcccgcacgtactttagtgagtttagccaaactaacagcagaaataatactggattttgagtaagcagacttaggagaatatttgttttaaaattcatgtaacagatttccctttgaagaaacacttctgacatgggtaatttctcaatcaggggtcacttttatgaacagcatgcagaaaaatagatcttcgggaatgtttaagatcgatcagtaaataacttcccagaagaccaccctatgtctattaagcctgagggcaggggatcctgagcacactttgggcagaaataagtcacgatcatgaaggatggactgcctgtctcacctgtcccacagaacctaacctaagctagctagtgttgtggagatgagatttgcagtaaatgaaaatggcagcctagctgggggcagacacccgagtgtctacgtaaggtagtaaagtggaaatagtctttgctcattcttgggatgcctgaacgctagctaagcatctgataaacgctgtggagacttagcccaacacaagctccagtgtctgtaggagtcggcctcacaagctgatg

SEQ ID NO: 31270 - DNA, 1129 bp, Mus musculus
tttctgcttcgatggcaaagcctgggaaaacactgaactcagaaccagagtctctggactgctaagtctggtgtggggctctagaattttcatttttcatgaattctagatgatactaatgctagagcaccataatttgaaaaatgtttcagagatggcagagagggtgaggggagtgtccagaactttctaatagaaatggcagggaagctggtcaggaaggatgtctgtctgtcctgccctctccctaccttgcctgagatactgagatgaactttgaaaataatattttttcctctctttaattttagaggtctcaaatttctaaagggatttttgacagaagtgaagaatggagaaaaggatatccagacagcactgagtaagtgtgcctcatattctgatagatctgcaattagacttgagatagcaaccctggaaatgggacagagtatatggagacatttctactttgagtttatttttttttctttttaaattaatttcacttgtattcactgcttcttctatgctttcttaatagggctctataaggactgatgatgcatgtggtttacctggcatgtatgagtccctgagtgtgatcccttgtcataagaaggaaggagtagagggaggggagctaggggtctgtgcagtgcccgggtcagctaggtctgatgtgttaaagatctgagtatcatcctaacccacatgagatgagttcttctaaattagtctatcggagtccatatttgaagagaagctcagtttagagcacatgaaagaaggtggacagggaactcatggggagttgctgtggagtgagatcaggggccacctgccatcctgcattgttccacatgtccatcttgtagtgacagagccaagactgcaagaaaggcctttgtaagaggagattgagctgtatctccagcacggtgctgtaattatagcatgtaggtgcttactaaataaatactgctatgtgggttgtgcgttgatgcatctatgctatgaagctagacttcgtagcatcctcacagtgtactgataacaacatggctgagttctcactccagacctgtggaaatcacattagtttggtgttattgagatagggtgtcac

SEQ ID NO: 31271 - DNA, 1064 bp, Mus musculus
aaaagcagctggccatactggacacgttatatgagatccacgggctggaatctgatgaggtggtgtgacagccacaggacagcacctcctaacttcagggaataaagtctgctaaagtgttgtgttgccctagttaatttccagcaacagctttgatactctccagcctttccttggggagatggacatgaggaagtcctagtgcttttatttagaattgttttaatgcatatgtgtttcatgtgtttaaaaatcaaggtgctaaatatttcaacaggcctactggaaaccagatcatcgctgtcccagacttgaatagcaggcagtaagagcaaaattgacagatggatttgttgggttcacatttgtattgttctgtttcagttactagttttaatgggccacccaaaccgaagcagtatgcaggactattgtataaagccagtgtttaaaatagcttagatgttgactgggcattggagggagtgtaagcccctttgttgaaggacttgctgtgtaagagtttgctattcctacactttcctgagtggatcctttctcccttcctctgctgatggaaagggctgtgtagtgaaaacatttgggcagttgtaggaaaacattgacatggactgccatgcctgttgtcaggtgggacagtggctcaagagaatgacctcagcccatgcttgagaacagaatagacaggaaggataagtcatttgggtgacacataccactctttgccaatgcagtacatttcctatgtgttatctgaattgaacatcatagcagaacagcgactttaaagaggatatttaatcctacttcacaagtaaagcttacagtagggaggtctgctcacatttgtggaatttcttgtttctggtgattttatttttatttattgatttatttattttgcctgtttcattaactcttcagcaaaagagccaggtagcttccaaatgtgatctagatcacctctgtattgaagtcacatgacatgctgtttcaaagaacagagtcctaggacatgcctgaagaacccagatcttacaagg

SEQ ID NO: 31272 - DNA, 1051 bp, Mus musculus
ggaggagtgggctggacttacagtatgctactttcctcttgcaggagtttcatatggatcctcttctctggctaatggaaaggggtcagggctaaggcataacttagacctgcccttgacatagcctgtaaagacagaagaagaaaagtggccagcccgcttgtctctgagggtgggcgctttgggccatgtgcccttggtgggctctgctaccaggaaattgacgttaagtatggccatgataggcagctgcaggtgcctctgtgatctctagtctagggactagcactctgagagcgtgtcagtccaggtcctcacaaagccctaagtgcccactggagagctgccttgctgggcagtctgactttggtacgttcattccacctgaattagtagttcttggtgtctcattgtagttaaagctaattttttttgtctgatttttcagttactttctaagaaatgaaaaaaaagaacctgaaagtgctccctggagcccctcccgagagccctggtatttctaagccaccctcaccctgacagatgaagaaccggtttgttggttgacagaatgcttaccttctctttgttgctaacagtttttggattatcttcctagcataatcttgagagtgggggatgtgtcttgctagagagcagtagagttgactgagtagtactggcagaccactcacagagcacagccccacctccgttccatcagtctgcccttcaccctcacccagtgaagcttggctccccacgggctgatgtcagtatgtgtgttgaactgaacagaggctttttaattgtgataagccttatgtcttttgaagataggtctgtttatagcgaaaacctactgacatatgctgatttgtcaggaggaatatctttaagggaagaaaccatcttgtaactgaggcagagctgacagctcttgacacagcccagaagagaggccagaagggtactgtaggaatgtagtggcttgttactatgtccagatcattctaagcgtaagagcatcccccagtgtcacttaaccatc

SEQ ID NO: 31273 - DNA, 2094 bp, Mus musculus
agccaaaacgccagggcttcaggcagaagccatgttcacatttgtagctgttaggttggggaaagtcagcgtgggagagcatgtcctccgattgcgtacagtcagtgccgtcaacgtctgtctgtggagggttttcaggtgcaggtgtatggtgaggtcataagtacagggcactttagctgaagaactctaaagaaaacgaatccagctgtaaagatatatatgaaactttttttaaaatgtattccctactagaccactatgtccttcaggcacagggctatgtcatgttgtgtttcttttttttttttttcctttttccaattttttattagttattttcttcatttacatttcaaatgctatcctgaacagttcaaaccacagcttctgatttagtcacaagtttacgatggttcaaatccctaccctcatggttcatttcactaccagtcgtttgtaaattctaagctgtctggatgtagaagttctgagcaactgcagtatgttttggaccatcactttggttgatcatctaacgcatttgggcgtagagagccaaacctaggatgctttgtgatactgtgcagtctgcatggttgtgtgcattagaccctcctgtgacatgcacatgaagtgctgtgttgacaaatgtgttctacttccatgtgaccctttgtaacctgcagtagcttactcagagttacacaataatgacataactattcactagctgcccaatggcatttgaagatttaagccatgacaaggttatagatatagtacattagttgagggcccttccctccctgtggattctcctcttctagccctgtctagactatcctgcagaccatttgcatgatttcttgctgtacagctgcatttgggaactctaaggcatgaacacccagtcactggcaatgcctctggtacagatgtcgctcgcatgcattgatctctcttctccattgtctatagatagatagcctttaatggaaaggaaaaaaatgccactgctctgcaatgcaaagttttcagaattcttgtaaatcgtgaatccttgtgtcacttctttagggtgaaaaatgtttctagtcaagctgtatgggaacatcctgcttattttaaatgtcttatatatttaaagtatggtcagtattatccctttacacataccttgggcaaggtggtcccctcagccttaggatggatggcttcatggcacagccgatctcattcacagagagcccggtgtatgtccattcagatgtgtagatggggccagtgaagggtgatctagatggctgatgagccagcttcatggtgtagggtaacggacgattccctgtgccatgagaatttcactagaatgtcactaaacagcccaactacctcatgtgaaattggctgtggacaatctgtgtttgatgagaaatgtgttcgcagaaatttattctgtttgataagttgaacagtgcagtgtctctatgaagaagaaacatgttataccagatgccaaaggctaaactagacatagatttctcagattcatttctatgttaatgtttattccagtctgtatcctcataaaggtttgtagttttgtagagccacatgctttgggtatctgtcacaatcacctcttgtcccctcagtattttgactgaacatcataatgctgataggaatcaagttaaactacgaaagtgtcaaacagcttgtggcttcttaatttaatggacctttacttagaaatgtattggagccttctaggaccacttgttgagtgaaaatcttgtgtgcagatgtgtctgcttctctgtccaagttgttgttcctgtatttcatgaaaagtggggcaggggtgagggttttactttctttggagaatgtttgaaaacatctgtcagatttttatattcattagttacaataaacatatttttagagtattttattaaacgttcttcaaagggttttgtttgggttttgcttaactatatgtgccaataatatgtattatttatggaatgtccacaccatgccagtgatcataagtccttgagtattgacacgagtcgtcctgctaac

SEQ ID NO: 31274 - DNA, 1193 bp, Mus musculus
ccacacatccatcgtccttgccagcctccttccctctgctgttgtgtgtgtcccttccagggtgggcctgtgcgcacacccgagcctacccgttccacagtgagacagatgtgacccctcccagcctgcggaggcaggcattctagtggcagccatagcatgggggaagggtctttgggagttaggagagacacttgcctttgactgcaggactctgataagtcatgtgacttctctatgaaacagggcgatttactcttctagctttgaacactatcctaatgcagctgcgtaggaaaggaagtgtgtgttcagaagagcaacagcccaggacacggagggacatgggaaagagatactttgtaattttgccaaagatggtgtctttaagatgctggccatgcagctactttagaatatggtggccagcagatatccagatccctggagcctggggtgggctctatcccaggcaactgatgagattctgtcactttgagaggtgggtaagcagaggtcccagaagatggcttgtctcggttgaatgtcagtgtcaggcagagccgctcctcgccccactatgctgaagggtttggaagtggtatgcagggaacccaagaggggagactagtgtgaagactagctggaggggaatggcagtgaacactttgcttgtcctatcactcaggaaagtgacagtgaaggcttggtaggtagcagacagagacagtgagagcaaacatacagggaaggactgatggcatgctgaccgatgtgaccagctgaaatctgaactagccactgacagcactcaagaggcggatcctatcactgagtgatccacggagacattttcctcctatctgtcaggttactttcctctgcctggtgatggcactgagccaagcagtcttcagacatcgaagaacagagccagggcgcagcgtgaggcccagtgcagtgcctagcatcactagggttcagtcagaccgaagggtccacttgggactcctgggctctctgcagcacagggtacattctgtgtttccatgaccagagcacaaactgtctgctacgtgaggaaattgtccttcatgctaatgcctgaactaggttttcagtgcgcttaagtcagactgggtctggggctaccacccctgctcagtataggcagaactgttctgtagcacaat

SEQ ID NO: 31275 - DNA, 1223 bp, Mus musculus
gacaatagaaaacattgactttccttaatgggcttaaaacttggacccatgtgaaatacatttccaagaatctctgctatgcagtgatctctgttgacatgagttatgtatgttccttcaggattactttggatgattcattagagaatcttgtctttagactataaagcacttgttgaacaaggttacaatgtagcaagcaaccttgttttggaatgtattttgctacattgtgctcttccctggtctggtgctttcatttcacatattttgctcttaatagaagtagggttcagtgctggggatttcatttgctgttttctccattgacctcttgagctgaagttattcttattagaaagtcagggtaggcgatctgtgtcttgtcctggcttaggaggttgtttatcttgtatttctaggagaattttttcctagcagttaatcctatacatgcctaccatttaataggtctccctagcagctgaaatggctgtcttctcaggttagacttcagaactttagctgtgtattataaaacttgtttgcttacagaaagtggttaattttagtatgtttgaaacagtttttctttataaataaatttggaaaatcatgagcggtttaggacttgactgcttgtgattatgattagccataattagagttctttgttctgcttcttaattttgctgctattccctctgtagaattgaagctaaggtggtttaggtattcagtgttgtctgtaggtctaggtgggagaggaattgggaatagaatatatacacagaatatataaggatgtataacttctgcctcacagagggtatcacacttgagagagaagatgtacatagcagcagtgatgtcacatagagtgaatatggaggctgttgggctcacgggtgagcaggtaatgaggaaaggaccccccaaagtctgaagtaaaccaaaagcaacttcgttcactgcaggggggggggggtgggatgggggggtgcttctaactggtttagagtgttggtcaggctaggagctgacacaacaaccttgaaagggcaaaagcagtcttcttttgaagcataaacccactggcaggtagaaggataaattgtactgtaattggcctttgtgtcatttaaaatgacagacttacccattaccccactaggttcctgtgatatcaatggctttgttggggacacagctccaacaaagga

SEQ ID NO: 31276 - DNA, 1146 bp, Mus musculus
ccatgccattgttgatgggaaaggctatgaagagtttctcttcttttgttatctgcttttttttttttttttaagataagcagcttttttagcagtttcctgtagggcattgtttctttttgttttctttaattaaaaaacaaaaaaacttagaatggttattttatattcatgtcttcttagccatactacactaaattttttcgaactgtcttagacactaaactaatgttgacacatggggaaagattatgaatttcaaattacacataactgagttgttgactttggatcagaatcttgtgcaagttgagagctatggtagtgtgtccgtgcttactcttatttatgcctctgtggaccgggagtgtaagatgtccagaaggagaagtgaagagcactcagtcatcgtcagcaggacttcaggtgtaggtgctgagttttatgcagttggggaggtgtagtatgccattcattggtgggttgaggttttgtcttttgatttttcagtttgatggctagttttgctgtactgagttctttctctctccacagaggatgtgctgagtaaagatacgggggaatgtgcaatatgccttgaagaactgcagcagggggacaccatagcacggctgccttgcctgtgtatatatcataaagggtaagcgtggtaggcctttaactaagttgatatcacagtaaaatgattattttcttagttcaagcattgtagttagggctaaaaggtttcttcttcatgcaaactcttctgttcaacttaggatcttaataatgctccacctccctttctctcctctgctcagatcaaatttgaacatgcatctgttgtacctaagtggctgccatttttaagccacttagtgttctgcaagtgtttttcagcttggtcagcaggtgtctgtgtagcagccacttcaaattacaactgggaaataagacagttggactgtctccaggtttgtatttcaaccaaatggcaagctgagatcccagcttgttgtacatacatttttcttgcttcagagtaatataggaccaatattagcttgaaaaacaaagccaggtatggcaaggctcttgttcagttccagcactcaagaggatgaggcaggtgggtctctgagt

SEQ ID NO: 31277 - DNA, 3212 bp, Mus musculus
ctcatagtcaccggcatctttctgttaacctcagacaacatctctgtgttcttaacatcttagttcttaagtagtgagaccccacattatatttacagcataagaatttacttacccaatagtcttaattaattatgaagctgcttactgtttttatttgaggaggtggttttaagtttgagcgggtgtatgtacatgtgtacatgtgtatacttagttctcaacatttattgtggaaaaggagtgacttaagttttgctgattctttttttagactatgttaaactttaactgatcattctgtttcttgctttgttctacagaatagttttataaatttctgaagcagtaaaaggggaggtgtgaaaggctactgtgataaagcactgttcatggggaagtggatattgtatttcatttgcattactgatattgaccatgacttagagtaatttatttttatacaggttttcttgtctttacaagatgcttgagaaatctagaagatttgaagatctgtctctggaagaaaatgagagctgcaggcttattcagccaggatctgagttctgggacacttgggtccagagaaggacaggaagaaccacagaactcagcgaaccaaacttgcatataagggacacacagggattttgaaaatgctgcacagcctgtaccagtcactgcgtagatgacactgataaatgttttgtattcagacgccaaagttaactcatttcaaagttgatttcctttttagtaagttcttagagctgctgttttaatgtgtttggttttggtttgtttgttggttggggttttttttttgtttgtttgttttgttttgttttttagtttggggactttttattttcctgaacataatgtttctgcattcacctattcttaacttgaaaaccacacaatttctttcttacaaagtcttcaacatgaaccaagaaaatgtaatcaaagcagtataatattctgtgaatggagagtataattgaagttcttccacttccaggccccacctccccctacccccatgtatgaaaagtaggtttctgggttggaaagctaaactccgatagtatgaattaaaggttaatatataaaagtgtcatccaaagagtaaatcaaggtacataattacatttagttcattacatgtagagctgtctactcaactgcagtttctgaaatccattgtttcttctaaaaggaaactgtgcaatagcttgttagcagtgaccatcttgcagcagctatgcaactttgaaaagttttgctggtccccgctccggggccacagtgactctgtcctagcaggtgtcttttgtctttctgtaattacttcattgtgctttgcatttccaggaggtttccctatgtttgggtaaaatgtttagcaagttgtaaaacatcagaccttctgaaaagggtgaaataaacacttctgcagtgggacttggagtaatctgagggacattttatatacttttaaaaatcagaatttaattgggatgccagatttctagcaacttgcatctttagttttccagataatctggaagttagcatttgataaatgattttttaagcaaatataaagatttttgttaatttataatttattaatgtgttgttactgtaattgaaaatgttgtggatacttttaaattcagtctttgtagaaagaactgtattaagcaaaattatgtgaataaatattccccaaaaatacatctaatggttaagaatactggaagagagctatcagggctgcaacagtgaatgtctttttaaataactatcaaaatgtcaagaagtagagttcacctttagtctctgggggggacacagccctgctgtcctgctgtgctgcgctgtgctgcactgccctgccctgggtgtggaaggggagtctctggtgctgctctgccgctcttcactctgactgtgcccagctctgttgcttgtacctctccctgctcacagggcatgagcacctgctgctatggtgctcacaagggcatgggcaggagcacctgctgctatggtggggtcgggtggggactgtcctgatatgggaagaacttgcctgctttcctatggctgtagactacatagtacctctgcagttccactgtgatcgcctgttagggccagtggtctgatcctgtgtcacagctgccagcacagctctgtaggtgtccttcagccagggctaaggaggttactcttccttcgagggaaataggctttctctaggtttttgtttggttttatgaaatcggaatccattttacttgttctttcagttcgtaagctttgctctccccctgactttccccagggatgagctcttagaatgtgaatacccactttgccctttccgctggtgtattgtctggaaagactcacttctgctgccttctcttcttggagtgcagctgtgctaattaatgtttagactccctgggaagatgacctgctaagctcaacttgttggtgtctcagcctgagttcccccttctgtcacactgtcctccagcagtcttctgtgctgcctccaagctcctgtggtgtgcgagagctcacggctgcgtggcacggccgtggacacttgactgtgctgatgcttctctggacagtggttcctgaagtccactcagacagcctggttggtttttgtttttatttggtcagattttataaagttgacattttgactttaaattttatctgtacaattacctaaaaagaataaattagaaatagaagaaaagagagaaacttagatgttccagtttctattcacagttactattctgggaatgttctactataagtgatactttatataatattgcttataatacttaacaggctgtatgcagacattgagtagcatccatcataaagttatagaatattcagctgaaactactgaatatggagacaaaataaaaattgaaagcctcagttatcagttatccagctggccatagccttctggaatctttgtaaatactctgcagataaggtcacaggtgtggagagaatgaggaacgtgcttgggtttctgcagtccactctgtccatgtgaatgtattgtcaatgttgatcctgctttaaaccttttcattctctctttgccagtatatttaagagaagcactgttctttgtaaaatcattctctttcttt

SEQ ID NO: 31278 - DNA, 1631 bp, Mus musculus
tgtataggtttgggctttcctgggcagacttctgcattcttaaatcttacatggttagtctggtttccacttagatactagactgcagcccagaataaccatccttagcatatctgcagtatgcacagaaaatatatttccaactgactgagttgccagaaatggcaaaatcttttccagatcgtatttcatactgtgtttctaagtatgagtgtggtgaggtttcagagcactcatttcctactggacacggtgattcatgccaacactcaggaaacggaggcaagaggatagccacaaggtccaggctggcctgggctacctagtgaggtctaggttagactgtctcaaaaaaaaagcaatcattttaatatgttacagcaagacatactccttttagtaagaaggattgtggattcgatgtaaatagtacctgctttttctgtattgacttaagggaaataaggggagttccccagtaggaagctaaagatgagcgaagtatgaaactcttaaaactcgagaactggttgaatttgccacctgactgatagccacactgtgtatggacaacatgatccagatggcttactcttcacagaggaggctccatctaaaccaaaacaaatcatcggagcatacagagtgactcagaggcaaagggtgctgttgtcacaagcactgtgtgctggctgcaggtctctgctgcacttcgccatttttctataggtttggtctaccctagggtaaactccacactctctgacagtgagagacgagacacggagcatcccttgttattcagtatacagagattttaacttgactttaatattgtagcatgtcagtcctttggagtccattctcctacctttcctagagtatataacttctgatattttcttagctgtgtgatataaccagttacctgaccacttttaccctgttctttctccatcccccaaatcctgctaagtttcgatggctgttgcttggggtacccctgaaatcattgattaaattgttggcgagaatgtacccaactaatactttatactgtagtctgtaaatgcacttaagctagaaatagacttttaaaaaaaatcaaagatttctgttttaaatgggaatacctgctatcctaagtctgttgactttctgtgagaaataaaagtccttgaacaccagaaatgttaatatttagtttcagttcaacatacaccatcactgtccttatagggttgttatcagatgttcaaactattcttcatttttgactgtgagtgtgtgtgtgtgtatgtgagtgtgtgtgtgttttcatagagaagcaaagagcagtgtggcatgaactaacatctccacgaaaaaatgaaaaatgtgatactatagtatttactaatgtgtgtgtttcttagctttgatcctgggtcctgagaatctcaagattggacatcaaaagtaacagttctcttatcactgtctgcccatgcctgccatttctgatctaatatgttagagttgacataatatacccatcatttttttttttgaagacttaataattgcctgcgttttgttagcagtaactatggtaccagaactgttttaccagccaagcttgtgcacttctg

SEQ ID NO: 31279 - DNA, 1231 bp, Mus musculus
caggtgtggcatcttgtgtgtgtatgtttggattttcttgtgctgatccgttaattggtgacattttatagtcaaccatcttcccaaattttgcctcttaaaagttttttgttttttgtttttttttttactttcttatacattctaattgaatgtattagattactgctctttaccagcccgagggtttaaactctggctttctgaactgttccaggcacttttaaagtctgtctcttaggtgactaattctctcttcagtgtgtctgatgtgctggtaacctgcctgaacattcagtgtcagtcgtccatatgtaggtgagcgctgttctctccccacagactcaccgtgtgaacccacttacttatgttctcctggacagtgcatgctgtggacacaggccttcagttattgatacttcttacagacttcttacagaataaacacgtgcaattggtatttgtgtacaaatactttttaagtgcatgtttaaaaagagcactagtgtttgctgatttctgaaaccagtcctgattgtagcttgtttgttggccagggagactttgtacggaagttaaaagaagataaagccccacaagtggatgtggacagagcagtagctgagctcaaggcccggaagagggttctggaagcaaaggtaagtcttaggatgctaaggcagaaacgtcagtaggtgtaggcttattcctctttgtttaatctctccaggtaggaaagatctcaaaagctttctgaacaagtgccactcaaaagctttctgaacaagtgccatttggtctttttttttttattattcattgtgccttttcctccttctacctaaccaacttcttgtcttctctgagagctgctcaaggctgtgtagctcagtggtggagcatttgcctagcacattagaccctgcttcaagaacgaagtgcagcttacaatgccccgtagtctctaaagcttccgcactacctgaacccaaactctcactgtcccccagtcctagacataataaaatacatgaatttcctagaagacatcatgctcctctttaagaattcacctgggattagatttaatagttttgttataatctgtcttatatttaacttcagaccttttcaaactgtaaacctgctagcattaaatttaaatagtccaagaggtcagtttgttttgttttggattgggggagggttgtctgtgtctgtctgtgcttca

SEQ ID NO: 31280 - DNA, 1155 bp, Mus musculus
aatcatatctgctacgtgagtagcagtgtctgcattattcagcttcccattgctgtgagcgacacatctcaggaatcaaaggcttattgggctagagtgtcaggcgttattgtctatattcagcctgtttgctcagacctgtggtgcaaatgacatggggagggacactgttgcctcaacacacacacacacacacacacacacacacacacacacacacacagacagacagagagagcgagagcgcgagcgcgtctcgtggtgtttccatcacttccagcaacactgtcaactggagagccaatgagccttcaactctgagctgctggggactttaagatccaaactatcacagcttctttactgctgctcaaagtgtttgtggggactgaggcctccactttagctcctcaacgtcttacatctctagcattttatactggattctaccaaattcagatgtgttagaaccccgcctacctgtccaattactctcttcttgtttgctcttataggagctggcattgcagcccaaagatgacatcgtagatagagcaaaaatggaagatacgttgaagaggaggtttttctacgatcaggcttttgctatttatggaggtagggggtgaatgaagccacagtgaatgatgggaagcatggcagcatggggcagacagggtgctggagaagaagctgagttctatatcttgatcagaaggcagccaggacactgtcttctgcaagcagctgggaggagggtctctccacgctgagcagagtctgagcttgggaaacctcaagcccaccccaacacttcctccaataaggccacacctcttagtagtaccacttcctttgagccaagtattctaaagtgtgtctttggggccaaacttatctaaatcacactatgctttgtcaagagcttggcttgctaactgatgtttattcaattgtgtcagatcccataaaggagagaagtcatgtaatttacatttttgttgttcaagagttgatatttgcataaactcttagtactccccactctgttaattaccctcccacccccttgtaaaatttatttctttgtttatatattttttttctaagacagtttctctgtgtagccatggctgtcctgtcctagaactctgt

SEQ ID NO: 31281 - DNA, 1213 bp, Mus musculus
cttttcagccataaagaaaatggagactccatctttgacccatgcctctatcttgctttaaacgatgtgtcggatccttactatccatctaaaagtgcacgggccatcattttcataaagtccaaatggacgcagtgagatcccacctgtctgcacggttttgtgctgttctcagttctgatttaggaattaaagactgatacttctcctttagtggtagctattgctgatggttggactgtctcgtttgagctgcaggagtgtccactgagtctctcagtacaccttagcactcttcggtaacttccttgctcactgatatgacaggatacttttaggctcattctgtttgcttcatgtctcagacctggagtcagccgtttttccccaggcagacctcgtccttgttagtggatttttcctggtcatatgttgggctggtgacctgcacttagtgtggttggagcagtggtgggacgaagctgtggatagtacttgatcttgtgccttgttctgtaacgtttgcactcattatcttctctctgtgccccttagcttgataactatggacaacaagaacttgcggatctttttgtgaactataatgtaaaatctcccaccactggcaatgacctgtcccctccggtaccttttaacttaatgttccagaccttcattgggcctggaggaaatatgcctgggtacgtattgtttttcatttatttgtttatctaacacacttattaaaattgcctgtgacaaaaggtaaacttgagggccaagaggaaggctgcgagtgggggttgtgttcgcagaagtccatgatcctcagaccttccagtaagcttcacaggataggcaggtggagagtgctttatgtcattgagtttgcattatatttagaaatgattgaatccatccattgcggtttgcattttgtgctatgttgtaactagagttactagtcatgtgtggctttttagcatttaaaaagaagccagtgtttctgaggatcgaatttcaacatttgtttcactttcattaacgtagacctatctagtggcccatggtgctggagagcgtgggtctagcccacactcttaaaatataagacagcttttatggggtggtgagatggctcagcagtgaagagctggggcccagagcgagcagggtgggggtgggggatgagcaagggagaagggaaggggga

SEQ ID NO: 31282 - DNA, 1197 bp, Mus musculus
gacgctttaagcagagtcatttatgtggttgctactatccagcatcttgtttcccttctatgtgacctttgctagtttcctattttaaaggatatattaatctgcttttaaaaattacttttatttatagcgctactcggctactgctacatagaagggactactgttgagaggagttgtcacttctgttgttgctgttatttcgttgttagggctcacacccaaggccttgagcgtgccaagcctgctttctaccacagcttgtctactaggccagttattggtgtttttttaaaagagcaatctcctacacaaacctaacccagaaatctttgggtaatttctttaggaagctagtcataagaaaagcctggggtttcggccctttatctagaggagtgagcagccagaaatgggaaccttgttgacagactcagttatacagttaggcatgcagattttgatcttgtttttccttccagggagtttacaatggcagagattgagcactttgtagatcccactgagaaagaccatcccaagttccaaagtgtggccgacctctgcctttatttgtactcagcaaaagcccaggtcactggacagtctgctcggaagatgcgtctgggagatgctgttgaacaggtaaggttctcagggagctgatgaagatgatgccagtgagcagtggcaggacttggcagcttggttgtgcactgagtagtaggtcaggcaagtgcctgaactgcattttcaaccctgacagttttcgtcttttgtggtactgatgagcaaaccttgctgagcaagtgacctagctctaagttgcagttccagtccctatatactatttgttttatatagaatttactttgtggtattagtatcaagagagaaaattatcttaaccaggatccaattattctgggccaggatctaatgttaaaccgtttctcagatgggcctgggaagtggcccagcaggctcaccggctgtgaagtcctatttatggcttgggtttgattctaggacccacatggtggaaggagaggaccaactcctgaacaactgcgcacacacagcatttaaaaattggtcttagtctcaactgtcctgtatctaactgattctactttaacaatttacacaactttggaagagacagaaatttactcagggaaaacgaacaccaaggga

SEQ ID NO: 31283 - DNA, 1119 bp, Mus musculus
taaccttataagtctttgttaatgatattcacttgtttgtttattcgtgtgtgtgtgtgtgtgtagtatgtgtgtgtgaaccagatgcccacatcaaatgtcttctttactgctctgtaccatactttttgagataatccctcactgaaaatggggatcactgatttcagtatgactggcagcgcagcagctttgaggggagctgctgtctcttcctcagtgctgggactgtaggcacggacagccacacgtggtttttatgtgattgctgagcatttgacctcaggccctcaggcttgtgggggatcactttactgaccgactcccctcacccccatctggctcattttgtgcataaacagagtttggggcactaatgctggcaggactgggtggtggctttgaagttggtatggttgagtgtttcaagatgattttcccaattcctgaagttgtactgcgtctgattccttgactgtttcatacaaaacagttaacgttgtacagtttgagcccaacaagggcgccgtgggcaaggcgtacaagaaggatgcaaagctagtgctggagtatctcagcgcctgtgatgagtgctacatttcagagatggagctgctgctgagtgagaaagggtaagcgtctccctcaggctctgagagcaagggacaagatgggttgttttagaaggcctttgacaggtaagtgctacctatgtcttaattgtatttaaagaactctctttgttagaattttgacattatattctagaaatatatttgaaacaaataggatctttttgttatctttatgaccagtgtgctgagtttatttcccagcatctcagaagaacaagcaggaataagttcttttctaggtattttcatggcagagactatttgtcttgagttagattagaagccaatctaacttttttaataagaggcatagaatactctgtaatcacacacataattataaaagcaacagaaactagtctttaaagaagtacaacaaaattcagtgccaaatagtgtgcaagctatagtaatagaaaattattgaacatctgtaaaagcagtatattgtgattactgataatgattagttcaaaggaagacc

SEQ ID NO: 31284 - DNA, 1056 bp, Mus musculus
gaattatcccaggctgaaggaggaagctgtgatgtaggcctctgtgttgctcaagtagaaggttcccttgtagcaggatatttgtaattgcctgccgtcaagggggtaattaagctttaagcaggagctagcctcgactctgtcattcggtgctttaatggaacacatccagttgctcctatgttgtgtgttcttgccgtcaaatgaaccttttatacaagtcctgtttatgacatgccttcagctctcattttcaatgcaaaatggcctgcaaaaagctggcttgcctgcctcagaacatctgctgcctttgattttgagttcatgcacagcgtaggagggttgggccatttactccctgtatgctgatagaagagctggtattttgatagtgaagtggtctaagttacctactgagtgtaactactttgtgctttgtgacaataacaattacttataagctaacatttgaatttctttcttttaaaaccatctagttcttcagtttccctgctgtggttgctccattcaaatgttctgtccttccactgagccagaaccaagagtttatgccatttgtcaaggaattatgtaagcaaatccagttgggtgatctccatgggaacactgtcttgcagactcagttttactgaatgtatcatttgtttgagtaaaatcatagattgactatgaataaatgggattttagcctctgcttatattataacagagcagacttgctcagatgtcttagcatggggtgagtcaggagtcagacttcagaattccttgctgctcttagtggccttggttccctcttcccaaaaccctagtggaatgtagcgccctgctgaatctacagcattggagggatcccaggagtgctggccctttacttctgcatgagcagctcagggctgtgcagtctccttccggtgcagctgttctgggtggagatagcagggcaatctgggctgctgcaggggacttagtaagcacccatatagctgggacttgctgctctcatctcagggtcctttgtgtttgctgagcttc

SEQ ID NO: 31285 - DNA, 1144 bp, Mus musculus
gctgagctgtgcagggagctggtaggcttgagcctttgtggaattgaggaaagaccccagcctgggaggcggtgagcataattaggaaaacaaacacagcttgtaaaggatgatatcatgtgtgtatccatggtgtgcagtatatcacagataggcagtggtttgctctgtctgcattgctgacatcatgtgtgtatccatgatgtgcagtatatcacagatagacggtggtttgctctgtctgcactgctgacatcatgtgtgtatccatggtgtgcagtatatcacagataggcggtggtttgctctgtctgcattgctgacatcatgtgtgtatccatggtgtgcagtatatcacagatagacggtttgctctgtactgtatataagggttcctgaattcagggcaaatgcccaccacagatgtcaagttggctaatgcttgcacttcttttctcttcccaggtctctgagctgcccaatgtggtccgcgatctggccaacggcaacattacctgggctgatgtggaggccaggtacccactctttgaagggcaagagactggcaagaaggagacagtagaggaatgagaacagctggcagcttatgaccatcgtgctaataaataactcatcatgtccactacacagagcattgtgactgcatccagggacggtttttcctcagtggctgcttggttttactcccacaattaaagttgaaggaattctgaacacatttataatccatctgttgtgtttccattttttttttttttttttagcaaagacttttctctcagatatttgtttagatgtgcttgtgtttaacacggtacatcttttaaaagtaacagttttattggggtatagtttgtaagctacaaattattttaggtgtgcaacttagtgtacttaacaattatacatccatagtccaactttagaacctttatatcgcaaagaattcttatgcccatttgccgtaagcctccgttgacccctcagctcccagcaggcatacgtctactatctgtagatgagcaggtgatgctctgtgccagagagacagctatccccaggcaggtggtggcttctgggaaaggctcagtgcatggagaaggctgtaggagttttgtctacc

SEQ ID NO: 31286 - DNA, 1177 bp, Mus musculus
ccaaataggccaattggaagagcatcccaggtaaagggccaccacaggtgagtgctctggtgttggggatgagactcactcattatgtgtagtgccttcctacagataccacgataaattgccacaggccggaggaggggctgtaagacatctgacatctattctctcacaattcttgagtctagacatcaagctaaagtgctgtcggggccgtgctctgcttgaaggctctgaggagaacgtttatcttctattgttgaatcccatatcttgtaggtgattttctttcagcatttattggcttggagacacatcaccctgatcttcttccatcaccagcatggacttctctacacccgtgtctctgtccttgctgtaatttattgtaaggacacaagtcctacttgatttagggttcaccacaatccagtatgatttcaactcatttctgcttgagagacttattgccagtctggttccatccatagacactcagagtcaagacttcagtatgttatcttgagagatataacttacctgtaggaatgaagaagagtttatagtttcactggctgacctgatacttgggctactcataaagatgagaacccaagccaggaaccttggaggtaggaattgaagcagagaccatgaagcaacactgtctcctggcttgcttctcatggcttgttcagtttgcattcttttacaacttaggaccacatgactggaatagtactgctccggtgggctgggccctccaatgtatcaaaattatcaatcaagaaaatgccccatggaaatacttacaggccacattggtgaagacaaccatgaccttaattgctaacctgggcctaacctctaggcacagtgcatagcatgggcacttgactgtgcaggacttccgtgagcttcctgtccagcaccacagacagctccgcgacactgagttttctggagaattcctgtaggttgtctgctgtgaacctggcagatggtggtcctatggggtctgatattcctaatatttagggcttcctctttgacacaaaacaggaaaaatgatgttttttccccttttgtatggcaacaatcataagaacaatgataacgctttggtgtattctttattgaacgttttttaaaatgacattgttatagttaattgaaatat

SEQ ID NO: 31287 - DNA, 2230 bp, Mus musculus
gccaggagtcagttgtttggtaaatcagtacagttggcttcatgttaccacaggcatgaatttgccagcctctcatttaattcatgttggtcatgtatagctgtcatttgcctttcaggggatcctgaatgggcattctcagggagtacttacaggaaacagtctaccttttcagtaacagaaggcatgtagaataaccattatatctacatatgattaaaaaagcattgggaaagtaagaggcattgattatctttcatttatcctctaggaggttccctaaggactataaaaagaagatagggcataactcaatatttttaaaattttgcaagttggattttcacacaaaaccacaaaaatatgaactactttaagttgggcataataagttgagagaatccagtgacaataaattaattggttaatgggagaaaaccattaattttctttggccagtaaatatttgaaaagagaagaaactaaagccacacaaaactgtgaaaggcacattaatgttgtgctgagactattaagaattccttgttagataccatttcatgtggctgcagcatgctgatatatccatggtagttgacattgctaggagccctgcctgggttagctaataaggtaatgattcattctttagtttgtaccaggtttatatgacttgccgaattgcctgctattacttaaacaaaagcaatgcagcactgactttgaaatatacttggggacaaaatgtaactggttttgtttcacactccccatttgagtgtgtatggttcccctgtgtatggtctcacagtcttgccacacaggtctctaaattgccaacttcctccctcttgtctcaactgggattataggagcacactactgtgccaggcttaagtgtatattttaattgaaccttctcttaatgtagttaaaaacttaactcttaaaatggttacttaactggtcagcctaaaataacttaccttggaatataaaacatcttggaatggtcaaaagactatactcctacttccttcaggttcttggaaatgttggcttttcaagggccataggccattttgttgctgggggcatcacctaatgcagcagcctgtgtcatggagaacaggagatacagccagtgagcccagacacgtgaagtctgtattttaggctccagtgagctagactaactcggaagagtagtctccctccagtgctggcatggtagtcctttagtcaacacctggccttttgactattgccaggagatgtggctattggaaaccatgctttctccagtgattgccagtgctcttgtgtcttaagaactgagtgtttgtaactagacctgcaggagcgaaagtcaaccagcatttttcaggtttccagcaggcagacattgacagtagctgcactgctgttgaggtagttttgatcgtagtgtaacgacaaaggcacagataaggaagagaatacaagctgtgagtctggagtagagtagaaattctgaagctgcgtgtaacaggatgtagagcaattgtatatgtatatctgatttataaccaacatgaattgtccacccccaagtccttcactagctctcaagcctgaaaacagttctctccttttgcggtaagaaacagttggctttcttgggcagcaaagtagagtgcatgacaggacttcctcagtctttctgcttttcacattttgtactaagcagttaactgatttttagaatagctttctttagaaattcaaggaaagcaaattaggaaaacacaaatgagaagctattacatggctgagaaacagggcacttaagtctgaatggagagtattttgacatcagtatttaacctactaaaggcatgagtttagacaagttagaattgtaatctgctattgacatttctaagtgaagctataacattctttagctggtaggcaggtattattgaagctgtatattttatagagaaaattttgagggagttaacagccagtggctctcttccttccatgttgataaatttagaagtcctgcggccagcatcctgatttatacccacaggcagtgtctgctgcagcctccacagagggcagcctgttaggacagaagctgctgcctcctgcctgtggtgctagctgcaccagcctgttcatgtgttggggcattgcttaggatccctgaaacatttgcacactgtggttctttaaagag

SEQ ID NO: 31288 - DNA, 1434 bp, Mus musculus
tatgaaataggttatttgataactgagaaactttaaatgtatcatgtgagcataagagtctggattatctaacattgttagccctgtgtatgtacagtccagaacttcactttttttagaaaatttttttgtttgtttatcttgtttttggtttttttgttttttgtttttttccgagacagggtttctttgtatagccctggctgccctggaactcactttgcagaccaggctggcctcgaactcagaaatccgcctgcctctgcctcccaagtgctgggattaaaggcgtgcgccacctccgcccagctcagaacttcacttttaaaagtaatctgttcccagtgtggtatctcaaaattgtgctgagattatcttagtatatgtattggattcctgtacttccaaagtcctggaatatagtttttttagtataattccactgcacttaacactaatgttcatgttggtatagaaatgtcttttaaatcctattgttgagcaagatctgctctctgtctatggtattacacagggaaagctgtgactgcaggatcagtctcattcttctactaggtgcatggactcccttcccactgacttacactcgtctatctagaatacaggttgtccaggcagctggtcacttaccaggtgtggacttacgttgctgggcttgcaaatgaattgctagtccctcattgtgcgggtctatgtggagctttaatcagtaaatgtctccacttcctatattacattaacgttggctcatgcatataaccacctgctgctgatgtacttctccatcttaaaaagatttagagtggattaaccaggtcattacatcttaatttaataacaagcattactgtagagtgattgtgtgtaggtatctaataggtgtgttttttttttaacttgatgtgtgtatgtttggggggctaggattaggaaggtgaactgtgcaggaattgtctgcactgtgcagaagagcagatcctagtgctgctctggcattaatcccaggaaccactagcagtagtggggcgccaccaatgtaacatgagcacaggtgcctcatggcaaacatggctggcatgttcaactgcataatgctctggcactgtattttgaatgacattaatttattaaataaattgtatataatcagtatctgttggttttttggtttttgtttttttcttttgtgatgggagtactctacctgtgcttttatttgaggttttgccagaacagatttaagtacttgtaggtggtttctcaaaaatctctttgagatacagagagagagagagagagagagagagagagagagagagagagagagagagccctcttcactgctattttactttcttcagtcccatcctccaacatcagttttggtttgaaaatactaaatagagaatttgt

SEQ ID NO: 31289 - DNA, 1167 bp, Mus musculus
tagaaatagcatcctttgaatccagttgctgtgccgtctttgagatcatgagagtatgttcagagagtgatacccattgccaaagagggcttttgtttgagttctggatttcttacgtttcagtcaggtgttggctgttaattaactaaaaaatcttgcttttgcaatttaaattctttaaagaaccttaaaattgtctgctttttcatttgcttattttctaggatgcttatatctcgtatggaaggcaaaaagtttaaagcacaactgttacttttctgcagcctagttactttaagtgttttagacttgaacaattctgtttaatttttgtacttatatctaaagtttattggaagttcacatagatataatgcatatcaaaggccgttgatttaaatattgtgttctaaaagcttgatctacatattctaactgaacttttttctgtttagttctgcagaagacctactgaacataagatgttgcaacaaaatctacctcctgtattttccctattcatgagcttcccaggtgcaaatttgagcaggatgtttggagaatctgttgaaaaactgtagctcaggatgacctagcaaagattgtgagcctgtaacaagatattcagagcggctgtgtgggttctgttctgaatgctgcagataacagcaagtgaactccctcctttgcttttgaagtattcatttgaccttccatcaagacggacttttctaatctgttcttggagatattaatggaatacaatcatgtccactcaagaggaaaggcagatcaataccgaatatgctgtgtccttattggaacagttgaaactgttttatgaacaacagttatttactgacatagtgttaattgttgagggcactgaattcccttgtcataagatggttcttgcaacatgtagctcctatttcaggtaagtagtttatcttgtttagtttgtaataaaagtgttatttaaatttctttattactctgggtgtgtgtgtacactcagctatgccagaacaagcagtggaaccagcgcatctcactggagatgctgcagtgaggcttcatcagtacagtctttcagtgttaaagctttggggttttaggtttgttttgttttgttttttaagacagaatcttactgtgtagccctgg

SEQ ID NO: 31290 - DNA, 1202 bp, Mus musculus
attgttttggctttccggtggggcagaggaaaagggcgcggtgagccagatgaaggcggggtccagccgcgggcacccgggagcccgcagagccgctgctggagcgggcgcgggcactggcgcgggcggcaggccgtgacggcccagcccaggaggcgcgaggaagcggaagcgggggcggaagcgagcggcccggatccccgcagcgccacgcccccgccgtgcgtgcggccgcgtgagtgcagcccggcggagcggcgcggtgagctgggcgaccggggacgaggtgagcccggccgggcgcgaggctggcgggcggcctttgtggcccggggcggcggcggcggctttcaaactggggcgcttccgccgagcgcgcggtgtttccggcgcggccttgcgcgagctgcggggctcggggcggcgtcctttctgagggagagctgttttgcccggctcgtgtcgcggccgccggagaagggcgaccgcgtccttgcccttttttttttttttttaaaaaaaaaaaaagtattattataattctttttcttggcacatcggcagtaaccaagagttagccaggttagccggggtcctgttgtcctcggcctgcttgtgctctgctgtgggaaggggaagctgcactttgaaacctgtttgctttagacggaaatcatgggttggaactggacgctaagtcggccgactgggcgctgctgtcgtgtgctctcccccacttcccgccccgccaagcgcctggcctagtagctcttaagattccttttttttatagctacctaaaggaaaagggatgcgtattctccgggctgtagatctctagaatttctttggtggcctctctttaagttaagcaaggaattaagatagtaaacttgaaagactttgctttgtgaacagctatatcagctttgtgaaaacgaggggggaaaaaaaagacagtgctggtcacgtgttgtttatacatgaatctgtaagtctggctcactgagcagacactgaggaacggccctatcagcggtgtgctctgactgaaattatattttcttcctgtgagttaatacagtttattttagtttcttcatttctttggagttgtgaattcttccccagatttgagtaatatagaccagatcttttgcaggtgagaatgacttcgtctagtcagactgtggatgaagctt

SEQ ID NO: 31291 - DNA, 1176 bp, Mus musculus
aggatagtgtgaggacacgatgtagccacaagtgtctcctggtttcaatggcggatccgtcaggattcgccactgtaggatttaaatttaataaggtttacaggattaggattttagttgctgcgcccaccgattgagttaccgtcatttctgaactaagtttgtgttgggttttccttcacgcagcagctggtccgggttcaagagagaaaggtacggaggtaaagcacgtgggtttgcttgaggtgcacacaaaagccgtgggggatctgaaacacctctaggccagtctccacgagataatgacaggtcagccattgcccgccagcgcatggctggccaggccgcctgggtagaagtacaagtgcaggaacgtgctggtttctttttttattatttcccacaactgggttccttattcataatctatccattaaagatctcccggatgctacttctctacacgagcgcctctaatagctatccaggacttgtatggaatggttcctccacacctgacctgctctagggctcctgcctcctgatccagctatcatgaacttttttttcttttcctgttccttgagcatgatactgttcgtgcccaagctttccacacatctctttctctcttaagcctactctctacattgaagaaatgaaaccctgtcgatgctcagaacctatctcaagcatcgggttttcccccaaaggcttccctagcagacaggaaaccccttctcgttggaattggcagaggcatggatgtctgcccctcacttggcagtctcggtatgccagctgacttatatgagacacacagagtctagaagttattaattatcgagatggccaatgtaatcatacctgtctgagcctggtgcttcagcccccacctcaacctccctctgctgtgtctgtctctgtagctctcagcaacttctattttactgtgtaacctagagtatcatgtgttttcccagtagaaatgtaagcttcataaggttctgttttaatcactaccacatctccagaacccagaagagcaggcactcaataagtatgtgtttaatgaataaacaaatgggtgactgactggaaatgtagtgaactgagctccaacaaacctatagttcttttagagcaaacgttctcaaagtcctatcttctagacgg

SEQ ID NO: 31292 - DNA, 1224 bp, Mus musculus
gactaaaacaaaggcagggctatccccttgagttgtttccattgcttcttattgtaaaccaagatactcagcaaggtttcttttgcttatttttctcggttttgcactcatttcccctttcccaccctgattcttttcttcagtctgcagggctgggagttaaatccagaaccttgcaatgctagattccaccactgcacagtgcctccagacctctttccctttaaatttcaaggcagtctcagaaggttgcccaggctacctttgaacttgtggccctttccccacaacttcctttgttactatggactatcaggccttttccacacacagtgtttgaacctatgggcttctctgctagtgtataaagtagttagagacaaacttgtcttggccttcatttatatatctctcagagcacataaccaatacatctcctagaagataaaactctgttgctcaatttaatgttgaagaacagggtgtaagtcccatccatgtcttgctatttatggcctgccatgtcagcatttaatcatgtgcagcccctctctattgcatctgcctcagtgtggcttaggaaatcaaaggacaatttcaggactttctgctttcactgtgggctcagggggatcaaacttagggtgtcaaacttgtgtggtaagtattttttaaaaaactttttattggttctttgttaatttcacatcatgcgccccaattctactcaccccaccccatatacttctccatcctggcaaccttatcccccaaaagaaaaaaaaatctcatggtggaagctgtagtgtgtcacaatgtgtctcacagtatacccttttgtccatacttctttgcttgcaaatgctcattgcagtgagtcattggtctggtatgaggcctctggcttctgctacactatcaatactggaactgtattatgattcctcttggatatggatattctgttgttgccctgtgtcacggagatcctatagttttggatctgtaggacggggtccctttatgcactctaacagttcatccaatgaaggggacatgttggggagagctaattcaaagccctggatctgggcctaagctcatcagtccagcggcaagcaattttaagtggatttgttggctacttatattgaagttaatataagaactttgaccctgcagatgctgtccagtggttacaaatcctgggtcagtaactccttg

SEQ ID NO: 31293 - DNA, 1173 bp, Mus musculus
attttgtttgatactctggtgccagggtcaaactataacacctttagaagaaattaaaaatttcatttaaatgactaaatggttaaaccatagttgcagatctccatttaagtgaagagacatgtttccagggaaactcatgggtgtttgagtcatttatatggtttgtctatggaaagggaaggggagaactatagagaggcctgaggctagggtaaaaagtagggaaggaactctctgagattttccgtaatggcagagaactcagtgagtaggagagctgttgactgccggtatccataggaacttctcatttcttcctaacaatgagatatatgcctgctgggccacataagaccctgctcctaggggtgactgtgggctttgtgtttatctgagacttggaaaacagaaatcccaagggatgagttaggaatggtatggaacttgcttccttcctctttgatgtttttcagccataatcgcatgaaaacctatgacacgtacgtggggattggatggctgatccctggaatggacaaagggctgctgggcatgtgtgtcggcgagaagcgtatcatcacagtccccccttttctggcctacggggaggagggagatggtaagtccttctcttcctcagagcttcactcgttcattcttgtatgtttcttttcattggtgagtttgtgtgtgtgcctgcttctctgtacatgtatatgagtgcattgcgataggggccaggagagaggttcagatctcctggagctggagagtcaggctgttgagagctgctgtatgtgggtgctgggaacccaacctaagtcttctgacagagcagctagtgctcttaactcctcggtcatccatctctgaggcacctctctagccttattgtctttacctttgtctgtagtgatcagttcatctgtgtccactgagaaatatcctgccttttgctctaggtcaactatagtacaactatggtagccattggctaccacacgtggttgtttacattgaagcaaaaatgaattaatattaaaattcagttctggccacagcctcacatctctggtatgagagagccacacattgcgaagggctctgtgctactccacaacaccctttgtttccattgttacagagaggtctgttggacactgctaggca

SEQ ID NO: 31294 - DNA, 1152 bp, Mus musculus
gtctcaccctagaaacatccaagagaaacagcaccatgcagaaatgagatagaaaatatgtaaagacccataacttatgggttatgtgtatcatttttatttttatctaatttctgtttattaacagctcatttcggataaagaacatttaaaaaatgaggctcttggttttaaagaacatgaaagtataggattttccagacagaggtttggaatttgcatcatgcgatgcccacagttagacattagggtgagacactgtagttacacaacatggagagcagagcgtttgtttccttggcttgaaaacttcaaggaatgaggaacaccagcagagatggcatgagtggtgcttaaagcacttcctaaattttatgtctggaatgaattgtttttctatttcactccaggaaaagacatccctgggcaggcatccttagtctttgatgttgcattgttggacctccataaccccaaggataccatttccattgagaataaggtggttcctgagaactgtgagaggagaagtcagagtggggacttcctcaggtatcattacaatggcacacttctggacggcactctctttgactccaggtaaggaagctactgttcactcacgagggcatctgcctaagtgatgtctaactatggttggccacggtcgaaatataccatcaatcctgactcattttagtcatcagtacagatctctgctttcagacgctgagtttgttccaaggtggttaccacagggtgtcatggtttagatggtttaggaaacaggaggaatttatattcctagacacccattgttctcttccccactctgaatcccattgcggactctaggatgtggagtggtcagagtgagttgaagagatacagtggacaaagagcctatcactgctgccctagcttcctgatgttggattgcgttggagctctctgaatatcagcttcagtttattccttgaatacattctccacgttctccatgatggttgagttaagctattaaaagtgctgtgtaaaagctgaagacagctgaatgcattccactcccttgtgaatgcatgccgcagaggctaattactctacctcttcctcagcaattacacagctggctttagtgcacaatgcgtgtgg

SEQ ID NO: 31295 - DNA, 1113 bp, Mus musculus
tttgcagagttgaacacgagctccccagacaatgcctgtcaaagggaaggctcactatgaaattgcaacaaaacacaatcgtttaaacattagttattttaggaagtaggaaacatgaatagtactctgtacacatgagctgtgggtgtgagtaggaagggaaaaatcagagtaagactagtagtgtttgtgcttaagtaaggaaaggtgagggaggaaatacaagtatgtgaataccaggggcagatagggaactaactgggaaggagatgaggcaacgcccagcagctgcattgtatggctgcgtctcacacccacaccccttttatcatgtgaccatacagatagtaagtacaatgtgctgttcctgcagatgctcctgtgttccccattccaggggctgtgtcctcagattctatggttgagctgctctggggtgtggagttacctgtggcctttggcatcgggattctgagtaatttccccagctgccatgtgtgtcccttatgaatgacctcatcttttcctccttctgtcttagctattcacggaaccacacctttgacacatacattgggcagggctatgtgattcctgggatggatgaaggcttacttggtgtctgcattggggagaggcgaaggattgtggtccctcctcacctgggctacggagaaaaaggcagaggtgtgtattacccgctctccttactaactggctacttccacgttgctcagttcagtacttctagacacaaaacagggagtctaaatccagccgaagactccgtcccactgatgcttttcatttctagagctattggtttgcaacagctttccacccccatatcccttttctttctgaccaatgtaaaatctgtgccattaatgaaagaattgcatggtgaattctaccttgttttaccaattcttaacattttactaatatatgttaaataatttttattttaattttacatgtatgaatattttccctgcatgtatgtaaggatactacgggtgtgtagtgtctgaagaggccagaagaggacactggatcccttggaactggagtcacagacagttgtgagctgctgtgtgggtgctgggagct

SEQ ID NO: 31296 - DNA, 2252 bp, Mus musculus
gttctggagaggtcaacctcaggtcagaagctaaagctgttctggtggctgaagcctattggataccttgatcccaagggctcttgaagtcctctagtcaagggatttaaaaacatttcaatagtattttggttttaaaagcatgtgtgtgggaatatgcgcatgtacatatcaggccccccgaggaacccagaagagagcatcaggttcccctggggctggaggtgcaggtggttatgaactatccaacctgagtcctggagctaagtgctcttaactgcttatccatttctccagtctgtagtccaggggaattttcatctgcatctaagaaatccaggccatgttctcaagaacaacttggtttgcaagtgtggactcttatttttcagttcccccacccccccattacccgccctcatgccatagtatttcaggcttggctctgcgtgcccaattctgctgttctcacatttgtcctgtcccctttccagttctcagagtacattcatgcccaagtggcaacaggcaaagggaagctggctcctggctttaatgctgaaatgatcgtgaagaatatgttcaccaaccaggaccggaatggagatgggaaggtcacggctgaggaatttaaactgaaggatcaggaagccaaacatgatgaactgtaagcctgacacagatcagtgtgtgccaaggagtgcatgacaccaagcgacctgtcgtggcggagcatgctgtcaaggtgtgaagctttctaggaaggtttgagagtagccagaattaggtgggccatgtagtacctggtgcagacagtggggggtggctgatgcccacggtgaggacttgggtggatttccagtgacagtaaagagaatctgtatatagtgctttggcacaaatgcaattggtctgaagcaccaattgcacttgtgagtcttctgggaggttgtgttaataaaggaaaattatttcatagaagatgtagctgtcatggaggaaacagaagaagtacccaggtgtctacctaaagaaacgatttggtttaaaagtcttgctagtgtcttcaaaaaagttcaccatgggcagaaagataaaggcacacatgtttcagcaagtgtccttgacagcagccattgctcttctcagtgttctgtgcaagctctggtgataccaggccccgtgcgacagccatcctgtcaccttccctacaaatctccattttcatgctttccagttcactctctacactggcagccctccaattggtagtgtctgtcacttaaaggttaacaggagtctcctggacaggaaaaacacagaccaaatggaagctgtctttagtccatgagtagaggatttgacctgcattttctacataggattggctttctctttctccactctattcctttggggagatacatgatggctgggtctcactggtcggccaacagaaaattctactgtgactaaagtggatgtgttatcccaacaaatgaaggtgacactttctgttctccccccccccatttgtgtcttggaaggcaatttgaggtctcctgctgtagaaaaggctagcccattcccacaccatgtggtagctatgctcctactttatgtcctcagataccaatgatgttggcactcactctgacgtaatcaggacatttccgtttgaaatggcgttttttacaaagttaaactgttttgtactgatgttgccctgagatagttcatgcaaatgctgtgcactcattcagtggaatatagttggaaaactgacttctttttttctgacataaaatgttgaatcatatcatctggctttatggtattttatttgaaagtccaaaggatattatgagaatgcactgtgtggttgaagtccccttgacaaaaacttggcaggacagcagaaaacttgtgcagggcagtggggcatctgggtgggggtgggaggaagctggtactggcaggaaactcactagataatctcatagaaagggctatttacagttgtgggcagggcctaggggagcagaaaatgctgagatactgtgaagatagggttgcttagtaatagctggaagctgtttgccactcctgtgtctcgggtttaaggtgaatcagctggagcagagctgcctgaatgtgtgtgttgaggcaactagttacacacagagcatggctggcattgcagtctagtgaagaataagagatagcatctcttctcatcttcctgtctgctg

SEQ ID NO: 31297 - DNA, 1129 bp, Mus musculus
tatatccctctgtccatatatctttactagcagtgttcatttcaatgaatcattggtctggtatgaggtctctggcttctgtgacaccattagtactggatcctcacagggactcctcttggatatcctgttattgttctgtgtcatggagatcctgcagttttggatctgcaggactcttgtttttgttttctgagacaggtgctgtgtagttgtctggctctgaactcatgattctcttgttttgtcctgagtactggggttttaggaaagtacctccgtacctagccccaacctctggcttataaacccctgcagtttcacctataggctgatgctgttctttcctttgaacataatactcttaagtgtgttctcagtccttagatcactaaacttcacgttaaatacttttgctctttcacatgttacttattacaaaaacaaaaacaccaatggagagtaaggataagagatttttgtatcatttaaccttgcctttctgtcccttctggttgaactagagactgctcttcacagtgagcagtcagatcatacatggtgtctttagggcacaccacttagttgcctgaaggatctgaagtttacatgttacagtcaggttcaaatagatcacagtagaaactaaacctacaaaagccaagcagcaaagagatcaggaatgggatctggagaaggtccctaactttgcatgacttagtcacagaggaacctactgtgactggtctgaatgtgatgtctcccatggtattggtccccagttggcgctgctgtcttgtgggaggtacggccttagtggaagcatggcagtcagagtgggctttgagagtttaaagactcctgccattgttagtttgttctcgctgctttgagcttgtatttcttcctgctgcctctgcttcaccatcatgaaccctaactccccagagctgtaaaagcccaaataaatgctcttgtccatcagtgggcttggccatggcattttatcacagcagcagaaaagaaactgatacatcctgctatacattgtttctgaaactttttataaggaactctttgtgttcaataaaagaaaatgattttcatagtccttagtattcttatagga

SEQ ID NO: 31298 - DNA, 1182 bp, Mus musculus
gtctgtcgcccagcgatcatgatgctgaggcaggaggctggcctcaaaagtgaaggccagcataagcttatacagcaagaccctgtctcagaaaattaaaatcttaatcagaaacaagataattatttaaagataatttgagagtatgtctatatttcaacccttttatatgaaattagatttatattctacaaatctaacatcatgtggctaaaattaacattatctgtccttctctacatgttaattttatttttgtttttctgttgattaggtagacgagcttttagaaaaatacatggactcttatgatattgttttagtaaaagaagaatcattggaggttgtcaactcaattttacagaagacattataaacaagccatcgtgagaagacttcccccaggggtacacctgggtcaggcactgtccattttgaggaaagactctttcttatttataaaacagtcttgctcctggaacttttcccttttcccaacagacgatcttcagacgtgtggaacctgtgaaccacggcccctcttcccacctccgtcactatactcagcagaatttttaagtcattaaaaattatcttaaagccaaaattagaaagatggctcccttttccaaagtgagttttgtagtttggtgttctgcagtttctagggcattctcccaggtgggtgtataagggcgcagaagacgctctctggatgtattatgttcctgattttaaccactgctagctttgaaattggggtggagtatggagacatcatcttctgaaattgttttatttgtttattttgtctataaaatacatttgccaggaagttgtgtcttaaaaactgttggtgtccgcatcgctaacattgcaaatactctgtgtgaagcactgagaataaaccagaaaaagaaagcttttctaaaattctgttgtccagatcatattcagcctgtcacggtggtgacgtatgtctttaatcatagcacacaagagaaaaatgcaggggagtcaagaatttaaggtcagcctcaagtcagaccagcctgggctacatgggaccgaggagcaaaagcaaaaaccaagtagtgtgtatttttacatttatcctacttttttcttaaatttattttattatgtgtaagtacactgtcactgtcttcagacactccagaa

SEQ ID NO: 31299 - DNA, 1235 bp, Mus musculus
cgacagaggaaaggattttgctacgtttataaagtcatcatgatacaagccatgtgcattctcctctacccagctctgtaacaatcattctgaaagaagcagactttatttccagacgttttctgtcatattttaacgactgaccttaaccatactttttctagacataatctcagcttccattaggcttgagactgatggtcaggactctgtgaacagcccttatcccaaccacatccctggccctgctctggacatgggtggattgtctccagaggctgagcagggccctgagctagtaacagcactctgcaggggcagggtggcctcacctgcagacggagcagctgatggagcctcgcagccatctccctcccgccacactcttcaaggaccaatcatggggcaggtgctcatttcctggctggggcagagcaggtgaaagcaagagacttcagcggagcaggcagcctgcaagtccaataaaggccttatttttcttgtataaactgtcttacatttatttgtaactgttgtaagagtggacctagttctccactcagctgtcttgctagcctcctgactgacttcagtgaactaagaagccacagggctcaggcacacatgtgcgtatttattgtgtagctgatgtgggagaggcttttatatttgctttctgcttttaattcatctggacagttggttgttctgcttttctgttaatcgtttgtgaccctcccgattatataacagtctctgcagccaacttctgaactgtttttatcacagtgttatttattgctgtttttcaataaagtccccagcatttcaaataaataaataaataaataaataaataaataaggctgctatgaacatagtggagcatgtgtccttattacaagttggaacatcttctggatatatgcccaggtatggtattgctggatcctccagtagtactatgtccaattttctgaggaactgccagactgacttccagagtggttgtaccagcttgcaatcccacgaacaatggaggagtgttcctctttctccacatcctcgccagcatctgctggtccctgaatttttgactttagccattctgactggtgtgagatggaatcttagggttgttttgatttgcatttccatgatgattaatgatgttgaacattgttttaggtgcttctcagccttttggtattcctcagttgagaattctttgttta

SEQ ID NO: 31300 - DNA, 1207 bp, Mus musculus
cagcatacctacaatccaaaactattaaatggaaacaagcatctcatccaatttaacttgttgaacagtctaagtagtttggtgaaatcacatgccatcttattctgtttcacccaagatataaaccatcttttagtttttccacactgacaggggcgtatcacagtgcctgtgttcaagtacccctgatttagttattgttccatggtatattagtagtgatatgggaagttttaatacacttaatattttcttgaagtaaaaatttcaatgtttataaaaaagtgtgtactcataggaaaacataacctacagtttcaagctattgacatttctggcatctactgagacctgtaaacagggtgccttatagatggagggtacaatatccccaacctggcttcaaggtgattgatgcatgaatgcaatggaaataatagatttttatgttaatatagtcccactgtaatgtttattgtaggattttgtatgtcaagtgtagtctcccctcccccagcctgaaacctgcttgctcaggggtggagcttcctgctcattcgttctgccatgcccactgctggaacctggggagccacacacgtgcacctttctactggaccagagattattcggcgggaatcgggttccctcccccttccttcataactagtgtcgcaacaataaaatttgagctttgatcagaataactgtcttggctacatttctttctctcgctacctagcccctcttctcttccaggtttccaaaatgcctttccaggctagaacccaggttgtggtctgctggccggacacaacagtcaagggctgtcaagaaagtatgttcaatgaaagatattcattctttaaaaagaaaatactagtgttcatgggaatagatagtccatttttctttttctttttagtctttcaaacgagaagttacagataccagtgaaaggttttaaaaatattagaataacattttgctgtcctgatcctgaacatttgaatcaaaagtaggaagaaaggcccaacaacaacaacagtaacaaaatgacaggaatcaatatacacttttcattgttaactcctaatattaatagtctcaattccccaataaaaagacagactgaccaattggattagaaaacaggatcgtctttttttcccatccaggaaacaccctaccaccaaggagtgacatc

SEQ ID NO: 31301 - DNA, 1175 bp, Mus musculus
tctttccactgagtctcaaggttttctgcgtacgcagtggcatctaatgtagaccgaatctctaacttggaagcaatgtggggcttgcaatccaatgcaattcactgctatgaaaaagctaagtcataaattgggaataaactaaaatatatatatatatatatatatatatatatgaaacactggccctaatgggaataattacagattgtaagatgatttttctaaaagaaaaggttggattggcctatgcttctaagactaaagttactggaggactggaggtataaatataaatattggatacatagtgccatttattgagcgtcaagcctttctaagcttttagtttccacaattcgttttgttctttttctcccttagatatgaagcatcgacaaatgaattggttaatgaagagttgggaatagcatatccaatcattgatgggatccctaatatgataccacaggcagcaaggaccacacgtcaaaatgagaagcaagaagaagctgagcaaccctagaccctgattgttaaaagcataattactgagttctcttaattctgtacacctttaacacagggagggagagttggggtggaacagtaattctgcctcggcctgcttgactgttcttcccctgccctctttagcaggactattctgatctgcttttctggaggagaatgtcccacagggctgcaccagcacagaccacagacaggctttgactttacagtgtgcttttgccaaccaccatagcaatgtgtgtgttctcccacctttggaaccagaaaggtctaaaactctttaagtgtagttagtacaaccatagccgggacagcacgtggattaataagagatctgcagcaacatctgtgaaaactacatataaacccatttgatttataacaagatctgtttgtcttatttctctcaggcttaggaccaggaagcaggctatggaagctttttcatgcatgttatagccttgttttttgaagatttcacttacaaccactgtcagaggaagcatttcagtcatcagctgaggcttgcttcaaatcccattcatttgaaagctggtgatttcaagtattgtttagtttcaaggtcaacggtaagcttaagtgctaagaaaattctgacattgtaaacttgccttcagcac

SEQ ID NO: 31302 - DNA, 1118 bp, Mus musculus
gcaaaaagacaactaacatacccgttggaccaaaagccacctgattgattagtgcctgacacagaacccactgtaaaccctaaaagaagaagacgacaggacagaaaccttcacaagccccctttgttgcaaagacccccaattagagcatgagcgatagaaatcatgtcatcagcattctgtgacagcgtgtcccttaaaggtgtgaaatctgaatccttcatctctaggctccttctagtgtgcatgtttcttggtgcttgtctataggtgtaaattgaataactagaaaagccacactcattacatgaactcttagctgagcacatgtgagtgttaaaggtgacaggcacacatttttgtatatagtatctaaactagggtatcatctctatcaacacagaaacagttgtgtgatgtctgtcttgaccatcagctagcagatctagatatcctgtgagaatacatgttagcattttccatgggcatgcgtgagaggcagcctcccaaacccgaatgaagggcaggtcagtgtgcactgcagagctcaggaaggcacaattgacacctcctccctctgtgtgtcttgtggtcaatgtaattaatggctaagcattaggaattctgagacatttactcagatacatattattaaaacagatacctccttactgttttcagaatagcttattactatataaaacagagtagctgtaatgccagaaagatctatccatagcccttcaaaaatttatttcacattttggtaaactattataaatttgaaattaatacattccttatttttcatccagtttgaggtgataaaataaattctaagctgaatttatacatgtaagaagcaaaatattttaaataagacaattattatctgggtaatttttaaaattatttttaagggcattaattttgactcacatgcgttagaaatcctgtcataaatttcagagtttggttgtcgtttgtggtacaagtaggctagatttcctaagcatgttttattgtgtaagggaaattaatatatgtttcctgaaggaagcacctggggccgtcttgtaaacctgcatcaatgtggaacttgtacggccatgattttg

SEQ ID NO: 31303 - DNA, 1245 bp, Mus musculus
ccagaaatagactcacatccctatggacacttgatttttgtcaaagaagcccaaacaatgcagtgtaaaaaaaaaaaaaaaaaaaaaaagaaagaaagaaagaaagaaagaaagaaagaaaacatcttcaacaattgttattggtatattggtatatttgaatgtctgcatgaagaagaatgctaatagatccatttttttcatcctgaaaaaaatgcaaatccatgtgggtcaaagccctcaatgtaaaatctgacacaccaaatctcatagaagagaaagtgaacaactgccttgaacacattggtagagtagacaaattccttaacagaataccaattactctgacagatagagcaacaaatactaaaaagaaccttatggtactcaaaagcttttgtaaggctaagtactccattaataagataaaacagtagcctatagaataatacatgaataatgtatctgacaaaaaatgaaagaactcaagaattttggtgccttttccgagtaaccgccaagatggccgaagtggagcagaagaagaagcgcaccttccgcaagttcacctaccttggcgtagacctcgaccaactgctcgacatgccctatgagcaactgatgcagctgtacagcgcccgccagaggaggcgcctgaaccgtggtcttcggcggaagcagcactcactgctcaagcgcttgagaaagaccaagaaggaggcgccacccatggagaagcccgaggtggtgaagacacacctgagggacatgatcatcctgccggagatggtgggtagcatggtgggcgtgtacaacggcaagaccttcaaccaggtggagatcaaaccagagatgattggccactacctgggcgagttctccatcacctacaaacccgtgaagcacggccggccagggatcggtgccacccactcctcccgattcatccccctcaagtagccgaggccaataaagactggttttggtccctggggggggggggggggaagaagtttggtgccaagaagtcaaataactgaattaaaaagttgggtagagagagtcaatgctggtaattctcaacagaggaatctctaatggctgagaaacacttaaagaaatgttcaacatctacactgatcaatgaaattcaaatcaaactaactctgagattccatcttatacacttcagaatggatatgatcaaaattgcaaggtatagcacacactggtgagtctgtggat

SEQ ID NO: 31304 - DNA, 1198 bp, Mus musculus
aatgacactgaaaaactaagtttggttttgggaccaggtatcctctgagtctctcttgtattttgttaatagaatctggggcctgtgagtctgtgcatgtgaggcgctctctcactacatatgatggccacccagactactaatatattcagcttcttatattagataaggcctcactatagtcctcagtttggatttccttttttttacaaaacaggtagatttgtcaagatttaggagctgaagttttaaaatcaaatattgaccgaataagtgttataaaataaacattctgcatgctattaacttctgtttactagactctggtaaagaaccagaaatattttattagcttagtagcttcattaagttgtatactgaaaggaatgtattatgaaaggaagttgtgtagagactctttgagattttcaaagtgtccttctgtcaattgtgaagcctttcctttttagtgttatctttgggcaagtctttatacttgccacttccgtctcaaaataaaagtccttggcaatatttctatatcctgtgctttttttttttaaagctcagaacataatctaatatgcccagaatttgagacactctacctctctgctttttaacctttgatttggttaaatttataatggtgaaatgttaagttaaatttcaaataaatatttatgctgttcctgttagcagtggtacagaccacagtgatacagtgtagagggcacagcttacagaaaacactagaaaccagagttgttaaaaggcaggctcttttcttctaaggaaggaaatgacacctgtttaccccaaggctggagtagcatgttgtctaacaacctggtgatctttcactgttctctggaggccagctttcatccaaatccctcaagcaatcctctcagtctctagaacccatctttatgaatccttcctcccgtgaacacggtttatcagttaatagaactcattctttaggtgaaggtcataggtagagctgcactttgcaagggaattttgatgtagccatgcctaaagctttgtcatgatggttgttatgttgaaactttcctctaaagttttactgtgtttaaatctgaaagaaaataaaccgattggtaagtcttaagaagttttgatccagaacctgctaaatttatgctgacctgaggtttttttttaacctcac

SEQ ID NO: 31305 - DNA, 1136 bp, Mus musculus
ccacgagaggcgggtggtggggtgacaggaggcgggtggtggggtgacaggaggcgggtggtggggtgacaggaggcgggtggtggggtgacaggaggcaggtggtggggtgacaggaggcgggtggtggggtgacaggaggcgggtggtggggtgacaagaggcaggtggtggggtgacaagaggcaggtggtggggtgacaggaggcaggtggtggggtgacaggaggcaggtggtggggtgacaggaggcaggtggtggggtgacaggaggcaggtggtggggtgacaggaggcaggtggtggggtgacaggaggcaggtggtggggtgtgtgctgacaagagacatcccgaggcaatcagggctgcaccatttggtctgtctaccaaatgatggcaaccatgttcagtcttgttgacaaaggtgacacttgctttaggtcggaactcagtttatccgtggcatctctggaggagaaagaaaaaggacaagcatagggatggagctgatcactgacccttccatcctcttcctggatgagcccacgactggtttggactcaagcacagcgaatgctgtccttttgctcctgaaaaggtaaatgctacaagacattttcatttatttactatcaggtcacttacatgtggcactatggattctttgtgcaggagtaaacaacagaattttttcctcctttgttaaagggaaagaagaatggttaataagaatatacagaatgatggctgtggtggggcgaggttgctgttctaaatagcatagggtcatggaagatcttgggtgtggacaagggacctgggcatgagagtgagacctggttgtagctggtgacagtaactggctagagaagacagctattggccccaagactgaacatgcctaatatgtcggaacatcaaatagatacaagaacccagttaccttagggttgtacctaggcatacagttacaacaaaacaccgtagactaggtagcttaacaacagaaatcttcacttctgtgaaaacataccacctgtggtctgagagatgtgcagacattgcttctgaagtggagcccaggagtcttccctagggaccctcagagcatgtggtcattccgatgtccctagtc

SEQ ID NO: 31306 - DNA, 1193 bp, Mus musculus
ccactcacaaacacctatgcggacaaattcagtccgtgtccagaacggaagctgattactatcttgtaccttccccggttggatggtgggcttgcaatacaggacttactccctgtgtatcaactaaggtttttaattcatctcatgatttttgtgtcatgatccagctgttaccccgtgtatattatcaccctgcatccagtttagaagaaagctatgcgggcttttttttcaaaaagagaaccaattactttaaccctggctgcattcatgggaataggtatggcagtaggagtggggacgggagtgtcagctttgatagaaggaagacagggaattcagtctttgagggatgctgtcaatgaagacctagcggcaatagagaagtccatagacgctttagaaaaatctttgacctccctgtctgaggtagttttacagaacaggagaggtcttgatttgttgttcctaaaggaaggaggactgtgtgctgcccttaaagaagagtgctgcttctatgcagatcatacaggaatagttagagactctatgcagaaactgagagaaagattagagcgaaggaaacggggacgggatgctcaacgggggtggtttgagtcgtggtttgaatcacgaccatcttggttaacttctttaatttccgctgtagccggaccaatccttatgatatgcttagctttagttttcggcccttgtataataaatagaggaatggctttcatccagagtaaaattgatacagtaaaactcatggttcttcaaaggcaatatcaacctatagttcaggtagatgaagagttaagggacaccgacctctaaaattctatgattagaattagtctaaacagaagaagaggggaatgaaaggaaataaaactgtaattcatgtaatgtatgttaaatagccccaagagttgtttctgagctttgaaacctggggctgagaacatagcagaacagaccaggacatgcccgggcaagcccatcgcctccctagctcccacccctctgacctaagttaaatgttacaggctgctgatgtttaaatggaccaatcatgtgaaaccgcgccaattcctcccccagccccactccttttctataaaaccccctagcttccaagcctcgtggtcgaatccactgtctcctgttgtgtgagatacgtttcgacc

SEQ ID NO: 31307 - DNA, 1099 bp, Mus musculus
ataagatgcctgaaacgtgtgcactacagaaaggtgaaatgcaatctgagtgtttctagggccagactttggaatgtttcctttaaaatccaaataaagtgatttaaatggcaaactctgttaaccagaggtcttctccaggggtcaagaattgctagggcaggaagcaatgtttaactctccgtcacttgcctacaattcttggtttcctcatagtcctcaatcttcattttagtcttctggtttttctgtttgtttgttgttttgtttgtagaatttccccctccctccaaggcctcttccaccaaagttctgattttccccagagtggtaaggtacttattgtaaggatgtcgaggctcactagatgttttcttcagtggggaatcacctgcttaatattcccagctgtagtgatagcaagagctacagaacttttgaagaactgcccaccattttccagagcagccccgccattttgtgctcttatagaaggactccatcctaatctggtcactttggtgtgtatgaactgggagagggagattttgttttcatttgtttggaaaagcatcctgctgtgggaacatatttttaaaagcttatgtatcttgtcagcaggagtcagttggccaaagttgataaccctgctgtctggaagaagcctatgatttctagtgaagggggttacaaagttaagtttgaagagtagaaaggagaactatcagttctggtagacaagtagccatgtcagaggaagcaggcctagatggttatagagattgtttctgtagagggccccacttccaggtaggaagcacgactgggttcactcagtgatttgaagctgatttatttaaaattgccttttcagtgcttctaaaacacaaaacagcatctttctaacttatggaactactttggacaatattaacatgttttattttaagatgcaaggcgtggtgattattaggtgagggccatttttaactaacccaaaagtaatggattttgtttcgaggtttcattcagttcccacatccttggctcacaggggagggtcgttttaattggttgcatttgttacttgatttcttct

SEQ ID NO: 31308 - DNA, 1235 bp, Mus musculus
aagtacaaatttaaaatctttactatagagtttatcaagcctcagttccttacatataagtgaacctaacaagtcctgctcatttcacctgctcttttcctttaaaactttttgcctcctcacacattcctgcacttaaaaaaagggtcacctggaaccagagttacctgtggttgtgagctttggatggtgaatgctgggaatagaactcaggtcctctgaaagagcagcaattgctcttcctaaactactgagctaactctctagccctacatcacctcgcttttacatactcttaaaatctccaatggcaaccactcatttaagcagtgcggacccattccctaaagctgtagtcttacattcctttattctttcccacttaaggaatgttcttagaaaatgctgacggtcatcaggtgagtgtaatacctagaacagacccgtgagatgggattttatgagtaagttttagaggacagccctcaaactcagttaccgagtcacccaatgcttgttccttgctagagtgggggcgtgtttacctttggtgctggctcctgtgggcagcttggacatgactcggtgaatgatgaagttaatccgagaagagtcctggagctgatgggcagtgaagtaactcagattgcttgtggcaggtgagtgaccccaagagctttctcgtggtagtgatggtaaagagctgcagagtggatcgggcggtgggaaagcctgtgggctcactgagccactgccatttaaagaaatatttttgttgtttgttttctccccacctctttaagatagtactggtcagtgtgccctattctggccttaaactcggtatgtagtgggggcttcctccttttacctcctgagtgaagggactgcaggcacgtgccaccgtgcacagctttgctttaggaagtctcaactgcacggtcacctgtgtagggaaagtcagactgaagtagatagggaaaggaagggatttaggtaaacagacgagcaggaggataatggacctcttatagaaaagagagggaagaaatgaaaaagcaatgtgacaggtgcttatttgggtctgttctgtttttctttcatcccaaagggagcatgtggcagcttgttaatctcttttcacagattttcacttgatctgtaggcacatgcatgacctttgtcacagcaatacaacattgtaatctatgtttgggctggtgagatagttcagt

SEQ ID NO: 31309 - DNA, 1117 bp, Mus musculus
gatctctttcctagccatttactttgtttatcccttgcttcttatggcaatcctgggtgctcacagggtagacccttccacagactctgcagaatttaggtaataggagtaagtctttatttccactcatccttggtttctttctgaaatgatcaatagaataggcagacatgattggacatgtattaacttctgtactttgggagtaacagctcacttttttctgtttgtttaaaatggtggtgagagagtgcccaagctttttatgattttgacacacccacacatttatatatacatgtatgtatgtatgtatgtatgtatgtatgtatgtaacttgtaggataatagtttttgtccatttggaggcaaaatattgtcctctaatcaggtatgcactgatgacccagtagagtctggctaggaagatgtcttgttacagaaacttatataagcactgatttgtaattcttaaagactcctttctccatttgtcttgaatagtggtgttgttcagatactgtcttctgcagcttgttggaatggaagctttctggaaaaaaagtaagtgtcatagacgcttcagaagccgcgtgatataaatacttagcaaggctatgaaagacttctccatagtccttggtttcagttgaaagggaaagctgacatttgcatgaagtttgaaatatccagtaatgatcaattagaggatcccagaacagtggtatttgctcattcctcactggggcagatttgcagagagaagtagtccctcgggagacctagtgtgacccaaagccagaactctaggctgccccaaagtgctgttctcattggtctgtatgggtttatgatttgttcttaaagtcaaaattctccagtggttctctgattctatagtttgctgaggtaatttttcatttctccacaggagtgaagtcatgtagaggtcttagagaggcttcattctggggttccatggattcagtcaggctcagctctgtctaaaaccagaggcagcaaataggatgtctcttttgcccttatctcttctgcagatggcccctcagaaacctcatgcagcagaattaccttgccaggaattaggattttcagg

SEQ ID NO: 31310 - DNA, 1158 bp, Mus musculus
cttctctagatagccaggtaagtcagagtacagcagagacgataactcaggaccttaaggcaaaacaaaacaacacatatacccacacatcccagagagtctcagtggcgactcactgtttttaaggtgagatttgtaattcaggtttgaagatttagctgaattttcaggatgaatctcagtccctgggttatcttgttagaggaaggtaaatatttggctttgtttagttttacgttgcactgtgataatctgcatattcatttacttcacaaacactgaatgtttgctgtgcacccatcatgttgcagactgtaggagataactagtttctatccttcgttctgtgagttgaaaatgtacacagatatgtaacagatcatagtacatgttatgtgcttccatggaagtaggagagaagcagcacacttgtaagacacttaagagtgtaaatgttggggcatattttaggctagtgagtatgtgagtcagaatggtcagggttaatagaggatagagacttgagaatttgtgagtggatcagggtatgataggtgtaggagttctagagtgaagactgtcagggcttggatcaaaagataactagcctcagtttagagagatagctttaatgaccttatagaaatacacactggcattgagacctgagaggaggccattgagctggctcagataaagaatggcaagggccagggtggaagttgtagacgtatcaagttgaatatgtgaatggcaccatcagtaggtgtctgattaaatatgagcaaggctggaattgggaaccttgccacagtttctaatttggatagctgtataataggtaacagactataaataaaggtggttcattgagggaagttccgttttgaatctgttactttggctggctggctggctgataatacgcaggcagttacttaaagcaggaatttgacatgagtctcaggaaagaagcctcattagaaatctttggttctgcctgccagcctcaattgacagtgagtttgaagtcacttaaagtgggaaattgatagaaatgttaaaagaataaggaaaatatactttcttaggaggacttgtataattcaattgcaaggcaagccattgtgatgagaattagagcattgttgccacccg

SEQ ID NO: 31311 - DNA, 1152 bp, Mus musculus
tttgcagaatactgaagactgtgaacatgttaacattgaaaatattgagcagtggtttgactctcggagtagtggctcaaactgtcaggtgttagctgacattgtaggtgctgcagaccgggcgaaggtcactgagcaaaaaccttctaggaaaactaggaaagcagaactgaatccagagaagcatattagtcataaagctgcacttgaatggactgaaaacttgctggattatctagaacaacaagatgacatgctactctctgataagctggtattgcggaggcttcggaccattataagaagaaaacagagaatacaaaataaaagtcatctataatactcccttctgttgctatgtattttcatctttgtgacttctatctgcagtggaatttatctaaagccaaataaatgttacagatgattaggattagatgatgttttggattacttaaattacacctctttaatgttggctctgattgagcaatgacatggaattcatttgtcagtgtctaaactgttttatactaattagatcatagtatactggaggctgagatatgttgtgtactgaatttcaacatgtctagtgatgggcaatgcacactgtaggctctcaataaatcttgctcaaattgaattttgatgactttttctgaatatcagtttgtaaagtaaaaaatattggagatgagttcacatttccatgggtgagactcttaagagggttcagcgaagattgttcttgaaggattttgctgtgactctgttgaactagataacagtggtgtaaacccttggagacaacattgctttctggcaaaatttgggcagcaagctattgagattgaccactggtgattacaatgaaggaaaaggtcaatttaaaacatcccaagagaaaggcatggggtgtcagccttattctacctgacagaagttctttaattgtgtggaaggtaaaccagccttttttcacaaattttaatttcctaaagaattagtgtttagaaaaattaaaaggtaagtgttattacctgtcatgtttattctttaaaagggtgtcagcatttttaaaaacctcataggtatttatgtaacactaaagtacaccattgttttcatggggtgtgttttttgtgaagt

SEQ ID NO: 31312 - DNA, 1180 bp, Mus musculus
agctatcagggccaaaaaatatttgagtacataggtcataggcactaagacaaaacctatgattaccattgtggtaaattgacctgatattaaatagactatcaaagagtctgttatacctgctgactgatatatttttcaaaccctatcagtgaagtttcttcttgaagtagacaatgcttaacatagagacacataactggtcaagacataaagaataagattctggatttctcatccttaaatgaaatatctccgtcacaccttctcatctcaaggctcaatcatcattttgaaattagatgaaaattgtctttgaaccagaaacaggcagtgtagacagaaggcatcttttctggcaggacagttgaaagattttagttcacttatttcatttgtaattttaattgattctttctctctactgctttggtgtgctgttctttaattttataccaaggatgtcaagttgattattatgttattaatatgggactttagatatatatttttttaaatctagtctatggccataccaccctgaacatgcccgatctcgtcagatctcggaagctaagcagggttgggtctggttagtacttggattggagactgcctgggaaaaccgggtgctgtagaaaaagaaaaagaaaaaaaaaaaaaaaaagcctggtggtggtggtggcacatggcttttatccaaggacttgggaggcagaggcaggtggatttctgacttcaaggccagcctggtctacaaagtgagttccaagacagccaaggctatatagagaaaccctgtcttgaaaaaaggaagcaaaaaaaaaaaaaaaaaaaaaaaaaaaaaaaaaaaaaaaaacaaaacaaaaaacaaaacaaaaaaatgtggttaagagcaccaactgctcttcagaaggtcctgatttcaaatcccagcaaccacagggtggctcacaatgatccatagtgagatctgatgccctcttctggtgcatctaaagacagctacagtgtacttagatataacaataaataaatctttaaaaaaattctaaatcacttagatctataaatttgggttatatatccctttattgtctctaaaatgccggaattgttttcattgtgtccaatagttttcaatatttgtgtttttattttcatacagttcaaagaataa

SEQ ID NO: 31313 - DNA, 1135 bp, Mus musculus
tatgcccacctccctgctaccagtatcttccttccctcgagcctcaagtttctagatgtttaagcatatcctctctcactgagtccagacaaagaagcccactgctacatatgtgctggaggtcacggatacgcatatgtgtgctctttggtctatgttttaaactctgggatcttccatgcataatagtgagttgatgctattcttcctatgggattataatcaccttcccctccttcagtccttcccctaactcttccacaggtatcatggcctcagtccagtagtttgctgtaagtatctggacctgtttcagtcagctgctaaaagatccactcagaagacacccatgctaggcgcctgcctgtaaatacaatatggcagcagcaataatttcagattatggtgcctatgcattgaatggatcccaagttcgacctgtcattgtatggcctttctttcagtctctgctccattttcaaccatgtttttcctttacacaggaacatttctgggtcaaacattttgaagatggattgttaaccccatccatatcctgtgggccctgtgaatctgttggaggtgatctctccaagttccattttcccactgttgggctttttgttttgggagcctctgtcatccaaggactctggtatcatttagagggtctcgctatcacaataccccagaagctgcttattttcattcatctcctgccccttatactcaattattcctccctttcccctccctctcctttttcccaccaagttccctccctgtggggcattgggctatgcacagacagtctggtctccagtctagctgagttctgaacacgagaagggtgatagttcacctacattacatggtaggtgttccctcatgctcctggacctctggatcctgcctaagctacaactcctagcagcccccacaagagaagcatggctaaaagtcaattaggcaatgtgccaagtttctgaccttcaggctaaactccttctgagttacctagcaacaaaaaaggtagcagcatactttaaaaggtgcagttagatccctccttgctctcttattcctcactctcttactctctcacttctctcattcatttgttctcttacctcca

SEQ ID NO: 31314 - DNA, 1163 bp, Mus musculus
aatatgcagaaactaagtttggaggaacacgtcaaaaccaggggaagacactctgtgggtttcagcagttcacgaagtaagaagataacaaggtctttgacggaagattttgaaagggaaaaggagccttcaactaataagaatgtctttataaactgtctaagttctggcagaagtgaaggggacgattctggattcacagaagaacaaagtcgccgttctattaaacagtccaccaagaagctgctccccaagtccttctcatctcactataagttttgtaagtcggttcctcagagccaatccacttcattgatacagcagcctgagttctcgctggcaattgcacaataccaagagcaggaagccgccttagggagaccttccccatcttgctctgtggatgtaacagagcgcgcaggaagttccttacagtcgcctctgctttctgctgacctgaccacagctcagaccccttcagaatttttggccttgactgaagattctttgtctgaggcagatgcctttcctaaaagtggaagcacggcatcacactgtgacaattttggccacaatgatgctacctctcagcccacttccagtcttactgctgtctcaaagacaaagatggaatttgtggggactgcgccctgtgtgatgtctccagggaggtacaggctagaaggtcggtgcagcactgaactgcattcttcaccagagacccctgctggtaaccggagggaagtgtcactacaaagcactgagctctctgttgggaatgggagtgatccagagacccatttaccggcccatcatcaaagaggagagagccccttggcacacgctggtgaaccagcgctgaggacaggctcgcccaggacactgggctcctatgaccagcacaaggcattggctgaacgctttaaaggggtccaccctgtctcggattcaagggtaatcccttcctctggggatcatgtttttaacaaaacgtcttatggatatgaagcgagtgctgccaaaggtatgcagattttcctcgtgcaaaaattatgtacattaatcttcattttatttgaacaattatttttacgccatatcgtgaatgaaaggcacgtttcctttgtatttataatttctgttaaatctttgctttggtttta

SEQ ID NO: 31315 - DNA, 1145 bp, Mus musculus
ttttttccattttttattaggtatttaactcatttacatttccaatgctataccaaaagtcccccatatccacccacccccactcccctgcccacccactccccctttttggccctgtaattcccctgtactggggcatatagagtttgcaagtccaatgggcctctctttccagtgatggccgactaggccatcttttgatatatatgcagctagagtcaagagctccggggtactggttagctcataatgttgttccacctatagggttgcagatccctttagctccttggctactttctctagctcctccattgggagctagagaaaattaattcttaaaaaaaaaaaaaaaaagaaaattaattcttttgtttctaggcaagcctgctcgattattgggaactagacagtgttactgatatcaggcaggtgtgaaggcagtgtgaaaggaaataaaactgtaatttatgtaatgtatgttaaatagcccaaagagttgtttctgagctttgaaacctggggctgagaacatagcagaacagaccaggacatgcccaggcaagcccatcgcctccctagctcccacccctctgacctaagttaaatgttacaggctgctgatgtttaaatggaccaatcatgtgaaaccatgccaattcctcccccagccccactccttttctataaaaacccctagcttccaagcctcgtggtcgaatccactgtctcctgttatgtgagatacgcttcgacccggagctccgccattaaaaaacctcttgttgttacatcaaggtgttgtgttctattcgtgattctttttttttttttttttttttttttcatttttttattaggtatttaactcatttacatttccaatgctataccaaaagtcccccatatccacccacccccactcccctgcccacccactccccctttttggccctggtattcccctgtactggggcatataaagtttgcaagtccaatgggtctctctttccagtgatggccgactaggccattcttcggtgcacgccgaatcgggagctgagtgggggtttccccactgagttctttcaagtgcatattgagaagtcctgtttaattggacagaccatcttagtatttgagag

SEQ ID NO: 31316 - DNA, 1174 bp, Mus musculus
caagtaagagaaaaatcttcaagtatttgcccttacaagagcagccatggcgatacaaacgattcagcatgtgttttcacattatagtcactgaaattgaacatcaaatgtacaaaagcacattatagcaactcaaggcgaacagcaaaagctcactctcaggggctggggagatggctccgtggttaagagcacatgcagctctttgggagtccaactcccagcaccaggatcaggcagtgtggatcaggcaggcccaggggctgctaggaaccccagctccagggggtgttgacacctctgacctctgtgggcactgctttcctgtgatccaccacatcccacacacgtaattaaaacaagaaaataagcaaaaaaggattgtactttcacacaatagtcattcagattgaacaacaactcagctacctagttagctgtgttgcttctaagcagatcatgctgtgtcttaccctcagcttgtttgtaaaaaaatcacaagagtgagctgtcattactgacgcctggtagctacacttataaagctaatatagaaacctccagaatcttcaaagtgggaaggattcagaagatgatgaactaactaactaagggacaaagaatgaagttacccttagagcttacacaatgtggggaccgttcacgttccatggttcagagcttacagcatgacagcattgcttaagcgttccttcgttagtgaatcaacatctctctgctgtgtgttaatgtgctggctgtaataaattaatttactggcagaaatagtcttatctcaaaaaaaggaatatattaaaaaactttttatgctgctataagtctcctttcttttccttcattaaaaatctcagagtgagtatagcatactttccagtggggggaaaaaagccagttcattcttctcaattttccaacccatttttttctaagaaaatttgtatcatctctgtgaggcttggcaaaaacataattatcctattcttttaaataagcagtgataattgcactgggttacctgaatccctgccctaagtaacagggacaaatggttgctcacagcacaaagatcaagtgctgggagcatggggtcagcgtctttacacaacacctaatggaactgtcatttttcaggattcccagtcaaagtcagggt

SEQ ID NO: 31317 - DNA, 1111 bp, Mus musculus
tgcctttactacttaataacaatacctgcagggactactacatctcaatgtttgtgtattagtgtatctttagcaccaaccactgtgactaccctatgagatgcagccaactgggtcagaagctgggcactgtggcacacacctgagaggcaggaggatcaggagtttcacatcatctttggctgcatagtcagtaaaaggctagcctaggttacatgagacaaggagaaacttaataagagctccaacgtgaaacttcaggggatgaaaatgcaatatcatagctgttacaagatacatatgcttgtaaaattttccaaacttcacatcaaaaaggaacaaattttcttttgtgtaatttatatcttgagcaatacatattataaaagcctaaataggaataaaggaatgaacttgaatgcataaaagatgcaatgaaaaatttgcctaaagattcactttcactagtagcttaggaatgactgtggtctttattgctaagacaggtacctactaggtatccttgactggtctggaactcaccatgctaaccaggctgatctgaaacttgtagcaagcctcttgtctctgcctcctaatggaattacttgtggccttttctggctttgttggtttatttcataagcctaggctgatcttgaattttcaatatagtgtaggctggtcttgaactcccaaccctcctacctccttcttctaagtgttggagttataggcatctgccagcacattaagtgtcttagtcattgttccattgctgtgactagacaccataaccatgataacatatgaaagaaagcatttaattcaaggcttgcttacagtttccaaggattagttcattatcatcatgggtaataaggagcatggtgacagtaagacaggtgttagagaagtagctcagaatctatatatctatatctataccgatacctatacctatacctatagagagggggggggagggagggagagagactgaaacagagacacagaaactgagggagacagagagatacagactctggacttggcaagatcctttgaaacctcaaagcccatgtccagtgattccctttcttcaacatga

SEQ ID NO: 31318 - DNA, 1305 bp, Mus musculus
gattttccagttaaatgtttattatctatgaaattctatgatcaagttcctcccacaggtgtactgcgtttcttttccatactggccatagataaacagtttataccatctggctgtataacagccctttaccttagttttcttcttgacttaaatctgaaatgattttatatgcacatttcatcttgaaatatggtactagaaatagctcttcaatcctgtatttagtgtattcatttttttttctagaactttccaaaggtgggggggggagggggagggagggattgagggagagcatgcgaattatctggaaagtattgtaacatagtaaaatgatttttctattatatcattggcctcaaacttaatattttcctgcctcagcctctaattgtgcatgctggggcaggaaattcatgttgaattttgttccttttagaaaagtatttagaaaattgtgtgcatgcatgtctctctctcggtgtgtgtgtgtgtgtgtgtgtgtgtgtgtgtgtgtgtgtgtgtgtatggatatggatagatagatgtgcacacattcgtgtgtatgtatgtgtaccatttgcatgtgcagaggtcagaagaggacattagatagtctggagctgaagttggttgtgagctgcctgatgtgggtgctcatatttaaacctgggtcctctgtaatagcatctgcctttaatggctaacctctctttttagatcttttgttttgacttttgtctttttgatgtgtgttttgttttgtatttttttgaaaccgggtttctctgtgtagccttggctctcctggaactcattctgtagaccaggctgaccttgaactcagagatctgcctgcctctgcctcccaagcgctgggactaaaggcatgtgccacccctgcccgtccttgatgtatgattttgtgttacacaggctagcttcaaacacatgtaaacataaacaagactggccttacatttctgatcctcctgtacttcccaagttctgggattacaggcatgtgttaccataatagtgcatgcctaacttgtttgtctccctccccccaatatgtattattttacttgcttatttacttaaatttgtatggtggcaaaaggacgtctatgcgtctgtgttcatgtgtttaggggacaattttgtgtacttgtttatacttttatgtgtgttttacttcagctcaccaggtgggggcagcaaatactgcccctctgatggaccatcttaccagtcccattcttttagaaggacaactatgtgggttaattgatatttgag

SEQ ID NO: 31319 - DNA, 1099 bp, Mus musculus
ttgggcagttggtgcacatgcagctgctgtctatcctcaggaggcttgcttaggaggcacatttatgtttaaaagggaggtgccatgtacttttgaaatgtcattctagcttattgatagctttaaattctgttttatattattcttaatgtgtgttcagatttgacaggaagttgtggttgaattcagtatttacaaggaaaatgtaatgtttacataatctttctatttaccatcttatgttttatatttaatttatatatttctacgttagctacaacttttttatttttttgtacacagacgtgcagtgtgcttcacaaagtgaagttacaaatggaaaagaagttgcaaggaatcaaaattattctaaaaatgcaactaaaataaaaatgaaacagaaaatttccgtgaaaccacaaaatggctttaacaagaaacgtaagaaaaatgtatttaatcctaagaaagccgtagaggactctgagtacgattcaggttctgatgctgggagctcactggatgaggactatagcagttgtgaagaagtgatggaggacggctataaaggcaaaattcttcatttccttcaagtttcttcaattgctgaactgactttgattcctaagtgttctcagaaaaaggctcagaaaataacagaactccggccctttaataattgggaagctctggtaaggcgtgtgtgtgtgtctgtgtgtgtctgtgtgtctgtgtgtgtgtgtgtctgtgtctgtgtgttttaatttacagtaccgtttatagtcagattgtcttcagcccagggaagcatagatgggtggccttctcctgtgtagagtcaaacattactttcattgtaagccaatagtatttcaaatagtgtcatatgacctaattttgaatgaattaaggggtgattttcctgaaaaaacccaagctgattggctgggaatgctgtcactcatccttttgcatagaaacttggttcatttcactgcagaagaagaaattagagcttacttttgagagggagttgtttgctagccagttctgatctgttactgctgagacaccatgcagaaggcaagaatgtggcaga

SEQ ID NO: 31320 - DNA, 1192 bp, Mus musculus
ggtgttgtattccctgaagctggagttacaactgggacctcaccttgctggtgctgggaattaagcctggaccctttggaagaatagccaatgagtgctcagaattgctgctccatctcttgaatcccttctattttactttttaaagacaagaatgtgtttgcctagtgtgatatcaagctcatgattcttttgttttggcctcctgacagctgggattgaaagtatatataggtcttatgtagcccattctggtcttcactcgttgtatagtagaaaatggccttaaactcttgatccttccgcctctatctcccaagtgctagatttacaagcatgtgccacaggaacttagaacttaccaggcataatgtgttttgtgttcaagtattcacagtgtccttttaaaacaggaaatcttttcttattcttttttgacttaaaacctttcaattgctttaaagtgttcatatctgaactcatcagaatggtccttctgtcctttcccacttgttgaaataatcttgtgttcttctaagctgtgacattttgatcttatggttaaaagttctttattacatctgaaaagactttctaggttttagcattctgcttatggtacaggtctgtgaaattccatcctttctttttagcaattagaatgtctttgctaataacagtataccatgtaaaggagagactgttcctatatagcagatacttttaccagttagacagtcatattcactagagtacaaaacaaaactccctaatttatataataaagttggctaaagaaagaaatagcaatttacagaagtggtatcacttcactgaaaaaatactacttgttttgagctttaaaaaatatttttctttgtgcatgcattcatgtctgtgtgtttttatgtaattgtgtatgggtgcttgcagaggtcagaagagtacttgggagctagagctataggtgattgtaacttaacctgatgtgggtgttgagaaccaaacttgggacctatgcaaaagcagtaagtactcttagctcagagccatctcacctgctcttggcttcaggttttaaggtacttgagaggatctgttaacactgaaaacaaagcagaaactttggattttctccagcttcataatataaatgttatggattcagaaatggatttaatgaattgttgag

SEQ ID NO: 31321 - DNA, 1151 bp, Mus musculus
gcacacatacattactctagaactaaacaaagccattattaagcaacctggcagaagaacaaattatgtttgtgggtttagttctaaaacttgtaatttctttaacatgctaaaagtctagtcaatataatctatttttctagactaaatatcactttaataatacattattgtatttaatctgatcatttatagaattcaataaaaattttgatatgacccaatataaaaatgttttatgtaatttgtactgctaaaagaagtaaacaacaaacattgagtaaatatttatgagatttaaaaaatttttatggattgtgttttagatttactttttaaaaatgtacatagctttttaagagtcaggctaaaaggtaaggctcatctagatagttttggattttttttttgtatgtatggtcattataatccaagtgtcagaaattagaatagaaaattaataaaacaagtataaatctgtgatatttgttgtttcttcatcagtttgtcactcaagccctatcagaaggttgggttgaactggctggcgttggtgcataagcatggacttaatggcattctggcagacgaaatggtaggtgtgcaccattgatagaatttgtaattcaacatggcataaagagatatactgctatttaagacattaaggcatcttcccttgctggtgttttgctttcttgtgtttttttttgttgttctttggttggctggtttgttttgtggagttaccaaagccgggacatgttaggcaagcatcctgccacccagccacatcattggacattggagtttcactgaacccattacagtagctcacactttcttttacctttctttatgtttattgctttagttttagccctagtcctccacaactgaaagaagtttatctttctggttatgattatatatcaatgtaaatattacaaaagtatcagcaaaatcatttcagtgtttgagttaatttttcctccaaattacatttactttaggctaagctcaggaagcttgttgcagccattagtccagggattgtcatatatgaacttcactgttagtctgatgtgacctcaccctttcttcaactctacttgtaaaaagtatttattgagcatgagttaaatgctgcc

SEQ ID NO: 31322 - DNA, 2204 bp, Mus musculus
ccacattactaaaaacatcaatgggcctgtgaaggagagcgcggaattcctgattgatgaggacatatcaacttggtgcattcaaggacattcacatcacggtgaccatggggtttctgagcatttgtaattttttataatttcatgttgcatttcacatagtatggacaactttttgccactaactggattctccagatcctcacatcctgaaaatgttgactaatcatttttcaaagcagttttctgaatggggttagttggtgattgtttgtaacaaatatgctaatgctttagaaatgtcagtatttttgtaattatttctacctccagatatatatacatatatatatatatatatagtgtctttcactggataatgtgtgtagatttacatgtgccttatttgacaatgtttatgtcttgttttgcttgtctgatttgaagtttttattatgttaaagaatgcagctgtataggttgttcagtcttcattttattgctatttgatgcagatgttcaccaatgtcagtaagaactcagcctgaatcacaaggtggcattccatccactaatgtccccaggtcctcttcttcctcctgttagaacacatttgtttggctaagcactaagttgttttccagtgagtaggaactgaagcctttctcctgctctggggggtcagttccttctttcattttcttattgcacctctggctcattaactctgccttcgcttgtgtgtgttgctatcagcttcctctcccgcttttgcttctcttaaccattgcccagtcacttctgctccagttttctcttacacatttccttctgctgaatcaccaagatcagcagatgttggtggcatatttctagtccagcagaacagattaacttaaagatactttcacttcaaaggaaactggatgtgacttcataccaaggtaatgctagatactgcatgaaaataggtcattaactttaaattcttaacaaaatataatttaccagttcccaggatttccaatacagaaccacctgaagagaagccattgttcaattccagttcagtgtgggtgacaaagtgaaatttagaagtaaaattgtctatttggtatttcagtctttattaacttttcatttaaattttgcctgtcagtctatattgctgtttttattatacatcagattctttgtataacttgtgagttttatgtgctttgttttataatgtaaatatcattataaataaacttatttataaatgagagatttgttaattattgtagctcatacttttcaagacacccccagtgctgaggtgctaggtaaacacttagatgggtgacacaatcctacagtgctatttttttttcaggtatctgagactctgaactcctgactcagtagatttaatattgaagatatatgactgtatcaaatttatctccccactacggggctgccaggaatttgcaggtgttaatgctacctccttgtgatcacagtacccaggtcgcttagtcaagttgttggaaattgtaccttttaaacccacagtgaatttcccttaacttttctgtgtgaaatgtgtctcccacagtaggctcattggttgtggtgttgttatatctgaattttttctaatgaaatgtagttggattctccctgtaatattttattatgtcttgggtttaataaaaatatttgtgatcattaagttgtatttcacaccctttgtaatggtttttagccctcgttctccttccccagagaagtatgtaatattgaacagaaacaggaccatcttatgtttaagatattgcttggcaatggatagggatttggtacataaaatgaatcctcaattgtcctttcattgggccagtgtcattaaacatcacagtccattggtaggcttttattttctcctttataaaacaggatttcttggcatagacctagctgtcttggaactctgttgactaggctggtctctgccttccaagtgctgggattaaagatgtccaccacccatcatgaaataggttttatttttttagtataagtcatatatgtgtaataagacaccttatgtgtcttgtcttggacaggtgactcgccgataggagttccaatagagtcaaggtgtgggtggatcagaagattgggtttctatttgtgcagcctgtaaagaagggatc

SEQ ID NO: 31323 - DNA, 1197 bp, Mus musculus
aaccatctaaagcattcacactaacatagatgatacatttatactgttctaatcttcatagccattcttaattgcggcagagttaaatagtacagctgttaaagaaatactaaagaaacatcacattttttcagttatttaaggccttaactactaacaagtgtattacctgtgtttttggtcaaatatcttgctattgcgaggctctggtggattgtaagtccttccacctccaaaacagggattttgccaaatggaagagctgaaacagaagaagtggaggctcaacttcagagcacaacaaaaaacgatgagagctcagaacacaggaacaaaaaattatttaaagtcactgaaattcttaaatacagaatttgtgtgtgtatatgtgtaatgtacatatatatgaattttaaaatatacttactttaaaaaacactatactgtttgatctctatccaagtccctcaaaacatctcttaaaagggacaatttcacattctctggtgcagtctttacatgttgttagctttgaaaagtcagagaactgatttaaaaaatcatgtttatgggtggggcctgtgtagctcagttggtagagtgcctgattgttatgcacaagcccctgcaagtttctgggttggatccccagcacagcaaaaatagggtgtactggttaatgccagtaactttagcacttgtgaggtgaagccagggcgatcatgagttcaagatcatttaaaacttgacactgtgtttggacaatgtgagaactggtctcaattaaaacaaataaacaaacaacaacacaaatgcttcctgggataccacaggctgcattgtctcatgatagactgacttataaatttactactttttaaaagacttatttttatttgtttctgtgttatgattgttttgcctgcaagtatgtaattgcactgcacgtgtgcaagtgcctttggaggccaaaagagggactgagatcctcttggaactggttacaaaagtctgtgagcagctacgtgggtactggaaactgaaccccagccctctgtaagagcagcaacttttcttaaacatctctcccgtgttttaaagcttcatcaatgtcatggtctcaaaacagatcacatgggttactttaaaacatattccaacaattacagagtttgacttacacaggagctaagaaag

SEQ ID NO: 31324 - DNA, 1199 bp, Mus musculus
ccactagatattctcatatgataagatatggcaggttaaactgctggaatggtactcagtttagtctgaagaaaagagtaaatattattgttattattattataattattatataaatgttttcaaaatattcctgtttaaatatttgaggtttatgaatacttttgtgtagattgtagatttcctgtagatatgacattgagaataacagtgctcactagtgatgtgagtgagccctatgctgtaactgatggcttttcaaaaagctattgatagtagttattgtagactgcttttggaatttcattctcagcttctagtccatacatctctttacactggatggtccttacatctctctgtcattgattctactccatcaagaacacacaggagccacatgaagagaaaaatctctacattattaatgagtgggtaataactctgaagtttatgtctccagataatttacacagagtatgtgactgagacctcagccaagagtagggacactatggtgtttcttacattttgatattagatccacttgtggcaagaattaggtctacaatgtggattctggatgcgtttctgaccaatctccttggagactcagtctcaggctacgactggatggatggcggtcagagaagggagagaggtttggtgttgtgtctctcactcttcaggacctccgatagataaaacagcgccttggctatgcctcagaaaagaatgtcaagacagagggaagcacggaggctttgttaagataaggcagggtacataatgtagactgattcgtgggctttcagaaagaggacattcttacgtgcctccatagtggctatgtgtattttaaagttattttgttcaaaggatgagatttgcaaccaggtttaaaggttaattaagcaagttttaaaattatgtaaaacaaaaccaaccaaccagccaaccaaccaaccaactaaccaaataaaaaccaaagcatgagaaaagtgggtttacttgcctggaagagtaatggagaaaaatccttcttaacgaatgtcctgttgtgcctgaagtgtttggtggttttatgaggtactgtggttagctttacggatgatagaggatgccagtactgttaaatgcaaggccacattctgtctctgtgtaaacaagcataattagttgattttaatgtctctgag

SEQ ID NO: 31325 - DNA, 1101 bp, Mus musculus
ttcataactgacaggaagtccagccagctcaaagacatggctctagcaggcttgctttttcctttttttctttttttttttccttctgcttttctaaaaacaggttatattctaaaagctagcccccaaggtctatttccttatttgtccacttactcctcctgctgctgactaccaaggatcagctatctattaaagtccagcaatcaaaagtcggtttggctaccctaattaacatgtctaattaaaattgagtaccttgtcctaacactgatttccccttttccctttttaaacttccatttgcctctgtgctgtctatctcctttctttccagaaatagtcttttgtccccattttgatataaatattcccccacccctgtgttccctccctcttcaaatcttctatctcctgtcactgtctcttatttcctgccctttgccaatctggggaaagtctcttttgtgctgagaacttgaccttgggtgtcctgagctgatatagatcccttcaataaccacccgtaactccagtttcaggggatccaatgccctcttgtgaccttctctgtccctaagcatgcacacagtgtacaagcatacacgtaagccaaacactcacagaagaaacaggatgagtaaatctgattaaagagttaaaagctaaggtctgttttgctcctgcctgttcaacatttctgacaaggagcatccttggctgcattatctctgactgagaatgagggttggagatggagaggcttcctccttcttttacggctttaacacttgtgaataatcaatgacatttatttgtttgtttgtttgttgttgagacggggtctcactatatagttctggatcacttggaaatcaccatgtagaccagaccaattgtcttcaaactcacagagatttgcctgcctctgacagttgagtgctgggattaaaggcgtactacacaaagactatcctaaacttactatagtaattgtaccacttatctatcatctggctatcttctttcttctttcttctttcttcttctcctcctcctccttctttcttcttcttcttctttgtcctgggaatccaacca

SEQ ID NO: 31326 - DNA, 1140 bp, Mus musculus
ttatgggacccagtgttgtataccgacccacggcctacttgaaccgggcacacctgggaggcaggctggggctgaaaaagacttagatggtgggagattcttggagaccaagacacgattctgttcaaggcctgccagtttactaagagagtgtgcttataagggggaaggcccatccctcaccagtccattcttggtgtctggagccagcctgtaggcgacatacaggataggatgttcctccagaatatctcaggggcctctcagcaggtagcagtgtcttcagagagcagtggcagtgacagagcaaaagcgcaatctaggtcagaaggctccacactaggtaatctccttcttagtggcagcaaggtcaaagtctagatcagcctgcttcagtctggagcatgaaaacattgacttcattatgggacccagtttgtagaagactgtctcagtgggacaatagtaagttgttttacttccttcaaacttcaagcaaaaggagatggtctttcggagactaatcttgtgctttggctgcaaaactcatgagatgttaggatgtgatactaagaagaatttcctgtccttgttagatagcaaagatgttgaatgcattatctcagggttcactatcaaattagatagttaaatggagtctttaatggtagatatctgtctggggttgtcttagttgactggtgctgaaaagatcaaggatgtcctctttggagaatgtatgaacaaatgtactgtgacaatggcaggaagatgaagtcttacaaataggtaacaaaacagctttacaggagccataggctgcaggccaaggcatagctcaataaagaaccaagccgaggtacttaatgatttgtgagtgcatgtaatagcaatgagatgggcattgactatgttaatgagcaaaagtaggtcttcatatatgaagaattgtacagtgcacagtaatttcttaccgttatttttgttacaagaatataaataacagtgttatttaatttgtattaaaatatttttgttaattaaaaatgcaataaaacaatggttaattaaaagtagcacatttctgaagaatttcagcatgatgttaaattgtacatttttcttaagctggaatattgt

SEQ ID NO: 31327 - DNA, 1107 bp, Mus musculus
accttaactcaaagattgggaaagaaaaattggaaaatttgtcctttatgcatcatttacagaccttaaatttttcatcctcacagaacaaaaggtattaatagacattagtgatgaagaaaagtctcccctaagacactctgaaatagctttttgtacaaagagcatggcctgtcacatcattgatagcaaatggaacaaaatttgtccttaggcaacttgaagcttcctttaaaggagagtatatggctaagacagatatcttatgtcaataaaaagaatggtaagcacatggttttatagactctgcaaatagccattcaaagtgatgaataaaacattactgggggagctcttttttttttttttttggaaggggcgagttttgatgagaagatcttttgtatctctgactccagaaaccattgcagtagttaactctacctccactgaaggcggttctactttatagcatgtgtgtctctcatatcagttaagagcatgttattaatgccgtgccacccgttcatagattctaggagtgattttcaagaatatggatttttaattgtttttgaatgaccttggtttatagtgctcatctgtatgcatctgtaactctgttggttacctgtttgtcacaagcttgccctaagtttaacagcatgaagaagtaagcatgtatcttttcacatatttttgagggtaaaattcacaagcagcttagtttaagatgataggtttgggacctctggactgtgatgggtttgcaatcaaccaggcggccagagaagtctttcttaattgaagtcactgaagacttctgtgggtctgcaccgtgtgcctccagcctcactcacaaggctgtcagtatggtgatcatttactttatggaaggattgggatgagattaattaatggcaaaagcaaatacatgactggatcagaaagaaatacagaatatagaaccatttgaataatgctaagaaaaatggttgaaagtactagaaagaacagcagctttcttgtttgaaggggttgttctaggttcctggacctgctctctggtggctgagcagctgcctcattcaacctcattactgagca

SEQ ID NO: 31328 - DNA, 1217 bp, Mus musculus
aacacatttgtttatatttagtttgtgtcagaatttgaaacttttctcctttaattttatatgtaatagcaatcagaacaaaatccttaagatatacttacatatttataaatataattcatatgatatgattcatcttcataatttgtataaatttatagaaaatagttttattttatatgagaggtagtctgaatacctttcaatatccagatcaactagaaataaagaaaaattaatactaacttcataggcacatgagcttcagttatttcattatagtatttatttatttatttgcttgtctgtatttaagacaagatctcttatagcctaggctggccttgagtttacattgtatctgagtataacctttaatccccgatcatttttttccattctcaagtgctaacagctatattgtcaatatcacatactaaattaatatatcttaaagtgatatcagaagctaacatgccttagcatttttttaactttattccaggaaggagaaaatattttctacttggcagttgatgatatagaaacagatacagagcttttgattggctacctggacagtgatgtggaggcagaggaggaggagcaacaagctctgaccatgaccaaagaaggcaaagttgaccactctaagggacagttggcagctggaagtaaaggtactgcatcttcgtttggtgatctgaaggaagagacattgaagaggaaggtagcttgaattatttgaattatacttgtgtgttatgatgtggtattgttaaaagagtgtttgtcaaaactattcttttcctctgaataccaggaaaagattgtttggggtaattcctgtagggtggccagggtaaggccactctggttcttgttgtcactgtggtatgatacactgtctgtcccctcctgcactggttctgacagtggccagtaagaaggtcactcaggctctgaagatttcatcccatgtacatgtgaggaggccagatctgtagggtggccctgctgtgtcctagagatctgtcttctgagatcttctgagaagctggacattagggaaatctttctagtctggtcacaggagctggtaggattgttaatttgtccttgtctggggatcaaaaactttaggtgatcatagatgatacctgcagtctaggagagggatgacagttggttgtcaactggtgtgaaataaccattta

SEQ ID NO: 31329 - DNA, 1099 bp, Mus musculus
acccggaagaaggtgggtggagctctgtcagtggtggggaatagggtgcctcacctaccgcatctgcgtagacagcagtgttttcatgctgtgcctctactgtgagatcccctttggcagttcacagtagtctatgtctgttgggttcttctcctggtcaagctcagagtgagctgacgacgatccattttctaggaaaagacttgctttgcaattcagaacttattgttacttctgatctgaagcattaccattcaaaggaaaactgcagattgaatttgattttgtaactactgtgaagcataataaaatgatttaaaaaagtttttctgataacatttttggtttctgtttaatatggacaatgttaatgtttgttagagaagacaaaaaaaatggactgtatcagacacaactagtttattttgaagtgggggccaaagctcgttccttgcttgtgaactcctgtgttgtacattgcacaggtcaccttggctgtgaagaggactttgcctgtccacagtgtgaatcgagctttcccagtgaggaagtccttactgagcaccttcagagcttgcaccagaagcccacaggggagaaagagttcaaatgcgagaactgcgggaagaaattccctgtgaggcaggccttgcagagacagtgcgtatgctcagggtggttcagcttgtgtttgaacagtcagattatttactgtgcttgctatgtatatctgtgtctgtgagcatgcgccaaagcatatgtgggaaagtggcaggtagcctactgtgctatgagctcatcttttccgagaggagcgtgctgagtttcaaatgctctgagcatgaggtttacaggtcaacatcattcctgctaagcccttttggtgcatttcatacttgccattaaatatcatgcttaatggtttaataatggtttatgtatgcataatttagccagtgcttgaggttattcaccaagtttcacttatttgccctctaatttgcttaaaactgtttaactgataaagaattcagtgtattgataatggaaggctgggaagcagcacctgtttcccagtgagttggaagactagtttgaa

SEQ ID NO: 31330 - DNA, 1136 bp, Mus musculus
actgtaaaagaagatgaattttagttctggttgggttttctaacagtgtaggttgccagtataatacattattgtggttgattttatgattttacattatactatgcattaacagttatttagtaaggtatgggctcaaattctacaggaatttagttctggaggaatagtctgactaacgatagcaagaaatcacttgatgaaaggtcaaggaaatagggtaatcaagttatgagttaacatggtcattcttttccctataaaaagaacatttgatttacttaaattttgttctgactttttgtggaaactttctctctagagactattttaacagatggaatagagaaaagtttatttgatatatgtggaaactgatgagctgggaactctcaagtttgaaaagaaagacttgaatataacctcgtagaattctcaattactaccatgaaatggtgtggaagggatcctgggtcaacctcagttaatttgtgatggtctttcatccctgtcctaggtgatcctaagagaaaactcatatgctcggtgtgcaatagaaaatgtacctcagtgtcaagcctgcaggagcacaggaaggtgggtgagagcctgtctgttggctggaaggccttctgtcaccatctgccgcagtcacttggtggatgttataccaagacagggcttagctagtggggacgacatgttccacagtacagaagagtgagctaagagtagtttgagttgtgttgtttcatcattagctaacagattctttaatgccaggtgtcatgtctagctgagtcccacagagcacccaccacattttcaagatttttttcagttggtgtttgctcaggaaacatacatcagtgatatgaaaacagacatttttgtgcggagagcttgccttttttattaacatgagtacatttgtggttcagtttggtacagaatgagagctagaagatgatttttaaaagactagagctgagttgataacaatgagaccgattggcactgggatgtctcagggctcctcttagcttattctactcttgacaggaaagtgcatatcgatagctttgtgtatccctgtgtcattggagaaataaatgatcataatcatagaaaatgta

SEQ ID NO: 31331 - DNA, 2364 bp, Mus musculus
caagatttcctgaccacaccattgttaatgtaattggccatattgcttatgtttaagattagatcttcagactcagtcattgtatgtataggctattttatatattccatcatttttattgtggtcctcctgtcctgtgaagcttcattgtgaacttagtgcattcagaacagagctgtactgaccttgcttgctctgcagttgatagtttacatttgaagcgttaatgcctattgtaaaaggaaaattatatctcaggtagcatatggcccacaataaattttatgtataacgcaagttaatatgttagctgcgaaggttttttatttttttttaacagttcgtatatttactacatacaaataaggcaggaatactgcatgctttcctgtgaggattttctgatgatacattagctatatagtatgtcatggcatttccaatgtacatgaaggaaacttggcccaatactagcaactgtccacatgtttatattttttgcttcatctgtgtataattcattattttccaacacttggtttaactgtcagtttaatctttttttcagattcatgagatatttgattgtcaagaatgtatgaaaaagtttatttctgctaatcagctgaagcgtcacatgattacccactcaggtgaattgcatacttcgtatacagactgaaatcgctgcagaagaattacttcaccttgctgaagaaattgatgagtaatcagaagccctcgctataagttctagcttagtcaaatgatttttaaattcttcattttctagagttgggtttgtttatgaagcaaaggttgtttggctgaggcataggaaaggtcttccagaatcaccatctaattcgggaccttggtttctttattcttgacacgataccctggcactgattattaagttaacttatgtaatacactagcatagtgcctggctattattggagaatcaacttttgtgtttgttatgtttctagatacttgtgcattctatctatggtacccataaaataaagaattatgttaatatttgggggaaatttcttaaggtataagttcacttaaacaattttgagtaataggcttttttttttcttataacgtgtctcttctgaagatgggaagctctgtcacatggcgcctgcctggtgctctctgatagcttctatcactggcagaactctcagcattaaggacttgattgacataaacacacctttatttttcatatagaaatagaatttatgctttgaatttaaactttttttaagttgtttatttattatatgtaagtacactataggtgtcttcagacaccccagaagagggtgtcagatctcattacagatggttgtgagccaccatgtggttgctgggatttgaactcaggacctttggaagagcagtcagtgctcttaaccgctgagccatctcaccagccccaaactttttaatttcaaaggcttaactgataaaatagatctatagaaaataagcatttgcatgttaatttgtgaatgcacacatgtctaacacagatgaattacatggaaggcatttttgtgcttggctgaccgtgctttagttagtttatgcatacgacaaaagtacaggaaaggatggatcccctgacccttggctttcatttctgcatgctattgtctctgctcattcttcctagaaaagcggccttataactgtgagatctgtaacaagtccttcaagaggctcgatcaagtgggcgcccacaaagtgatccacagtgaggacaaaccctaccagtgcaagctctgtggcaagggctttgctcacagaaacgtttacaagaaccacaagaaggtaaagatgcttattggcatctgttatttattgtttcactgctagggttttagttggtccttaaccagatttggcacatctgtggcattcggcatgaagggaccagtgtagttagagatgatcctgcttctactttgttaacactcagtccattgatctctgccttctcttcttgtctccagtctgaaaactactctctcagacaaaatgtccactgtgtgagtgggtcgattaaatagttctcagcttctaaccagctccaagaaccggccgttgtagcggatgatatttgtattctcctctctgtgtatttcaatgctttgctcacatcaccgtctctccgggtttcttgtagtgcactttgctaggtctgtcctttcctccgaatgtgttttaagctatgttagcttcctgtggtctaaatcaatctgcttactgagtggaaaggtttattgggcttggttaaaaggcttgagtccatggtttgtttgtttttttatactcgtg

SEQ ID NO: 31332 - DNA, 1195 bp, Mus musculus
ccttgtcttgaaaaacatcctttcaattttctaaattacagcctcaatttagagctatttggctatatataaaacgtgtgtatcagttgttgtgtagctaacattggttaaataccaatgattctgtttaacatgctttataggctatttctgaaatgcatagatataatccaatttcatttatatgaaacttttattaattgaagctatttaaaaaaacaagttaaagacctttataatgaggagaatggtcataaaacagattgatacaaaatagttttacaaggtctgataattagtgcatttaattggattcatggatttgaaggacatgcagcaacccctgggctccatggtggttttggggtgttggccctgttgggctcgagggcataccctagtatgtgcttcctgtactatggtgctcctcctgcccaactgtgcctgtaccacctttgtagctgtgagccctggtgagaagcagtggctctgaaggtgtcctgctgtgttacatttttctgacatgggcattttctttatttgtaggtgagcgcccctatcaatgcccgtactgtgaaaaaggtttcagtaaaaatgacggactgaagatgcacattcgtactcacaccagggtaagacccatattctgtctcatttctgttggtcaaaaggaagccatatctattctaaaggaaacatatttaatatcacatgagaaaattgctataactgaagttatgtcaatgtctagcttaaaatctgaaggtaaacttttaaaagaaaagtcaatggaaaacaactcaaaccccaaagtgtcctgactttccaattttgagtcaatatgcaaggtgccaaactgccagtatgttagtcctagaaaatgtctcttgtagagaacatggtgagtgtaggtgaatgagttccggggtgtaccacatgcaatgtgtcatttctctctgagctgttacagcatctcactgccttgttctcttctgtatacctgttccacatgcaagtttcaggctcatgtgttttaaaagtgttatgtgccagctgtcctgtgatcacacatgttcccctgcttactgcccagcacaagtgcctacaaccctagaactaagcagggggtggctgcagaagaaggatttcaagtccattggcagctacatagggacctggaggccagcttgacctt

SEQ ID NO: 31333 - DNA, 1217 bp, Mus musculus
agatttgatatgtgtgtctcttgatgccttgggctgctcctaactctgggttgcatactctttgcattcatattctactcatcatggttttctagcagcaaacaaattgtgattttcttcaggatatcttccagtatctgattccatgtgctcattggtatttcttgtgaggttttgaaacagctcatctcaccctgcgcatttgctgcagcgcgctgcacacctagaggagggcatcttccccctcagcagccactcacttttctgtggaggttcagcactcagccaatcagccatctttccatggaggctcagcacacagccaatccgcagtcacctttccatggaggctcagcacacagctactaggtctctgaccttcttggtgctctcttccctttacctgcaggagaagccctaccagtgctcagagtgcagcaaggccttcagccagaagcggggcctcgatgaacacaagaggacacacacaggagaaaagccttttcagtgtgacgtgagttgggaatctccttttcttccctggtattccgtggtaaccagtagggatgtctttgtctgtgtatgcgtttgatttgtgtagcctgctcctaactctgggttgcatactctttgcattcatattctactcatcatggttttctagcagcaaaaaaaaaaaaaaatgtgattttcttcaggatatcttccagtatctgattccatgaagctgttcttccagggtgtaaatttggcagagtttgagacaattcagttagacccaagtctttgacaagttagtgacagttgaatcagtaaaatgattatgaccaaaatataatgcatgtgtgcctgaaattctttttaaaattacaatgtaaaaactatatttaactaatcatagatgttaaatacaaactgagttttcagaatatgcatataaattagtttaaacaaaatgctacttaggacatcttctatctaggatatttgaattgaaacaaaataagttgacattgctgtttacactatttttgaagggaaaaagtactactgtgcttggtaaacttaataagagcattgattgggggaaatggtttcatcaccagtggttattggttatatcagtggatcaacccaaatgttaaagaagacaccagggtgcatgtccttcacacacacacagacacacacacacacacacacacacacacactaaa

SEQ ID NO: 31334 - DNA, 1515 bp, Mus musculus
ttggtgacaagcatcattaagcttctgtcccacctagttcccttcatcatatttaacaaaaccaaaaaccaggttctcccagacttgaaactatcctcgaagctgagaccatgcttcagggatgctcagaccacgggtttgacaggcaggtaatctcaggaccatctctgggccgcttctaggtcacctcatccgaggtcctgcacagtacggaccttgtaggtcaccaggacctggaacaagacgccccaaccactctgcgcttgctcattcggtcagccagcgagggcggagccagggccggatacaagtcgctttgggcggggctttaacccgtggtgcaactgggcatagggcggaagagccgatgtggagcggaatgttgaagagacccggctctctaatgtgggaggggcttagggaacaaaacggaagcctgaggcggccttagggagggattcggagttacaaagccagccggaaactggcgacgtaggtggggcttagggctcattacgcctgcgcaccgagcaaccggcgggctgcgtagttatttttgaaccgggtggcggggaatagcttagaagccattagggcgccgtctgcggtgaggttggtagtgttctccgttcgatctagtgatggcacagcagctcgcccgagagcaaggcatcaccctgcgtgggagcgcagaaatcgtggccgagtttttctgtgagtgctgagcgcagcccccgccgccagagagagctgaggctgagccgggccttaggacgcgcgctaggacggaaccacggatcctcccgggggcggggaacgctgcaccacccagcgcaggcctgggcctcctggaacctaacggggctgacctgggtcatcatcttactcgctctctgaaagctggggtctgtgttgacatcctctgaccacatgctctgtatttacacttagcaaacctgcgaagttggacattgctgggttaaaggttttccgtgtctttttgtgcctactctgctttctgggagacttaaacgttattacacggttacggctttatttctttcgttttcagcatttggcatcaacagcattttgtatcagcgtggcatttatccgtcggaaacctttactagagtgcagaaatatggactcaccttgcttacaactactgaccccgagctcataaagtatctcaataatgtggtggaacagctaaaaggtaatcacgttttcagtgtgtgatcttacaggtttgtgtcccaagtaacttaaagcaacatgccttctcaaatgtcattctcaactgggaggaagcaagcaatggagggaatccccacctctttttaagtaggctgaatgtcttgatgttaggaatctttaagctgctttaagagtgggttttgtaggttaaccagttgcagcaaattggaaattttacccgattaaaaggatttcgccattctgtgttttgctttgtagctcccaatgaaatcatacaaaataccaattctaaaa

SEQ ID NO: 31335 - DNA, 1601 bp, Mus musculus
ccgcaatttattaccaattgtgaagaagtccgtctacgctcatttacaaccacaatccataaagtgaatagtatggtggcctacaaaacccctgtcaatgactgacgagacggtgaggaaaaggatggaattgtcattcccaagtgtgcttttccagaaattaagtcaaatagagttgctacatttccttgtttaattttccggtgaagaaagctaagatccgacattgataaatgtgtgttattgttccatttcttgggttcttcctggacttgtctgagtcgacaagagtgctgcacattgttaaggggaatcaacagattttgttagcattgtggaatgaattcctttaaaaatggtcattgtacatagaaaaacttctgttaaaacgctaactacttcccttaacattgtaactggaccaggatataaagaagcgtttaaatgtaaacacagcagaagggatcaaagcttttttagttctgagggtcagtcaggaatgttgccaatccggatccagtgagagaggcagggaggacagctttactattcaaaagttctgtactttactctcattcccaacttaggttcgtttggtctgctgatttacactgacaaagatttggtggtgcctgaaacgagggaagaatcaggaccccagtttattaccagttctgaagaaatccgtctacactgatttacaaccacaagccacaaagggaatagtattgtggcctacaaaaccccatcaatgaagagacggtacacataccatcccccatcacattataccttctgctgtatttatatttagatgcttctttatatcttggtcaagattcttctgagcaaaatcattagacaaagtatttagctttttaaaagaagtttttctacctacagtgaccattgttaaaggaatccatcccacagtgaatctgttggctcccttaataacgtgtagcactcttgctgattctgtggtaagttcaggaagaacccacgaaatgcagcagtaagacacatttctctttatatagaccccatattgaaatacatgctaattatttgattttgttgtatatatcttgagctcacaaagcagttgatgctgtttaatttctgtaataaagaactcttattttaatgttttataaaaatcaagctttaaaagtcagtgatacaaaaaaattaagccttgtgttttaaatttgtgttacagtatctttgatatttagtttggtgctaatatagtcagatacttcagtggattgagtggatggattgtgttcattttgattatgtgatggggatggttttgtgcactggaaattcagatgctgattgctgtgctcagagatcttgttgtaatctggatattggcagttgcagtccttgttataatagtaggccaggccagcatagccgggtcagaacacatgagaacactgcccagttagcacaagaagcttgtaataaaaataccatgtctgtatcatttatttgggaacaagggtggtacagaaaagcctccaaaattacttttacattttgtagggctttattaaccaatcagacatggtggaaaccaatctttacac

SEQ ID NO: 31336 - DNA, 1135 bp, Mus musculus
agaagctaaaaaccagcaagtaatcttcctgagatgggtccaccatggacggaaaagctatgatggatttgctcctttaggcaaggtcaaggaaattacatttcaggaaagattcctgctattaatatgctttgtgttattattacatatataaccattactaggtatggacctaccctttccagcagatttctgcaaacctaaaaaaatgtgctgtcttgtaataatactatatagaaaaagcaataaagattctatagaacccctgatttgattcaaataattttaagaaaattttagagatggtcatagttgccttgctataaagatgtaataaagtgagaatcaagaatagaatgtgctcttccacaggaggcctacacgctgccgtctgtgccgccgccatgtctctagtgattcctgagaagttccagcacattttacgagtacttaacaccaacatcaatgggcagcagaaaatagccttcgccatcactgccattaagggcgtggggcagagctatgctcatctggtgttgaggaaagcagacatcgacctcaccaagagggctggagaactcacggaggatgaggtggagcgagtgatcaccatcatgcagaacccatgacagtacaagattccagactggttcctgaacagacagaaggatgtgaaggatgggaagtacagccaggttctggccaacagtccagacaacaagctgcgtgaggacctggagcggctgaagaaaattcgagcccatagagggctgtgccacttttggggccttcgtgcccccggtcagcacaccaagaccactggccacaggggccgaactgtgggtgtatccaagaagaaataagtctctgggcctttgctgttaataaatagtttatatacctatggggggtgggggaaagaatagaatgtgctcattccccataagagtaagtaaagactgcataataaacaaatacaatgagttttcatatttacactaaaaagaaaaatagatatcagaaaatttgtgttcaaggaaaaacattttggtacaaggataaagatgcatgtatgcactacaggaaggcaaggccatgaaaaaaaaatgttgcttttaacttataatgtcatatt

SEQ ID NO: 31337 - DNA, 1401 bp, Mus musculus
atcacttaaagaaatacaggagaacactgctaaagagttacaagtccttaaagaaaaacaggaaaacacaatcaaacaggtagaagtccttacagaaaaagaggaaaaaacatacaaacaggtgatggaaattaacaaaaccatactagacctaaaaagggaagtagaaacaataaagaaaactcaaagtgaggcaacactggagatggaaaacctaggaaagaaatctggaaccatagatttgagcatcagcaacagaatacaagagatggaagagagaatctcaggcgcagaagattccatagagaacatcggcacaataatcaaagaaaatggaaaatgcaaaaagatcctaactcaaaatatccaggaaatccaggacacaatgagaagaccaaacctacggataataggagtggatgagaatgaagattttcaactcaaaggaccagcaaacatcttcaacaaaattattgaagaaaacttcccaaatataaagaaagagatacctatgaacatacaagaagcctacagactttctgaccctttccgggcgttcaagatgtcgaagcgaggacgcggtgggtcctccggggcgaaattccggatttccctgggtcttccggtcggagctgtgatcaactgtgcagacaacacaggagctaaaaacttgtatatcatctctgtgaagggaatcaagggacggctgaacagacttcctgctgctggtgttggggacatggtgatggccacagttaagaaaggcaaaccagaactaaggaaaaaggtacatccagcagtggtaattcgacaatgaaagtcatatcgaagaaaagatggggtgtttctttactttgaagataacgcaggggtcatagtaaacaataaaggagagatgaaaggctctgctatcacaggtccagtggcaaaggagtgtgcagacttgtggcccagaattgcatccaacgcaggcagcattgcatgattctccagtgtatttgtaaaatatattcattaaagtctctgctctgaaaaaaaaaaaaagcctacagaactccaaatagactggaccagaaaagaaattcctcccgacacataataatcagaacaacaaatgcactaaataaagatagaatactaaaagcggtaagggaaaaaggtcaagtaacatacaaaggcaagcctatcagaattacaccagatttttcaccagagattatgaaagccagaagagcctggacagatgttatacagacactaagagacacaaattccagcccaggctactatacccagccaaactctcaattaccatagatggagaaaccaaagtattccacgacaaaaccaaattctcacattatctctccacgaatccagcccttcaaaggttaataacag

SEQ ID NO: 31338 - DNA, 1135 bp, Mus musculus
cagggcatggtacagagagaacagtaacaaagccatagctcccacacatgaaagacacaagtccacgactaatcctgaggtgtttatattcacaggcatacatgtccatggcttaatttcctgtcagtaatagtaattttagcacacattaagttaaaaatactaaaatgacgttgtcaaagattttgttaataaggtttagaaatttcagtggcagatttaattttcctgcatattgttttagatacaaatgacattatctcatcatcatcacagctagagagatgttcactggctacggccattttactggttttgcagaggacctgtgtttagttcacctccaacacacacacacatacacacacacacacacacacacacacagcggctcacatcctttctagttcccattttctcctaaaaaaaaaaaaaaaaagaatgcacagattgggggtcacagattgggggtcacagattgggggttgctccgtcttagcaaaggagtgtatgagttgaggctggtttatgtgtggatatgggaatttcctagatttttaggccaagctgggtttcccacactgttttggctgggctgcatgcctttgggaatgtcaggtagagtaggtaggctcacagttttatgctggactcgatgtgagcagttgtttcagatgctcctgtgcctgggcctctgtcatggtgaacactccccttctcccttccgccgcttttgccggggctgtgttacacagcatcatgaacatacactaagtgtgtggagggatggttatagctaagtgggggatccttgtggaggttccaggggctaaaatgacatcattaggtagaggctagtggtctgctaagaaaagtgttcatagtcacaaggattggacacggggatgggctatgagtgggtttctgggggaatgaaactaggtcaaggtggtttcagtctggtctgcaacacttaactctccagggtcaggaagttcaatcagttggccttgcagaattgttaccacacttgcgccttttgtttttccttctgtaacttgtttatgataaagtagatgatgactctgaagcacttcccgtgggctggctgctgtgagtgtgctgcctcagggcg

SEQ ID NO: 31339 - DNA, 1193 bp, Mus musculus
cattttattttacctcacaacatttctttcctgagagacccagagtctgctctacagctgcctaaaggactccgggaccctaccatgtcacctgtagtctgcacctcagtttccatgctgctctgtgagaaggcatcgttatacctggaagctttcccatagactaactatggaattcaaagtggatggaaatgggctttgaaaagcagccaaaaacatttcactaaaaatttcactaagaagcatcattgtttatgaggcttagacaaatatgcttgctgcatatttactaagtgtcataactgagaaaagctacctcagaatttaaaaaactgctggtgtggtggtggcaactttaatcctagtacttggggatgaagaggcagatagatatctgagttcaagaccagtttggtttacatagtgtgttctaggtccacagcacctatatagtaaaactctgtctcaaaaaagaaacacacaaacaagaacaacaacaaaattacaaaagttttgggaatatatttgtagcagtgtatatgtgtgtgtatacatatacatatacacataatatatatattattgatgatcaactataaagaagacagttataagaaaaaagggtaaactaataggcaaatgaacaaagaatgagtattttcattgtaacaattcattgataaataggaaatcttcatttttattaagttagaaaaagcaaaacattaacagtaccatcttatttataaaatattaagatttaagaagtgctggggagatggctcactggttaatagagcttactgctcttgcaaagaatagggctttagtttctagcacccttgtggtggccctctatagcctgtaactccagtttcagtgaattgaacatgctttagtgacccccataggctcctgtgtgcatgtggtatgcaagcacacatgcacacacacaaatcctaaaaactgctgagtaaaatagatcttaggaactatttgttcattattttgttggtagcgtgctaataaaagtttctttagagcagaggggttcacaagtcccacccctaactgatgaaatctgataaaaattgatagcttctaggagagggggaggccatttctttcatggtatgttaacccctggtaggtaaactacacttcagtgaatggtcctataccatgagtctata

SEQ ID NO: 31340 - DNA, 1148 bp, Mus musculus
tcatcttggtaggccatgaggaggctaagatgaggtctctctctctctctttctctctctctcacacacacacacacacacacacacacaccttgcctcacagcacccgagtccactaccgctgcctgataagtgcagctgcacatttgtgattctggggaggcgcctttgtgctgcctcacatagcactggactggatacatgagttctagactccattgcacccttctcagaactttgaatatctgaaatttgattcttaaaagaagtgccagaacacagtgcaggccactgcagagaaaaaacagttcttgggacacctaagaatttcaatacaagccggccatggttatgtgtgcatttaatatgagcattctcagaggcaggcggatctatgcagtgagttctaggactatgtagagaggcctctgctctagaattccctgcagctgaatacaaggcctgctgtttaactccggcccatcctgcttcagaagctgctgctgaaggatggctctcttcctttatttagctgcagtttgccagctccggtgacttcgcttcttcctgcctttggttatatttataccaaagtaaaatctcagacagggtgagcatgaagggaaccgaggtgctcttgtataaagttttgcctgggatagaagtgcccagcaaacactgaccctactgtccttataatcaatgccctttggggatccgttgggccctccctttatctctccctcctcccattttctgtgtgtctttccctttcaataaaagtggcttattacatgatttctaccaacatttttagtactctgatggcagataagcaccactctctctcccttttggtgcttcctagaaaactgtttgctatccagctggtgatcccaaatctcttgggatcactctccattttttgaaaaatgtgttgactggcttgcctggtaatttacctcctgttcctcatatatatacaattagttgtttaattatatatatatatatatatatatatatatatatatatgtgtgtgtgtgtgtgtgtgtgtgtgtatctggaatgccctaagtataacaaacatgctattaattgctgtttgagtttttgaagttctaaaaataaatcataaatttaggta

SEQ ID NO: 31341 - DNA, 1103 bp, Mus musculus
gcctgaaaggacagaagttcaaggtcgttgttggctacttggggaatttgagatcagcctgggctacaagagaccttatctcaaaaaagaaaaaacccagaaactcaactcttcttcctaaaaggttgttttcaaaaacaaatacacagaacccctaattgtaaaaaatgcttttcagttctcagttttaatcttctaacataagaaacatttctgggggctagagaagtggcccagtggttaagagtacctgcttcttttccaagggtatcaagtttggttcccagcaatagtgtcagtggttcatgaccacccataacccttgttccatgtgatctgacaccctcttcagcctcggctctcacataaaacacagatgacatacattcacacagacatacacatagaaataaaaataaaatttaagaaagtaagagttgtggggcagtggaccacaccaggaaacttggtaaccaggcccctgtcatgtgaccacactccctacataggaatatgacctatggtcatgtagatcagaacagagttctccatgctgatgcggtatctagaggccctgagggtttagccaataagaatcctttcccagacattccttcctgcaaaaggtatttaatccatggcccaccttgaggaggtggtttgcacccattttccacaactaataaacaattgccactgactaaggacaggctcacatgacacccccacccccaccccatctcctcagcccatggacacaactccatccccagctcccctgatccagcagctttagatgtccaggagtttaggagccctgggctccgggctcctcattgcaagttcctggacccccaacattttatccagactcctctgttcagtttccagctgagactggatacctgggagtccccagctttggcctcccacatccataggctgtgttttctcacctcctgagttgtatattggtgtttccagtgagcccattacctgaaagtggacataaggtcaatgtaatctagtaccctgcgttttgtctgcctggctgagtttccataccactgtggcaagatggaaggtggagtgcctcctgtttt

SEQ ID NO: 31342 - DNA, 2871 bp, Mus musculus
atggcaacacctaggttctcttgccaccaaaacagttctcaaagtatttagaaattatctggcacatgggagtgacagggatttttgcagacaagaagggtggaaggcaggctgctgtttgaggagctgggggtgtggtattccagagtctagtcatcaatcacagagaggccacatatcatgggggtcttctggtcctgcactggacactgaaccctggctcaagtttgtattggtttggagtcctttctaggtactctagtgagagcctgttctgcttttcagtgattgcacaggtacctcagtctatgttaggtttagtctagtttagcacttctgctaaaactgcagggtgctttctgttggctgtaactgaagcatgaatcactcagaattattaacctgctgttaatagtttacagattagctctgatttctattactgccctgctatcattgctgaccacctcagactcctggacttcatggaggaagaaccaagtcttaacactctttttcccagtgaggttatgggttgtgagaccaagggaatccaagcctgtggcccagctgcatgtggtacccagctcctgtgggcagtctgtagagaggaaaaggagaagcaataaggaagttctgtagaggaataggaacactcattttgtatggagaagatgtaccacctagagatctctaagagacatttacatagtttagaatcaatcaaacagaaaagataacatctctctcaaagactccacaggcttccttgagacagacttatctgacatttttctttggcttatctttttttgtttgtgtttttttttcaagacagggtttctctgtgtagctctggctgtcctagaactcactctgtagaccagtctagtctggcctcaatctgaagagatctgcctgcctctgtctctaagtggattaaaggtgtgtgccaccaaggtacacttccaaataataaagataaaggcagtaagttaaaatggttaattctgacaactgccagcatttgctgagtactgcttgtaccagatgcacacatcattgcatttaattttcttagcaatgtcaggagccctgaccctttattacttcttttgcaaatggtacacagattttttaaatacataagtatgtaagtaagtaagtaagtaagtaaatcaataaatgcctgaggtcgcacatagtgggactacagttcaggctatgtgactcttaagatgttattatatacatcaccctgtgaagtttgccctgaatagcagaatccaggatggagctggcagaaaagaatggcatgcacccgctagcctcactgaataaaaggtggtccccattcaggggctcattttcacagttggcccctcaagcagtatgagctgaagtgtggagtggagggaatttgcaagaagccggggaggggttaaagagaacaggacaactgccccagaccctaggtggggctactgtaaggacacagatgattgcaacattccatgtgccctgagatgctgggaaggagccaggagaattagccaatctccataataaatccaatgggcaggagctgttggccctggcagccagagaagtccttactttactgggtatctaagaacacctgaggcacttgcttcagaaagctggttccagaggtctgcaactaggcccagataaacagcttaaacgcttctgtggaagactttcctgaaataccagtagtgatggccagcctctgcctctggctcctgcccatctttatttctgcctttaattaaaatgggcctatttagaagaatgctactttctgtccatgaatgacttttcaaagctctgactaagccctgaatgattctctttttgatgacagtagcctacagggttgacttcctttagcatgagaacgttctattagtggacatttttctttgttacaaaagttcaagttggtttccatgacaggcacttccttctgtaaagtgctacaatgctagacagtctgcacttgccacgcacaggcatgcttctacctggtgctccttggtttcagtgcaggtagtctcaggaccaccttggggtactggtgtagcagagccaacaagggattttacaggtaaaacccaatgaagccacacagcctgcccattcgcctgtcctgaacactgtagactttttcctcagcctgacttttatctcctcagatcaagatctgtctgacagagatgtgagctacttgctgtcttatttttttttaaagggccacatgaaaagaaagatggaaaaaagatattacgagcaatgcttgtagcttaatgtaacgcatataaggctattgagatggtttacatttggggcgctgcatcactgaaacactgaatcttaattggaccagtgacatttgagtgctcaatagtgacagtgacagcaccatatcagcttcagcagtggctgtttcagtgcacagagggatctcagacgagggtactgtcaagcctctcaagtacaactctgacaaactccattttcattttccccaattcttggcttctggtttagctgaatctaggctctgagcacctcaagccagagctactgtatcatccctgaagcaacacccttgtccccaaccttccagtctcatctggcctgaccagcccagtccagccctaacttatagctctgaaaggccgacttgaacaagatgcaggggtttcccagggtgcccctggcaaagtccaaagggtttgcattcaaggccctctcacagttctgcatcataataaaactcaaccacaaaagaagcttgtttctatatagtgtgcatcaaatgccaggtaccaggtgagacacagc

SEQ ID NO: 31343 - DNA, 1686 bp, Mus musculus
agcttcacaggcagccctgcccctttctcctcaccagcatggtacctgcccttactgctagagcagctgcttgtagagggacattccctccttcccagttttaactggtggaccacagtggggggaaaaacattcaagcgatataaagacacttgggctctttgcagatgcctatacttccaacactaccatgtccacaaaccaccctgggggagggcccttccaaagggaggcttgctagtttcagcgtctagcagttgggtcctcacttttactccaattgtgaaaatagcccacgtaccctcgcagtgtccagtagggatcccagaggcacataaccaagaaaggattttgactttgtcacagtgactatttaaaataatctattcgaagtccaaaccaaacacaaagcctgtgatattttaggttattaaggtaactgctaatgaaggattttaaaaagtgtcctcaaaaaggacttagccccgggagttgtttataaaatttcccccacttgtatacagtgtgcactaaaagaaaatgtattttaatatctaatgcctgggctctgagcgtcatgcttcttggtggtaaacatgcagtcctgttcctaagtgactcagaggcatcagaatttctccacgttacccatctgcttggcactcggaactgagcgtgtgaaatccatagcactgcccacaacctgttctcactgcttagctcccagctggattaaagacacctgctcaggcgggagagagagagagagagcgagcttttaccttggaaaaggtaaagatggaaatgtacaccaaaaaagacaatttttacatttaatggaacattctttttttttacaagtatatttttctactgatagtttcagaacactaatcttatattcactctaatcttaaacatgtttctttaaatatttataaggcagtttattacagaatattttcatgcaatcatgtgcacattattggtagcaaacatagtatatcctttagtactttaacatatttttgttaaaatacttttaatggtaagaaatgaacttgaggtcccaggaggttttgttgccttttcattgattagagacaataaatatcttgtaacttcctaaccagatctgagctgtgctcacaataataataatgaaatcagattctttgatgctggactcaggagggaaatcattagccaactgttgacttacttatagctagatgtctatgtgagaaagtataatatatatatatacacatatatatgacatgtaagagtcacttttatttatctgtctttgttcacttatgaagccggtaactgcagcagtatgttggtgatgtcatgatgcacagaagtcccatgtggagtgtttttcccacactgacaacttggcttcctttctgtgtgttcagtctgttgtctgaactaacactcccgcgagcactatactctttatactctgatccccctagttcatcttaaatttgtccgtggccctggcaagatagcgtacacaagattccatgactccagagcatcttgaagaaacatacatattttgaaagaggggaaatgtagcagatagttcacaagctgcgggttgtagctaaatattccatttctttgaaatcatgtttctaaattctttaccatcagaaagaaaaggagtgt

SEQ ID NO: 31344 - DNA, 1181 bp, Mus musculus
tgactgtcttggaactcactttgtagaccaggctggcctcgaacttagaaatccgtctgcctctgcctcccgagtgctgggattaaaggcgtgcgccaccatacccggcaagtttttattcttgtggacaaaatattttcaaattctcttaatcttaacttaatggataatttataggttggttttctagttcacttattggagatgtccccaagagacaaaagttgagtaaaggagcaaatgtcagtgtatgacttaccctgggtgctgtgtacctcatacttacgccttaaagctttaaatggcgatgctttgttaaagaatcccttgggactggggagttggctcagtggttaagcacactggctatccttccagaggtccagagttcaattcccagcaactaaatgtggcccacaatcatctataatgggatctgatgccctcttctggcatgaggtgtacatgcagttagagcactcaaaagtaaataaagcggagaggggaggggaggggaggggaggggaggggaggggaggggaggggaggggaggagaggagagagagaatttctctaccattgggggcctgggattctaggtcagtggtagagcagttgcctagcttgttccaggcccaggctcagaatttgatctctagccctacaaaacagcatcaggggcaaaatctcaatattgaagtttaggcttcaatttctatggttaacagtgaccgttaccttaatggtgatcaagagccattactaaaacaagcctctgggcgtgactgtgatgggtcatctagattaggatggataaaaccattccatgggctcggggtcttcactgcatgtaaaaaggaaaacagctacactgagcatggtcattcttggttcattcctgactgaggatgccatgtgaccaaccacctctagctctggctgtcaagccttccccatgatggactaactgtacccaggaataaacgcttcctttcttaattttgttccaggaacaatacaggtaactggcactaaaataccatctttaaaataccataatgacacaaaccactccgagtcaccatttggagactaatgaactgtgttccctagaactccagggctctacccattagacatttcttagaagttctctggaaggatgcagctgacaaagaat

SEQ ID NO: 31345 - DNA, 1113 bp, Mus musculus
aaacagagaactattcatgcaaataaacccccagtgcccaggcattttctcccagcaaaattaaggttctatatttgtctaattatttgcttgcttttttctctatcaaggttcaaactggcctaaaattttctagatgctcagactggccccagcttcccaaaagctgaactggcaagcatgtgccgccatgcctggtaaaatctgagatttgcacgcattgcaaaaccagtcctgcaggtagtttccttggcttgcccatctagagcaagtgttttcctgggtgtcaaggaaggggaggagggaggagtggggtgggggggtgcggagtggagaaggaagggaaggaatcatttcatcttgatttttttttaggttagcacagcgtaatgggcttaattttcatatgagtgtgtcctcatctggcttattctcctcccacgcggtcctcagaagcctttcaaggtctgacctatgagtggactttccatcacctctcactcctcattcggaatgggcatttgggcagtgtgggaccggaagtaagaccctgctcctgagagtgtggaagagaaagcaccatgagacaagactgggtaaaaccaaagacttcctcagccacaaggcaattagggaaccaggatacatcttcaaagggaggggcaggggcaggacctctatgccagtcaagtgttttaacttggtgacaaaccgcaatgagtgaagggaagcaggggtggactggttggagactgaactcggaactgctttggggatcctgccacgctgtcttggggaggggggggcaatgtcacccactcccttcaatctcttgcatttaccagccttgcccagcacttgtgaagttcttgctgctgtcttatctgggctacaagccctttaagggggactctgcctttcagggggaatggtaaatgtccgaatgaagacctgactccagcatggtgtctggcacaacaccactctctcttaaaaggaaaaacaaaacaaaacaaaacaaaacaaaattattcaacactctggaaattttgatctaagaacctgcgtgaggaaaaagaacctattatatttttaaaaataaaacctttattt

SEQ ID NO: 31346 - DNA, 1158 bp, Mus musculus
atgttgttaggggtaagagatgtcctaacttgaggtctttatgaaacagtaagacacattagtaatctctgtggtgctcttttagttttgattgattttctctttgcttattgcttgtctactgagttccactttttcatagactttgtatgaacactcactactagccagcacactggaaattgggaaccaaagttgacttagactctgaccttatataagcagaggagtttaccaactaagtaggaatagataacatttacatttttatggagaatgcacactagggaggagttgtggattgttacaggtgtaacaccttcttgtgtaatacttggtaagattatttatccaagaatagacaggtatcagagaaagggtttggactcttttgacccagtcactatggtgatggccaggttaattacagtccagcccagggtcaggagagttgagctgactcatccagtaaatacaacaaccaaaagtcaggccaagccaggttatcaggttggggttcgtccacacgggcagcagacaacagctcaccctggagctgctgaggtgatatcactctggctgacacaagggctgttggcagctaaaagactttcttttctaatctgtggctttccagcaaggacagagcccagggttaaacaaccccctgacttcacaagagtcaagcttgcatctggtgccactctcaagtgataacttcatgaggctatttcctctagtagaataggagagatagagccatataaggctatttcttctctaaacttgacattcattagtttcttcctgtcttcaaattacacaaggtgtgatttcacattggtggctcctgtcttttctttctttccttcctgtctctctcccttcatcttttcttcaatcctggaaactgccatttgaggcgagataagcatgatccgccttggctgcagagagacgcaggaggtatctgtatcttggtggtctagtggtttgcagaagtatttaagagactcaaggtcaagtagatagagagagagagatgagaaattatttaaaagctgctactgccaccacaggagccatgatctatggagccattggcctagaaagcccttgactgtcctgtcagagactgctttattttaaagtctgcct

SEQ ID NO: 31347 - DNA, 1134 bp, Mus musculus
ctgaatatgcactccaccactgagtactgctccaactctgagattcttttcttaagattagacaatgcatgagacagccaagcctgccctaacctgaaataaagtgactggcaggtacttttaagctgtgtgctgtgaatatttatgtgctttagtgcacacaataacaatgtgctggattgggagcttgaatcaattgttgttatatagcaaattgccctcagaacttagttgtttttgttgttgttcttgttgtttcgatgtttggttttaaacaatgagcatttattatgtcaagaattcagaagcaggctagcttgatgatttgggctcagaatctcttatggctaatatggtaccgcagacctgtaattccagcactacggaggctgaaacatgaggctccctggaggaaaaccagcctgagttgcctaatgtagctagggctacaaatctgatcttatttcataaataagtaaattttgctggggagaagatggcttcagtagataaatcacttaccatgcagacatgaggaccaagtctccagaactcacagggaagtcaggcagaatagtgttcatctcccacctcagtcctcccacggggaggtgagaagtggtaccctctgacacctcagtcctcccacggggaggtgggaggcaaacacaggactggtataagcaacagaagacagcaaaggggactgagcttctgatagaaggtgaagaactaactttaggttgtcctgtgacctctactcaaatttctgcagtttacacacaccaatgagcataaacacacacacacacacacacacacacacacacacacacacacacacacacacatacacgccaaacaaagaaaataggggcttgaaggatggctcagcagtctcagccaacagtgcttgctgctcttccagcgtgcttgactttggttcttggcacccacattaattgtctcacaattgcttttaattctggctctaagagatctgacacccttctctggttttaatggcatttacatgcatatgtacatacctacactcatacataaacataataaaaaatatatttaaataaatgaagcctaatacgtctcggtgtatttttaagctggaagaat

SEQ ID NO: 31348 - DNA, 1298 bp, Mus musculus
aaacacttaagttaaaaggtttttgttagccgggcggtggtggcgcacgcctttaatctggcctggtctacaaagtgagttccaggacagtcagggctatacagagaaaccctgtctcgaaaaaacaaaaaacaaaaaacaaaaaaaacaaaaaacaaaaacaaaaaaaagggttttgttgtttttggttttttttttttttttttttttttttttttttttggcgccttcctttcctgcggcgccttccatccgtcgccttctcgtcttgctctctcaggtccctccggaggaggccgccgcgcgtctcccggggaagcatggcgaggaaagcggtgtgcatgctgaagggcgatggtccggtgcagggaaccatccacttcgagcagaaggcaagcggtgaaccagttgtgttgtcaggacaaattacaggattaactgaaggccagcatgggttccacgtccatcagtatggggataatacacaaggctgtaccagtgcaggacctcattttaatcctcactctaagaaacatggcggcccggcggatgaagagaggcatgttggagacctgggcaatgtgactgctggaaagaacggtgtggccaatgtgtccattgatgatcgtgtgatctcactctcaggagagcactccatcattggccgtacaatggtggtccacgagaaacaagatgacttgggcaaaggtggaaatgaagaaagtacaaagactggaaatgctgggagccgcttggcctgtggagtgattgggattgcccagtaaacatgccctgtgtggtctgagtctcagactcatctgctaccctgctaaactgtagaaaaaacccaaaccattaaactgtaatcttaagagttgtaaaaaaaaaaaaaaaaaaaaaaggtttttgttttgtttttacctgatgtattctcaggatttagaattgaacctggagttctaaattttaaacaaaataaagtaacatgtatttcagagccggactctttaaagagggtccaagctgatatatcagcatccatatgagtggctcgtagctatttataacagatcctaatgcataacagatcatctctatgtccctagcctagcagaatttctagttctgttctaggggattccacaccttcttctggactgggcaggtacgtccacacaggtggcattcactagatagacacacatacacatgaataaaaacatttttaaaaacatgattcagtatatctttaccagccattaccatctttggaaatgctcttcttgaagcattagtgg

SEQ ID NO: 31349 - DNA, 1159 bp, Mus musculus
cagcctggtctacagagtgagttccaggacaaccagggctacacagaaaaaccctgtcaaaacaaaatgaaacaaaacaaaacaaaacaaaaaaaagaaacttgtctcttttccctttttttctcttaatcttccctcattctatccttcggatgatggtgagaaaatttaaactttggtgtgtaattaagccagtattaaaaatctaaaatgtcaaattaaactgaaataaaataactatagggcagcaagcactaagagagcgttttgcttttcacccataatcattacaaagcaagaaaagtgcagacacctcaatcattagcccatcaaaacctcgcaggaggcacaatcccggtaaatcaggatctccagggagcctagcctgtaaagcagcagcaattaccttgcttctctgaagtcagcccgactggaggctgagtgctgccctagcctcactccaggtgtggaagaaccggtgttattatcgctacttaagtgcagactgtcagattctgcgctaagaacgaagaaaaccagtgggacttgtcagtcaggtgcccaactaaagtttcccaggttatgcgcatagcagtgaggaaagcaacagcagtagtaaacagtgccaagggagaatggatcaaaagtttgactggagtgtggtgtggtgatgcaggcttgcagtatagctacttgaaggttaccctgaactacccaggggagtcctgtttcaaaactcaaagcgcaaaacaaaacaaaacaaaacaaatctgtctttccttggtcttaaggcttaggcacctccccatcacccaccccctcgcaccctgcaccttccccgcaccccccccccccacacacatataattatcgtatttgtttgctctgtatgtgtgtatgtgtttccagggtgcaagtatggagaagacaacaacctacaggagttagttctctccttctaccacgtggagcgtgggcgttgactgctggtctttaggcattggggcaagtcagtctatttgaattttcgtagctgctgagatgctaaagtggaagtttgggatttgggaggctatcttagggccgtggagcatttgtaactgtggcttctagagtggcagtatttggcactagtcactatcacgctcagccgatcttt

SEQ ID NO: 31350 - DNA, 1142 bp, Mus musculus
ttttgggggtggtggtgtctttcaatgaaggcttagagtaaaacatccagttcctagtagatttataaaagggaagagttctattaatatatttggaagcatagtctggagtgttagaaaacatcacttgggcagaagtactgagcggattaagcttcttgacattacatagttgaataagacatttaatttctgtgttagggacactagatagtgttatttaaactactaaaatttacctcctttatgactgtaattcacagaagtacatgaataagttgagtaaataaaacacatcacatagatgaactcaaaaaatggtcaaaacatgaagcatgattttaaattattcaattttcatcacaaagccaatttatgatcttgcctgtaaactagcataagtcatcaatggaggacatttttatttatagccaggattacgtttgtcatttacttcagaaaactttttcacaatagtagtcaaccttttttttagttacgtccaagtcttccatgggttgtactgggtattgaacttagaaccttgtccttgctggggaaaattttgcattacacatctcaaacccttagatcactctttaaaaccagagttgattttaaataaggttatatatacatatggggaaattttgaataaaacttccagttagtgctgtgtggtggtggttggtagacttgtaaacaaagtacctatctgtaagagtggaaacaattgttaacctatggtgtgtcctgtgtctcgggaacacaatgctggaatgtaatgtttttctacataaattttgatgcatttgtctatttgaagaacttgaattggcaaaatgtcattaaaagtagaccaggttttttgtgtttagcaaaaaaagaaaagcaactctggatattagtgcagttaagaaactcatgtatctggtaagtacagtaaaagaaccttgtatgctttttaaaaaattttttttcagtagatgaatttatattttgtggtaaaagtggccgaacccagcattttgcaaactaagtgaaagtagctctcactgagctacactcccaaccacttgatgagtttagtaagtttttttctgattatgtaggcctcatactgaatattgggtggggaagca

SEQ ID NO: 31351 - DNA, 1198 bp, Mus musculus
tgaatatatcctgatggtgttccattttcttagaattagtcacatgtttaaatattttacaaaaacaatttctcagctgattttgtttttttgactatcaacacctatggcttggaaattagagcatgtctgaaatgttaggcatgcatttaactatcaacttgtcctttagactaccaataattcaatttaaattggttctttttttgtgagtttcgtaagttatcaggagaaataaaggcaggaaaattagttaatgctttaaataccacttagtgccataagttttctattttcctttttttgagagggttctgtgacaattcagggctgtgcatgttactgacaccctggtaatgagctacatttgcagccccctgagcatgtaattgctaaaagaaggtcttagagtgtctgatttgtgaagatgctttgaaaacaaatacttgcaagagcagacctagaaaaaggctttctatccatactaataatgaagtacttcctactggttacatgataatattaaaaacttgggaatgtgtacacatacttggactgtgaatgttttgggtctgtggaaggtttttttttttttttttttctgattaaatagctttgcttgtttggattgagtttggcacatggtctctttgtaatccagattggccttgaatttgtaaacctgccttgcccagtgtagtgttagtgttgtaggactgtctagttcaaatagccatcttaaagttgtttctagaataagtgccttttgttttcctttcagaattacaattttatagaatcaagatttcactattggctcatcaagattatatagaatgatacagagtgaatttcattcttctgaggggcatatttagtgaatgtccagtgctttcttatttatgaaagctgctggtattggctttgatgtcttaaaagccaaaaatatatcccttgattgaactatctgtaagtttagaattttgtagtaagactgacttggaatggtacctagtgatttctgtgccagttgtagaatgcttgtagatgaagtttgagatatttactgttgaataagaatgttttagtttagctgggcgtggtggcgcacgcctttaatcccagcactcgggaggcagaggcaggcggatttctgagtttgaggccagcctggtctacagagtgagttccaggacag

SEQ ID NO: 31352 - DNA, 2097 bp, Mus musculus
tgaagaaaaaggtgaaggaggtgaattttcagttgataggtaagtattaaataaggttttattgctttgtcatcttatagttagatcttaacataaaactgtaagttggacagagtaggtggagtgattactttgtgtatttcaggaaatgtaaatgcatgttatttacatttttgataacatgttttaagttagctatcttagtagtaatttaattaagtcagtgcccagtttcttttccttcctgtgagtttaaaaggacagtggtattggttctccctcatgtcacatgcagtctccatgcgatgattgtagtttttgtgtgcatagataggtgagtaacgtatgatatgcaatgaggcagtaagtgaatgtggtctaaccggcaatgctttaaagactaccaaagcagtttttaattctcccatatatgagtagaaataaacttggaattttctacaccatatgtttagttgttgggttatgagccagtacgcatattctgtatttttgagcttggagtggattttgccagtttctggaaacattagaaataaattttttaatttgtttgtagaccgattatcgaacggcctatccgaggccgaggtggtcttggaaggggtcgaggaggccgtggacgtggaatgggccgaggcgatggatttgattctcgtggcaagcgtgaatttgataggcatagtggaagtgatagatcgtaagtcttatattgattgttgcatgtatgagatttaaatgtgtttatttaataaaaacaaaatttgaatttctagaactaaagagtataatgttaactcagttttgttagttctttttcacattacagtggcctgaagcatgaggacaaacgcggaggtagcggctctcacaactggggaactgtcaaagatgaattaacgttggtattctgattttttttttaaagttaaataatttcagtgaaaccaaaactgctaacttactagtggattatcagtaacttaaattttgttcctaaaggaagaatggatgtatattaatagtatacaatggaagaattagtacataatgaagtatattaatagttttattttgataatggatgtgtatacaggcctgaagtcctgtgatgaggatgctgggaatattatgactaatagttctaactgtagctattgtagtcttgtccttacagagtttgataagccctcttcctctctttctctgtttttgtttttgtttttttttttggcgatgggctttctgtagttgaggctagccttgtacttggtatgtaatttacagccatctcctactgtgtctgacttagaaagctttgttttaaaagtgtgtaggctaatttaataaatttgttttctcaggtctactggagagtaaaattagtagaaattagtaaatatataaaaatgtaaaagtttttactttggtatgaaggaattttggctacatgtaaatggacctagatgcctttcttctttctttccttagagagtcacccaaatacattcagaaacaaatatcttataattgcagtgatttggatcaatcaaatgtgactgaggaaacacctgaaggtgaagagcaccctgtggcagatactgaaaataagtaagtgggtttgtgtgaggaaatattactctgtctgggtgtttaccagtaaggtaactgtaatttaatgcagttatttggtcgtaccagcatacaatgagactttcttgatttgagacattgtcttgtgtagttcgggttggtctggaattcaggattctcctgtctcacttgttagtactgggatggaggaagtgtactaccacactgttggctggataattgtactgttttcccacaccttagaaaggtgtatgtatttggaaagaatgtatgtatttttagtaaagccttttagagcgaatcataaaaaatgacctgtaactactcaaggatgaaggaaaaggaacaaagtactttgtatttgaacttacatgataggatctagtagtgatagtgttctactctgaataggtaagattattaaaaactgaaccaagtattggttttgttatttggagtgtttag

SEQ ID NO: 31353 - DNA, 1076 bp, Mus musculus
gccttgggaaggtaggtggtcctagttttgaaagaatatagattttaaaaccctcagattacaagtagaatctacaagccttgtcatattggaatagcaatttgaaggcagtgtcttaaatgctacaaatactgctgaagagtcacaagagtggggacttgtcacttgtataccaggaatcaaggattggtatcgcctgcagtcggaggaatttgttaacgagaattcattcttcaagatcacttcctgagccccaaatgaacttattacttgttgagctagatagtagatatatattcatgcacataaagtacagcattcgtgattcatcttttagtggagaaagcatgttcaaaaattttgcactattgcttttatattaattactcaggggcccttacttaatattttaggctcatgctgaagattcagttatggaccatcatttccggaagccagcaaatgatataacatctcaactggagatcaattttggagacttaggccgcccaggacgtggtggcagaggaggacgtggtgggcgtgggcgtggtggacgtccaaaccgtggcagcaggactgataaggtaattttaagatgcctttccgttttaagcaacttaagacttgtgattactggctagatattttggaggaaggggcataaacagaactaaaaaaagaactaacaagaaacaccatttgcaacaaggtttcactgtggatttctggctggcctggaactcattatgtagactagactatctttgaactcatatctgcctgcctttgcctgtggagccctgagattaaagccatgtgctaccacatctggcctttttttttttttttttaaaccaagttaaccatttttaacttaatggttagagtagtgctgccaataagttgacttaaccatacttttgaatttttattctctacctgtcagggtgctgttacactttttgcatgctggtatttatttttactctaggtatctccttactgcagaataagtcctggtatagaacgattttgggattgcaaaagttctcctgagacactagtctattatt

SEQ ID NO: 31354 - DNA, 3216 bp, Mus musculus
atggtgacctgggctacaagtggcaaatcttgtctgaaaggggtgggaaggaagtgtcactctggtagaacacttaacctagcatgtacaagccatgggtatgatccctagcatgtcaggtaaattacagtatttcactgcagaaagaaatgcattgcaaatatatgtagtagttttattctggtttatgatttttttttaagtagaagctttgatctattttgtgtagtgtattaacatgaattttttttttttttttttttttagaattcggtgtctatactaagtacagacactagcaggctattttcaggattgtggctaattttgtgtttttgtctttttttccttccccagtcaagtgcttctgctcctgatgtagatgacccagaggccttcccagctctggcctaactggatgccataatacaacactggttcctttgtggaccctcctgttcaaagcttttgcatgcttaaggatcccaaacaactaagaattaaaaaaaaaaaaaaaaaaaaaggactgtcattcataccattcacacctaaagactgaattttatctgttttgaaaacgaacttctctagctacacagaagtaacaaaatatgttagtcagttttgtatttagaaatgtattggtagcagggatgttttcataattttcagagaatatgcattcttcatgaatacttttgtattgctgcttgcaaatatgcatttccaaacttgaaatataggtgtgaacagtgtgtaccagtttaaagctttcacttcatttgtgttttttaattaaggatttagatgttccttcaattacaagctggttttaaatattggacataatactggttttaatacctgcttttcattttcacacatggtcagctgggacatgtaaacttctgacttacaagattttctgctgtgtggaatactaaccactatgtattttaactatattttcatttggaagttgaaaattttcttttcacatcttatgatagctaatatatactaaatctttatacagaaatgtcagtacttgaacaaattcaaaacattggtttattaacctttggctcatgcatggtttattaggttccgattatacctgattcacctatatttacttttaaaatgtatgacttcctcattttaaaagtaaaactaaacacagcttttggaacttgtaaactacttattgttcatagatacagcctgtgttcagtgaaatcgttttgtgggtgtgggttttatctttccttgaacaagatgggcagagtaagttagtcaatacctaatagtttaacttgtataaaataagaggctagccatttggtatttgtgtatgaaagcccccaaaatcaaaatgtttatccatagtcaacaatctatttggttttataaaaacgaaagggcacgcattggtaagtgtgttgggatggaaaagtatcttaagttttagtatttcaaagccagctttaatttggaacagcaccaccatccataaatttcaaaacaagttatcttgtttatgaacttatatgttatgatttggtattgagttgttagtgttacatatcagttttcatttcctctactagaaaataggtaattgataaattctttgaacagaagcatcactgcttattaaaaagttagatatatagaatgattaaaaatccaggttttctaggatatttttattcacatatattgattaaatagggaaggaattttattcaaagctttaaagactagtcgtcagtttttttttttttaaacctctgttgtaattacaaaaatactggagatcttttttgctagttaggtgattggtttcatgtacacatctaaaagctactatatagtatatttactcaatgcatttattaatcttgttgccagcaagtctgacagcttggaaacaagggtttttttgttttttaatagacttgagctggtggcttacatgttctgtattagtgctgcttgaagttttacatgttcagatccctgcttttcagaggcaaggattagtccatttagacttggtgacccctttgagattgtagcatatgctcccttaagtcagtatgcttaaactttaaagtatcttacttcttattttaatagtaatatctttacagatttttagcaatgtgttgtagaaaacacctgctcttagaagcacaagttttactcactgagtcactgtaaacagaaaacacagcagcatttattttattgcacattcagagtaagctgaatatgaaggtggttaattctgtctgatacctgtgaatttcctttcagaatcactttatgtcaagagctaaacgtaaactttttgttgaaaataacaatttattttcatgctcatttcctaaaagataaaagcaatcaagtgggaacccctttatatgtttcttggtttccctttttcattatcgtaagataattcttgtttaagatttttgaatgtttagatatcattaaggtgaggtttttatttgataagtctgctgagtcctatacttgctaggatacctatcttgattttcaagagtgggtataatggcttgaatgctgttaaaggtaaacggcatcagttggaatttgtgggacatttccaggtgggctaaagggagggtatagttcttagttgaatactatttggggttgctgggagatcttgaatgtaagagcaggttctatagttcatttattcgcttcaggatatgtcatttgcagagttgtgaatgtatttggtttatttttggtatgggtttgcagagagatgactgtgcattccttctgattgttatttttataattactagagatgactgaaatagaaaaaaagtgttgtactgagtttgcaagtggagtgtaagtattttgtgttgaaatttaaaaaaatatcttaagagcattagcaggtggaagaaaccaggtgttaaaaattaataatgcaaagctacatgaaccttactgatgttgaccttaaaggtaagacattttaggcatatctgtggacaaactgccagacattagctaattggtatagtatacctatgatacatgcagttttgcttcccccaccctactttcttgtactgggtattcaaccagggccttgctcatgctgggcaagttgcttaactataaccacagtaaaggaaaaggtccaggaaatataatacccct

SEQ ID NO: 31355 - DNA, 2258 bp, Mus musculus
taaatagcatcatcctatcttaaaaccagatctctgcacattgaaagatatatcagtgaaatgtaggtctttcgtgaatttagcacacttgtctgggaagggagcataattggggaattgcttatattagattggcctgtacccatttctgttgtgataatttcttggtttatgattgatgtgagaaggcccaacttgcagaggtgccactcccaggggtttgaatttatttcttctaaaaagcaaggtaaacaaaccacagaacagcatggtcttttgcttcagttcctgctttcaagttcttttttctgatttctttcagtgattagaatgtataaataactgtgctgtcagggctgcatttggtcaaagtcttatcacagccagagaaagcaaactaggacacaacttggttccagatggggaatatttcctgttgcttcaaagcccaatgggttggctgtttgtggaagatgagagagcaggccagttaactgttcctctgtggtctctgattctttgccctggcttcttttgatgatggtctgtgattggagtatgtaaatgaaataaatcctttgtgctccatcttgcttttggtcatgatgttttatcataccaataaaaagcaaacatgcagaagttggtaccattaatcttttcaccagctcatacaggtccaatggacttgtatggtcctctcacttaaatgtagaaggcagaggcattggattgcatagcctggcccctagatttaacagtaagttttgagccagtgtaaaacttgtttaagtatgtgcactgcttgcatgccatgaccatggaggccagaattgggtaccagatgtggaactggagttaaacagcatgttgggagtagaaactatatgttgcaagagcaattgctctaaaccactcagctatttattaagttaggtatcaaaatgtgaaaggctaagtctagctctagcatgggttttatccttaccatcactaaagaatattacagaaacgtggcacagtacagtttagtttttttgctttagaagtcaagataatgcagtccagttccttgaactctagttaggattttcattgtacagatagtatttgtcttcagagggccaccattctgacttactgctgggaaatcacatgttcttaggatattaagctgttatctgttgagaattgaattggtggttataattttattgaatatttgtctagctgcccttcagaatccatctactaattaattttagtttctctaattaatactggctaccatgctttgtaatctttgctagctgataaaaatatttaaatagtatttggttttcatttctttacagtcgaccacacttaatggatgcatatactttgtgtcattgaagtgcagacttagttatttttatttgtatgagagcccagttaaggaacctattttctgtgttttacagtttttattattttggtataagctatatatttcaacttgattctttccattactcaaattgcaaatgccaccttgttctctgcttctggggagtccaacccaagttcttgtatgtggtaggctatgtgtttttatgtgctatatcaccgagcagttttagttttagtctgaattgcttttctattgtaggaaagaaggaaggtcttttctgaactcttaaatgaaaatgttttgttgtagaagttctactttctcaagtaaaacatttcataagaagcacaaagtgaacatgagtcctgtagggtagatggaaagtaaaatctttggagggcttcatctttgatatcagaatggtagataactttcaggtgactcctacaaacagatcctagtgagaaagaagcacaggcatttcttttcctccttgttccaggacatgggcggcctgtggttgtaactaaaaagtggtggtgggtttaggactaaggggagaatgcatgggagatggagtttaacactccacttgcctgcagatagaactagaaaagaatctgcctgtggaaaagggacattttcaaagcagttttgagtatccacctaaatttgaagtctggacaaagctcagtgaagtgcttgcctaactatgctctggatcctcccttcttcatactaataaaaagtcagggaggttcccatgaattccctttggtgtgctatacactggtgtttagcttccagagaattgtggaattttattaattaaaaggtagatgtaagttgttggtggaatgtattt

SEQ ID NO: 31356 - DNA, 1578 bp, Mus musculus
gtagtgttaatggagaggatgggttggagatgatgagggttgatattttaaagaaaaaaaaaactgtcttgaacctttcaagtggcactggacgtaatcagtggtatgataggagagcatgctaagtcaggccatagttaggaagaaacatcagcaaggtatgggttcttgtagaccagagataagtggtgttgaaggcagcacatgatataattagttaaatggaataagcacagaggcaattttccatcaaaccgatagagattgacagatgttgaaactgtgtgtgtgtgtgtgtgtgtgtgtgtgtgtgtgagagagagagagagagagagagagagagagagagagagagagagagggagggagagaggaggacgatgagcatgactatcttggggtcctttctatatgatatcagtgttggtgtattgccaccttatccataagacttaagtacctatggtgaagctaattttatccagagacagctggcttgtcttcactgtcacagacctttggagtaggaactgggcagataaaatgaggtacgttggctttctagtatcaagcctcattactcatgagggagtcatagcccatctttaaccgatctagagtcagccgctcaccaccgaagatgagtgggcggagagaacttgatgcaaaaatggaaagagaaatatgttgatgctccaggtcaaaagaatcagttgggtcagcctcatgtggtgacagatcttctatgttggagggtaaatagccttcatggctaggaaggtagttcactggggtgactgtcaaggggctggtcaggttggccagttttgagtcagggtctctgctttctagcaccttgtataggttcactagttgtctggtctcagctgtgagagttcctgtagcttgtggattggcaatatacattgcatcttgcttggaggtagagtagccttggaatccttggcctcttttgaagtaatatggttgtctgacaactgggatcatgtggtagaggacttcatggatgatcaggggctcaggctcttcaggagtgggccatgccatcaggagattatccgtaggtagctggatcttctcctgtgagaagagtagatgtataggttactttgacagcccatttctccaggtttccggaacctcaccctgctgccctgcttcagcctggtgagaaactatgggcctttaaattttggaggggccagagccagatttcactctcatccacctcctaccctatcactgccattctccagccaaggagagattcattgctcagcctcaggccacttgcttccccccccccctcctagtaggaaaggcagaaagaaaaaacttagggcagtctggagagaaggatggagtattggaggtcgagggaaattggtgaactaagccttctagtttgttgcccattacccttttgttgagaatcaaactcagtttgtgtaggataaggcatatgctttacactcactggatcacacccctagccctgttagtactagaaaagaaaaaaggatttagaaatgggaaaggctactcacgaagcacttt

SEQ ID NO: 31357 - DNA, 1695 bp, Mus musculus
tctgtagatatctgttaggtccatttgtttcataacttctgttagattcactgtgcccctgtttagtttctgtttccatgatctgtccattgatgtaagtggtgtgttgaagtctcccactataattgtgtgaggtgcaatgtgtgctttgagctttactaaagtgtctttaatgaatgtggctgcccttgcatatggatcatagatattcagaattgggagttcctcctggaggattttacctttggtgagtatgaagtgtccctccttgtcttttttgataagtttgggctggaagtcgattttattcgatattagaatggctactccagcttgtttcttcagaacatttgcttggaaaattgttttccaacctttcactctgaggtagtgtctgcctttttccctgagatgggtttcttgtaagcagcagaattgtagtctcccctcccctagcctgaaacctgcttgctcggggtggagcttcctgctcattcgttctgccacgcccactgctggaacctgaggagccacacacgtgcacctttctactggaccagagattattcggcgggaatcgggtctcctcccccttccttcataactagtgtcgcaacaataaaatttgagccttgatcagagtaattgtcttagctacattcttttctctcgccacctagcccctcttctcttccaggtttccaaaatgcctttccaggctagaacccaggttgtggtctgctggccggacacaacaattgttgcccaacgtggggctgagaaacggcaaaggatttttgaaagagacgctgctggttcggagctccataaaataaagaataaaggaaattcataccggaaaaggtatgggctaagctgagacagcgttaaacccgagcgctggttcacttaggttcagcagtgaggagctgggtatcaggcggtaggccgtagctctccgaagctacatgaggtgtgagaaaagaaagggtttattaaaaggaataggcggattgccccagttaataaaaaatgcatcataagggaggaaaatgtcccaaaaagtagagagaaatttctctctgggccttgtagcaggagtactctgttaccttttgtgtcttgtctaatgtccggtgcaccaatctgttctcgtgttcaattcatgtatgttcatgtccagtctgtatgaatgaatgttctatgttttgtgttggataataaagatggtataaaaaaactttatctgcaaagccgagagctgccacgtgtttcatacaggaatcagacacatggcgggagggcccctgctggaaaaactgttcgttttaggaaataaaggcgagtgcacagcctctaagtttcggagtaaaaaagctaataaatggttcatgattaatgtgtttgacaatggtaaagtgttttttatttaatgattgtagctacaaaaattattattctctgattggtctaaatgtaactgcttcatttggttcttttttattggtaatgtgctctgagtgtcttcacattcagctcataagttgttggttaagattaataattgttacattgctacagatggttagtgttaaatttgataactcaagtttagagtccttccgacacgtggcataaagcaggccaagaggctgggtctctaaagatatttctagtttaggtaataattaatgt

SEQ ID NO: 31358 - DNA, 1134 bp, Mus musculus
caaaaaagctactctctgagccagctcccaacaggaggccagagactagcctcagctttacaatttgcatttgaataaagtacctagacttccccaaaagaagttctgctttcctactttctcactgtcgagattttgtctttcaagcaggtaaatcaacattctcgaggcggaccagcagatgtgcatccccgcccccctagagcacacaggtggctgctgttatcttttttccaaggacatttccagcacgtggctttcagtctgagttaaaaattaggtttacccagaggactagaaaagtagatatttctatattaataaagattggtttttattttgatagacaggcttagccccttagctgacctctggcttttcacccttgctgttactgcaaggtgtctttagctcaataaggctgtggaaaaaacagagatgaggaggaacgacttccagctcctattttagccacaaatcgtggtgttactaacgacataattcttgcttaggctttgctaaatctgaggttgataattctcctttaggagctgcacagcactcagaactgtgcatactggtttgtgattgtataaattcagtatgggcatcgcttggtgcagaggtactgcaaggaaaggtccagcttgaccatttctgagtttcctgtgagataaacccggtttgaaagaggttggtaccaaattttggctaaaagtgaaaaatatttttcggctctgcctcacctccccaaaaggtaccagagccacaggtgtggatcttaacagaatccacgggaggaatcgggtccatgtccacccaagccaaggttaaaagcccactcatctacggatgagaaaatcatttgatcacctcagttaagcgctgccttattttaacttaattaataggggggagagagattggagacgtactattgaaagggcaagcccttcactgcctcccacccaaataaaaaagccaattggccttgtactacagagctggccgaaccccttatccctgtttcccaccaatcatccaaaaatgcggaggaatatcaacttagtgttattcttattatagtgtatttcacatttgttcagtcaaacttagccagagttccaacgccct

SEQ ID NO: 31359 - DNA, 1245 bp, Mus musculus
tctgaaagccccctgactaatggatgactaccaacgctcctgtgaaacgtcagaactttttgttgactaaacgagtggccttcgcttcattccacttgctgtcccactgcatgagactgcacctactcatcactgcgctgacattctggcagaagaaactggtacttaaaatgatctgaaggatcagatcagccttggcctgagagttcgagctggtacaccgatgacagtagccttgaggttaaaggtaagcagaaggcggggacagcagtacggtggtggacagaaaacacgtgatctaggccagcagccttcctgaagagacattggcccaaaaagctgaacttgaaactttaatacaaagagggctgttgacatctgcagagaaggacctaagatgctgtggctaaaaaaaatcagatgacaaatctaaccgccaaacatgtggcccaaagagcaatgatcctggcagtcaaggagcctaaagattattatgatgtcaaagagaccagctttagatacacccctgagcactatcaagttatggacattgcttgacccacctgtgggccaagaaattaaaaggtgtagttaggtcctttgactactatgttacaggactctctgacttggcagaagaaatagtcaaaagctgcaaggcctgtgctatgaggtaatggacctgcctttgttgcccaggtaaatcagggactggccacgatattagagattggttaaaagttacattgtgcatacaggctccaaagctcaagacaggtagaaaagataaataaaattctaaaagagactggtgcagacttggtgctccttccccatgcccaatttagacatagaaatactcccttttgattcagccttactctttttaagatcctttatggggctcatcactgtcttaaatgatgtgtttaaacctacatgttgttgtaataataatctgtatgctaagttaaaaggcttacaggtggtgcaaaaagaaggctggtcacaattggctacagcgaacgagccgggtaccacaaaagacatctcaccagttgcagccagagatctgacctacatacacctacatcatgcccagaccctcaagcctctctagaagggtccctgcctagttctgtttatcatcccttcttattctgtttttgttcttaacctttggcccgtgttataatttctgttctccacatagagatatagacttctaaaattctaagattagaa

SEQ ID NO: 31360 - DNA, 1166 bp, Mus musculus
acaatcaagctctcccaataaacgtgtgcagaaggatcctgttgcagcgtcgttcttcctggccagtcgagctcgcgcaagaacaatctgtttcattgactctggaaatcagtttggcagttcctcagaaaattggacatagtactaccagaagatccagcaatactagtaccaagcatatatccaaaatatgctccgacatgtaataatgacacctgcttctctatgttcatataagccttttttataatagtccccatgacatagcctgtgggagtcggttgccttgatgccaggtgtaggtcatgaatgtttctgactaacaagaacagaagatttgtttctagggtggcttttcagcccagtcatatatactatttagatttacaaaataaacagctaggacttatctgtttagtctttcttgccagtggctaacttcagcttaggaatttttgccttgtataggagccaggtaatgatgtatgtgctctaatatgttgtataaaagtgggcggaagaagtttatcagtggggccacgtgctgagtgatcgtcactcttcggtccctggcaaggtctgagactggggcctcccgcagccctaaccgggctctccccgagcgaggagatgagttcccagagagcagggctctacgagtgggcagactgggcaggagaagccctgagtctgggcagatgcctccctcgccagagcttggaacagactcacagccagcagagcgagttttaaccatttatattttttaacatgaaccacagaacaataatcattcaaacaacaaaacaaaaacaaacacgaattaacagatttatggacaatttgttttggtgcaccaaaaccagacaatagacagacaggaaatagaatttggtgtctcaaagggacacagatatcctatccagagctaagaatatctccatgggagccagagaggaagtaggacgtctcccattttccttctgttcccaggagagctctgaaatagcttattttcattttttctcttttttttttttgctaaaagatcccaaacaggggataactgcttttctaaaatttattttctctctctctcatgttcagactctacttccttatctccttctcctgggaatactgccagagaatggagaggaggcaca

SEQ ID NO: 31361 - DNA, 1183 bp, Mus musculus
gaaagcaggagggatcgtagacaagaaagaaatttgactagaatcttggccacagtagtaggagagaaagaaaagacgggatctagacaggaatcctgggcaacagaagactgagcctcagtttaaacggctcagctgtgccagactgaagttacttatttgggataaaccctttgagataagaagcagtggttaaggaaagccagaaaaaagactgtcactcagatccccaccccaactacaccaaggaaagtaagagaaatcttgggtacctctggcttctccagactctagatacctgggttggtgaccttcgctgccctgttgtacccccagaccaaggaaggggaggtgtttgtgtggaccccagatcaccagaaagcctttgaagaaattaaaagggtactactgacagccagccttggcctttgcctgacctaaccaggcctttcactctttatgtgaaagagagatcagggggcaccagaagagtccttactcagactttggtactttgaaaaagtggcttacctatccaggaagttagaccctgttgccagtaggtggttttcttgcctgaaagctattgctgccataactctgcttgtcaaagatgctgataagctcactctgggacagcaaataactttagtggtaccctatactcttgagagcattatctgaaagcccctgtctgatggatgatgaccaacgctcctgtggcacattgtcagagctttttgttgactgaatgagtgacctttgctcccccactgtcctcaagcaaccctactgcccgagacttcacctactcatcactgccctgacattctggcagaagaaactggtactcgaaatgatctgaaggatcagatcagccttggcctgagagttcgagctggtacatggatggcagtagcctcgaggttgaaggtaggcagaaggcagggacagcagtaaggtggtggcagaaagcaagtgatccaggccagcaccctccctgaagggacatcggcccagagagctgaacttgtgactttgatataagctctaaaatggcaaaagaaaagtcaacactgacagcagatatgcttttgccattgtaaggagcaatatacagacaaagagggctgttgacatctgcagagaaagacctaagatgctgtggctaatggaaatcaga

SEQ ID NO: 31362 - DNA, 1177 bp, Mus musculus
acagttgttctcttcatgttcttcatctaaaggagaaattgaaataacaccagtactagtatctattgcaatgctgaaaaggtatcaaagtatttttataataaggtcagccattggcagaaataatcagcagtaaatttttcaacattctcatgtagaatgagagacccagacacagaaaagttaaattactaagaaaaattagaccttcccaggccctgattatttgtgttggtccactaccctcacttggaacattttgttagtcttgttgtaccctatccaggagtcaatcaatgtctggtcacagaacagctatgaagactccctcccagtttctggtgttcttgctgttttgaatcccaggtatggaaggttgactatgggtaatctttaaccatttgtaatcatgacttggaacttcagagaagtcatttttgtcttgattaaacatgaatattgtttgtatgattccaattacaggcatagccgggcacggtggcgcatgcctgtagtcccagctactcgagaggctgagacaggaggatcgcttgagtccaggagttctgggctgtagtgcgctatgccgatcgggtgtccgcactaagttcggcatcaatatggtgacctcccgggagcgggggaccaccaggttgcctaaggaggggtgaaccggcccaggtcggaaacggagcaggtcaattacaggcataatatttggcatccagttagtccaatcctcttcctactcatctgcatatgtagaggacagagtcaccattaattgaatggcaaattaggagattactatatcattagcctgatatcagcagaaaccaaggaatgctcctaaactcctggtataccacacattcaagttgaaatcaggggtttcttcaagaataagaagtcatggatcattttgtaatttcattattcttttccacttttcatctggcctagtagatggacagctttagaaataaaaataaatagtaataaaatagagttggcattctctcaaatgaaagacaaaagttgtacattatttgggttgcagttatgcctaaggctctctgttctgtgaattttcatgatattctgtaattatgaaataatgaagcctttcttaaaggatatgagattgtgatgtccaggctacagatggatggaaaaa

SEQ ID NO: 31363 - DNA, 1355 bp, Mus musculus
gagctgccagcaaggaacaaagaaaaccccggtttctttcagattgtgttttgtccgctgctggcttgtgatatttgctcctgggaacacttgatgcttgctttgttctgggaagctggactttaacgcacctattcttcattctacaggcgtggtggacacaggccttttcatcaacatggcagagagagtctactttgggatgcaggatggctcagtgaacgtgcgggagaagcccttctagccctgagaggagcagggtcctcaccttgagtctccagcccaggcacagtggacacgcctcaccaggagcctttgccttaatgtaccttcatgtagctgtccacagtgccagagtggacggctggcatgggtgggtgggtgggggtagtcaaatccagtcttatgaagtattgctatgtgtctttttaaaaagaaatttaaatatatatatatttttactattaaaatattcagtttttttataaaatagaacttgattttatgttttatatgaaaccttaccaaaaacaaaaaaaacgtataaataaaaataagagatcaggactgtctctgaaagctttgactggacctgctggttaaccttctgaagttttgggtttgctgagaaagaacgtttttctaagctggtgcaggtctcctgatgccttatgggaaaccttgtttactgtttactttcttgtgacactcttgtgttttcattgttaccactcccaaatcttagttacattttaagatcaggtgtagggaattgtgaatggagcagcggggctgtagtgacgtgggtacaaactccaggtgagcgagaatgcaccttctcttggatcctggcttggctttgctcctgctgctgttggaagcccccggtggaagcggaagcgcctgctggcagtgcacagcactgtctgagatgtgaagcacttactttttgttgtttgaatgttttctttatgtgaatatcgttttgttcctccgatgacccttgtatgatttggtatcagaagctgtcactttgtgctgttcgaaggttgaaataaacgttactgtgccatttggatcctttgtcttctctgccgagtttgcactcatgggaatcagttttgctcagtttatgttcgatgcgtgggatccttccaggaacccgagacagcctaggcaaacgctcctgctgtttctgacagacgatctcctttagtgaacaaggtctcgcgtgtcctacctttgctgcggagttagttttctctgtctgggtgagggcagtattgctgagcacaggcctgttcactcccagctgctctgttgggttgtatgggaattaagcattagaagagact

SEQ ID NO: 31364 - DNA, 1199 bp, Mus musculus
agtggagatctgtgaggaggttctgataagagctcaggtcagacataataaggatctgaactagaatatgaatggagttaggacagtggtcttcacctgtcttccagacccggagtttaaggcagaggtcaggaagcagagagtgtgcgttgactcccagcttagagctacttaaagaaagcctgctgctccagcaacccaaggcatccatctggggttctgtgttaaaccagtaaggctgatgtttgttttaaagagtttgttttgcatgtgtggtttgttttgtcttcaactctttcatagtctctcttcccaaagttttaagctttatagatcaagacagaagttgtgttgctaattggagttaaaatttaacttttaatgccagcagaagccaatgccatgaagttctgtactgaaattcctaagacattcttggccctgctttcctgtcttttgcccatgctgcccagagaagccaccattgaaacttccctgttattacacagctctgacatgacatgtcctcacttccctcactgttaaccagtctttgtcttctgcttgctgcccatgcctccgctgtctctcctcagcctgtgcactttctcgtggtgcctcattttacccggaagcctttgcaagcttgttccccaaatgtcaacatgatgtactgtttcgtgttgagagctttgcctggctgttattagctttctcagcaggatctgccatgggttctccattgaccactcaacctgcatgcttctctgcctctttatcttcaattctcttcccccttatgatgatctctctcactgatatgacatatacataccatttatttatgaataggatgctggttttgtttgtctgcttccctctcttgagccacccgtccagattttgttcagctggccgtagtggtgtatatctttagtcctagcactcgggcggcagaggcaggtagatctaggtcagcctggtctaagattgagttccaagccagccaggactataaggagaaaccctgttttgaaaaaccaaattaaaaaaaaaatttttgtttaaagaagaaaggatgagggctggagagatggctcagcggttaagagcactgactgctcttccagaggtcctgagttcaattccctgcaaccacatggtggctcacaaccatctgtaattggatccaatgccct

SEQ ID NO: 31365 - DNA, 1199 bp, Mus musculus
ctttgctgcacttgaatgacatgtgctcaggtaattaagaaattaaggccggctgcaagtcacctcattttaatgtgattttgttgtgttttatgaagtacatgttaatttttgatagaacgtctggccttaggtgtttactgtctacggcctcagaatagctgcttgcaaaggatcagccacggctctctgaggccctcttgtggtgtaaatcagcattgcattccatttcaaaaagttaagatgagctgggcgtggtggtgcactcctttaatcccagcacttgggaggcagaggcaggtggatttctgagttcaaggccagcctggtctacaaagtgagttccaggacagccaggactacacagagaaaccctgtctcaaaaaaaacaaaaaacaaacaaacaaaaaaagctatgatgatgtcttctcacaaaagtgttctattttcttcttcagtctaaaagcagtactgtattatttgcgtgctgtattatttggtcccttcatttaaacgtaagattctaaaacacacctttataaatttaaggtggaatttcagtgttggccactttgaacttcggtatattccagacatggaaactagagccggattcattgaaagcacctttaaaccgggtggaaacaaagaagactctaaaattatttcagatgtggaagaacaagaagccaccatgctggacacagtgataaaagtttccgttgctgattggaaggtcatggcgtttagtaggaagggaggccgcctggaatgggagtaccaggtatccgagaccacagactcagtagctctgtccccaggttttgtttgaccatacacattactagagggaggtaatgccattttggaatctcaggtatttttctctgctttaaaactgtgactttaagagacattttgtggagctggcaagatggtttagtcagtgagtatttgctgtgcaagcctgaggacctgcgttcagatccccatcacaacatgaaaagcgaggcctgaggttccaggtctgttcccagcccagggaaggcatagaaaggcaggtccatgctggtcggccccgtctgaccagtggattcctgtaatcctgtaattcctgtaagagaacctgaatcaaaaattaagatggagaagctagagagataaatggctcagtggctaagaggagctgcagctcttgc

SEQ ID NO: 31366 - DNA, 1216 bp, Mus musculus
cgagccattgatattttctaacacagcctaaaacacacacacacacacacacatacacacacacacacacacacacacacacacacacacacacacgataatagctcagccattctctatggctgccgtgggacttctgggaaagctgtctaatcagatgtgcttcacacactaaaacagttatgcagaagtttggctgcagctgagggtgtagataaaggccatttatgcctacctaccacttgaagagagccctgtgttccagctcctttactgaagggggtggggggagggcagagagagagagaatatatgtgtgtgtattcatgtgcacacgtgtactcagtgcttttaacacaaaaccatttttatgtttcagcatatgatggttcaagacatgctctctccatcccccacggagcggcctgaagccacagacatcattgaaaatgccatatttgagaacttggagtttcccgggaaaacggttctgagacagcggtcccgctccatgagttcatctggaacaaaacattccagacagcccagctgctcgtacagcccactgcctggcaactagccctcagctgccctcgaaggtggcagagcaggcaccctgaggaacatggctctccacagcggtggactcagattttatgctttgatcagttggactcgggaccaatttttctaagtcagactggatcacgggcctaacccagtttgatcttaactgaacttcaaggaaagggctgtgtaaaggacacatgaacttgttgcttgtcggtgtcccaagactagctggtcagcttagaaccttcacttttcaccaggcggtagaagagatcctcaaatggtctgaactggaaatgtctttaaagcacaaaagtgtaaaagaccctctcacatgggaactacatgttctagaaacgtgctttctagagatacaagggtgattttggaagtggttgttataaagctgacttcatttttttccctggtgagccgtgacccatctgcactaatttgcaaggcacatagcacaagctgggtcgccatttatgtcggtagtgtcatagtctgcagcagtgaatagcgtcattcttcaggtggtctagggagcgcgaagagcttttttgtactttttacctccaataatgggaaaatgaagcttttaggtattggtcaaaagatctgatttgagagttttgggttt

SEQ ID NO: 31367 - DNA, 1161 bp, Mus musculus
cacagacatgggcttgcttactgggtctccccatctccagctactattgctctctcagaaatcacagacagacagacagacagacagacagacggacgcacgcgagggcacacacacacacacacacacacacacacacacacgaggcatatgtgaacttttaaaaggagagagagaggcaccaataataagatgcaatacatttttttaaatttttaagttattttttatggaatccaggacttgctgactaaccagctttgctgcttagaaagctccagaactcttccggggacggtgctcagaggcactcaggatggtccagcgtttgacataccgccgtaggctttcctacaacacagcctctaacaaaactaggctgtctcgaacccctggcaacaggattgtttacctctacaccaagaaggttgggaaagcacctaaatccgcatgtggcgtgtgcccaggcagacttcgaggggttcgtgctgtgcggcccaaagtccttatgagactgtctaagacacagaagcacgtcagcagggcctatggcggctccatgtgtgccaagtgtgtccgtgacaggatcaagcgggctttccttattgaggagcagaaaatcgttgtgaaagtgttgaaggcacaagcacagagtcagaaagcaaaatagatatgcacattttttaagtaataaaaatcaagacttgatctaaaaaaaaaaaaaaaaaaaaaaaaaaaaaaaaaaaaaaaaaaaaaaagaaagctccagaacaatgaaagagcctgtctaaaaaaaataaaataaaacagggcagagcctgctgaacagcacctgaggttgtcctctgggacaagcctagatatgactcagtagtagagcacctgcctagcatgtgcaaggtactaagttcaaccctcaaaccttcagggtccccagacttcagaaaataaagtcagacaggtggtttgcccatgagcaatgacaggagtgtggttggattggccagccccacctactttaaagcaaggactttggatgtgttctgctgccctctgctggctgggagaattattgccaggctttccagtggatttggaaggcttcttttccccaagggagccagagagtgctcacctttgcttgcagggttgcttacacgc

SEQ ID NO: 31368 - DNA, 2157 bp, Mus musculus
aatttatcatttccagcattccaaaatttacaaacatcacattctttcattagtaagccttagagtactgtagtcaggtaagtatgtacatttactttatttgagtagacaggattttaaagattaaattacttaattgcggttctgttacttgtcttagaaaacaataatacaggtgattaagttgtcacaactttaaaattatctaacattagatcaggccactgccacagacatgattcacacacccctgttgccatacatgttttgtttttagtcttataaaaacatctcatgttccatttcctttctattcttttttcctcccaagttagaatatcaaagttactataaatggtttatgagatatttgaccatcgtgatatttctctttgacataagttatcaaaatatttaacagttaatgtaggttttaatttgggtttccatttgttattttaacctttgtaagagcaaagaatttttcagaatagaagaatctagcttttttttttctccattttctctacagataatccctttctgtcaacctaatgaagcattcaaacaagccatatgactcttttcaagatgaacttgaagattatattaaagtacagaaagccagaggcttagagccaaagacttgtttcagaaggatgagaggggagtatttggaaagctgtgggtacagagaagagtttgattccaggcccaggtatagaatgtttgatcagagactcccatctggaaccaaccattcctacccaagatcatgcagtagttcacagacagaagaccgggtaccccagtggttaccagctcatgacaagataagactaaactctctgagctactgtcaattcaccagggatggcttctcagaaaaaccagtccccttgaaccttagtcagcaagaatacaattgtggctcatatagtgtagaatctgtagttcacaagcgcctctgctcagaacacagtaccatcgaccctcaagtcagtcatagacaaatgcaccagaagaggaaaaaacatgtagaagagggcagagaaaagcaggaagaacggcccaaacatgagaggaaaaggagttctgaggaaatggatttaaataaacatagaagcatccaaagaaagaaaacaaaggcagaaacagaaactgtacaggatggtacagaaaagcttaagaatcgaaaagagaaaaaaacccgagatgtatcatctaagaaagaggaccgtaagcgtaggaaggaaaaaaaggaacaaggtgaagaaaggacagaggaggagatgctttgggaccagtctattcttggattttgaggctccttagatctcctgaggctccactgaaataacagtcaaggagcttggttttatgtgcattcatattcatgtcacttgcatatgtggacagaagtttcaacttctaacaaagtgaacatgaaatatttagtgtgctttccaacatggagattacttttctattttctaaaagatttattaacttttcttacatatggtagaatttccctttaagagagtggctctgcttttattgaccaaattgctgtggtagtggacttattttcccttgggagatcatttatttaaaattggaggattaactgatggcttttgtggaatctatttcttggttgggtttcttttagttttgagtcacatatttttatgctcactgtctttctctatgaagcaatttagatttcctttttttagatctaacttgcaatatattttctgggttggaaagtgaaataacataataattttatcttacatatagttttaaaagtttcagagacttcacacaaaatcagtttatattctgaaaatgtttataataaagtatcttaatttctggatgtttctttgtgtcagtgctctgttctagtgattctcttttggaaagagaaaagcagtaaccactttatattaaagattttagaggttagaacacactaaatggttgtaaaaattctttacctactgaattaggctcacaatttataataaagagctttgattcatgataatttttccaaatgattgaaacaaagaaggaatttacaaaagaaaatgttattactctttcctggcaatgctgtactttctttaaaatgactcaaagccg

SEQ ID NO: 31369 - DNA, 1099 bp, Mus musculus
tagaggtgcttgccaccaagcctggcttaaacctgagtttgatctctgggactcacactgtaggagagagctaacgcctgcagtgtgctggctttatgcagaattttgtttcatatgcgacttttcccgttgctatttgtcaagaaacagagcggagggaaattacttgttatcattctgttaaatgtcctgccccaggtgtcaaattatcatctctcaaaacaggaccacttggctttttaaactcttccagtagagggtggtagaaggttattgtagagtcaggaaagggggacattccctttccctggtgtgcccttagttacaaaaacagggagttgctagggaaaaggtcctacctattgcctatctatgtgcctcagcaaatggctttgttggtggattctctttgcagagtgtaaatcctgagtggttggggaaaggaccctcaggctcccccgctctgagttatgcctccccagccccacccatggagcccagccccaggcaggtcaactgccacctgtaggtcacagccagccacctgctcggtgctctggatctgacagttgtagcatttgaatctcaagtatacaaagtgcagatgtcttcattcattgaactgcgttccagagcctgtacaggtgggcctggtgactggctcagtgtgtgttgccaagcttgacaacctgtgctccatccctgggtccttcatggcgggaggagagagaacccattcccgctagcgctctgacctccacatgcggcatgtactcacccccccaccccccaacacacaaagtttttttaaaacatgcattcattttatcttggatttcaccaataaaaatgttgtgtatgactgttttttgtgttgtgatgtgatttctttgcctgtgactcttgcccacaaagcccaaaataacttgctacctggccctttacagaagacctgtcacaccctgcccaagagtcctcttgtgcccaccattctttattaattacttttttgtatttaattttctctgctttaatcactgctgtggctttgacttgaccctgactgataccgtgctattagacaaaccatttctgacag

SEQ ID NO: 31370 - DNA, 4483 bp, Mus musculus
aaacagatatttttctgaagaatgagtttgtttgcaatttgtaagtgaaactgaattatgggtacattcaagacaagagtgttccattgactgcagctatccaaggaccgcctgttcataagctatgctccagaggctgccgattcactcgtgtgcacggagggggtgctccagatgggaatcacacagggctttcttcactcttggtcttcgtttctgatcaagtaaacaccagcagttgtcattcagtgcaggtttttgtacttctatatggtgatttttttacttaaaagcagaaacagaagttgaccttcctgacatgtgtttaatattcctcctgcttttacagattctgacgttttcttgataattgtaagcttgagagtgtttgtggaagaacttactttcttcttatgtatacataattaaatgaaaagtcttcataggagtttgacaaaatgaattgtggttataaaacgaatttgcttttttgttgttttgtttttcttttttggcctaaggaagaaagctgtgataaatttcaaatttgcatagcttttcaatgttttgctctgctcccgctcttgcttcagagtcggcacactcacctgcatttgagttctgtctatagcccagcaggctgcctgtttaaaatcccatcatgaatttaacaggctgatgtgagaatgaaatagatattactggggttttgttgttgtttgtttatttgttttgcttttattaccaagaggtgctttttaataaatggatattgaagttagggtgttactaatttgatgtatggtttcacagtctagcatactgtcctttgacatctgcctttaagacttggctgagtgtctcattagtttatcatcacagatacgcagtgttatgcatgtgtatagaagtgtgtgcaccagcatcaaacattgtgtgtgtggaagggaagaagcctgtccattctaaacgcagttgccagtctcatcacttcaggtccttacgggcaggctctagcaactttccgtgtatggacctcgttttttgctgttttgtgtttaattagtatattgttcatgcctctcttctgcagtgtctcatctcatagactgtgaacctgtatattattcaaatggctacagataatgctcttttcttttgtgaggtctcttcatttaatgcactgcccagaaagagccatgtgtaagagttgttctctgtttgaggaactaactacatggaaaagacttctgacttaaacccatgaaatacttcatcttgagaagagtgctatgtggaaatcaccaaatatctcgcaactttatttcatctggtgtaaatctgaacatcaacataggaaaactgtcatgagaaaatgaaaaagcataaacacagaagcaacgagaaatgtgactcttgttattttaaaccacagacggacttgggttaagggaatggggacgacagctttggtgctaagttaatcagaaattgcgagcatgcacagtggtatgccagcctgggtgatgctttcctaggagagccggtatttgcttgtaagggaaagaatggtattgtagaaaaacccaagaaatgaccacgtggtcagtttcatggtgatggctactgtgtactgtgtaggttacctgggtcaagactggtccagcttagagtgcatgctctgttcatactcagcctagctcacagtgacttgtgcttcactgtcaggatgctctgtaaagttcctcatccctgtgaagcagggaaagaacagaggtgcctctggactgcaggagaaaggcgtcgtgccaggcagtatcctgtggagggaggagggtgtacgttcgtttactatggatagtttttcctttgaattaaattgtagcgtgtcaggctttcttttttcttttcttttcctttttttaaactttgttattcctaagccaaatttagtttttaggtttctttttttctctataacttattcttgccttcccacctcaagcgtctgtataacatttagactacacataaagtttatgtggtacagacatgcccttgaggttggtggaaaataaaaaacaagacccttcacacagttagctcaggccattttaaggacgaaggctctgctggtcctcctgtgctgggaatctctttgatggcctcttgtgaagctcatgaaactttaacaagtgtttgaccttacagcttcctctgggaggtcgtgtagacccagtgggcaagcaggacaagggcccagaactgaaacttgatcttaaaatttaccatggaaatgaggtcttaggctcttctttaaatgtgtgtacttttatctgtgagagactgactatagcagaagcggattcaaagaagacagaccttgaccaaagatgctgaaatacagtgttgggatccttgtactctggaaccatgccatcactgatgtcatgctcatgctacctagcatgcaggaggatgccatctgtttctttgagccttgttagagaaggtaatgctagaggaagactcagtcacacagataacaggcattggaaacagccgcactatggcttctttgagaccctatttccttttctggttgtggacaaggctgccttaggactttgctaacccaataaaacctttagattctggtgaagccagagcctctccacagtggctaaggttgttgttgatctttttctcctttgtgtgatcatcacagatgccatttctgttttattgatgattatatgagacttttaatacataaatgaacgggtactggtgcctctttatttttaaaaatttgaagaaaaagagccacctcatattcatagagtgtgtattttgtgagtgtgtgagcatttgattggaaataagaaagttattaagtaaatttttcgttttactttttccacagcagctaacgtgtagggagacattaaacccacaccaaatcatgaggggctgaggacccccaatcttcttctctaggtcgccaatcccacaggctgtacagctcagttccctatgtttatgctgtgttgttcccacctcagtgctgtcagcctttgggacagtggctctcaaaagccaagagctcttggtttatctgcacagtacaagctgctggtagactacactagccctctggtttcccagcgcagcctctcatacagtggactgacagcctgcactctgtttagtcagccgactcaggttatcttcagggaaggtatggaggcatggtttgtttcggttcatctccaggatgtatacagtgaagacaaaccaaatacttttcaccattgaactatctgtacattatctttggtaacactagactagtgtagtcttggggaacacaccgaggaaacatgtagcgagaatcacatacaaggcttggtgtttcataagcatgcctgctgacagctgtatgtggtactgcagtgtttaccataaacaggtacaggcttcatgagtttttcatactgatttacaattgagtagataccaaaaacagagtggcaagtgtattttagtagcagttgaggcaattagttttagggtgaatttttcactgttgattttactttaagatgtagccagagaaagttttgtttttaaggcattttaaagctgtagcaggcgtatgcttcattttcttccaaagaggcaaaagcagctagactcgcttacagcacatgcttcgctccatggtatgggtggacacctacacttgtcagtagcagtcttaaactcctcactgccaggcaggggtgggcttctgtaggatttagtgcctgaacatttcttttggaaggggctggagtgaatgtactgggtatgggaggggagcagaaggaaataggactgtgagtgagtgtgcatgtgtgggaattcatcataacccttgaagctagcaagcgaccgctgttggccgagcttcactcatgactgcagcgtgcatgtatctcttcaccatgtcttctctcaccttcactaaggagtcaccagatcatctggctcagatgctcaggatgtattcctttggcttaccccgtgctcctgggttctatggtgtttctataattatgaatagtgttgcactgtaatctatcatatagagctatatgtatggaaatttttgatcagttttttaagagatgtatcctgtttgcaaaggcacaataaaattgcatcttctagattataggcaataaagataacaataaaccttatttaacaaatcagactgatactctctgcttatttgatttggtgggggagggaggatgtctaacatatccagtagtttcagggatttcattttaacttaaaaactctgatatatttaatttataaatttcggactgataaaaaaatagagttttggaaaactataaaaaatgctttgttaatgtgtgtattcctatgtaaaacacatggcttcttctgtgtatattttttaaaatta

SEQ ID NO: 31371 - DNA, 1240 bp, Mus musculus
aggtcatggtggaacacttcttccgacaaggaatgctggatgtagctgaggagctttgccaggtaagcacatgccagtgaggcatagggaaaacaaacaagacagcgctggtggagtttgcagtgtctgcagatgggtcttgggtgtacctcaaactgtagatagatttgtaatattttaattatcatggataagtcattttgctagaaaaattttaagttcttagaaattataatgctataatttagtatctgaattgccctttccttaaaaaattagactcagagttaacattcaaattgttgtttctttatactgagtctgttaggttgattgctggtcatgagtcagagtatggaaagtagtactacttttcctgtgtgacccaggctcccctgtttcagcctccctagtgctacacttattggcatgcaccattcactccggctccttttctccctgtgatacagatgttaatagagcagaaaagaggaaagaaacaaaaatattagtgcttgcttttctgatacagtagagctatatcaaacgaaatttcaggctaaaatttatgtccagtgggcattgcccgtcgtgtttctgttggacaggagcaccatgtattcatggtagtagtagctgctgtgtattatgtgttttctccaggccacaccctgcttttcctttctactacattgtgagataggagttactgttcctgttccacacacaagaagtatacccaaggaatatacccagggccatccagggagcatgtgtgaaggaacagggggatttagtccccattcatttctccaaactccattctgttgcatttttatgttgttaaaaaaaaaaaaagaagaactcagaagatataataatgtaaagggcatcataaaccagtctataatctaagcctcttctgtttgaaacagtttaaatccatcgtagtgggtctagctttgtgccttttgaggtgtgtgtatccatacagacctcacagtaaactgtgtcattgaaaattagtttgttttcaagtaacagactcaagatagcagcttaaacaaagtttggttttcttttctagaaagaaaggtagtatgagaggttcatagcatctgtcctgtgaagttcttagacactccttgtagctctgcacttagtttccagtgagtcctcttcttgtggtcagacctccagctgcaccttacatcccaggaaagagtgtgtgtttacattg

SEQ ID NO: 31372 - DNA, 1228 bp, Mus musculus
gcttggttcccagttactggaagtgttcaggaaggattaggaggcgtggccttgttggagcctgtgtctcactcaagggtgggctttgaaatttcaaaagcccacaccaggctcagttcctttctttctctgtctgcgacctgcaaatcataatgtacgctctcagctacagcacaatgcctgcctgcctctcaccatgctccctaccttgaaaatcatggactaacattttaaaactgtaaaaaaagccctcaaataaattttttcaaataaatgtttttcaaataaatgttatcccttggtcatggtgtttcttcacaccaaagtaaccctaagatactcagcaaatgaaaatagccaaactggtttctacataaatagccatggagagtaaaattaagttgaagtttcctaagtagttgaatttgaatgtaatctatttggtggaaaatctatgggttcttgttcttgattatagtgatttggttttttgtttgttttgttttggtttgttttttgatgtttttgtttgtttgatttgtttggtttggttttatatttgtttgtttgtttggttggttggttattgggttttggttttttttttgtttttttttttttgagacagggtttctctgtgtagccctgcctgacctggcctcacgttgtagaccaggctgtccttgaattcacagaaatctgattgcctctgcttcctgagtgctggaattaaaggcatgtaccaccatatacccttctgaaagttgtatattttatataaagaaatgactaaagagaaaagctatgtcaggaaatgtgtagacagtttacttctgggcttcaggacactcatataaaacaggtgccattgtgggctggagatggctcaacagttaagagcacttgccactcttgcagaggtcctaaatttagttaccagcacccatgtctgtgtctcaaaaccacctgtaactgcaactctaagggatagcctcttctggcttccctaggcaactgtgctcacacgcacattccctacacagacaggcacacatacacacaattaaaataaataaatggtactaggaaaagtaggtaacttgaaaaactgcccaccacttttgcttaagtaaaaattcaagacattttataaagaacaaaatattggaaatagaagaaagatgaaataaatccatatatatcataaaaacatacacacacacacgtc

SEQ ID NO: 31373 - DNA, 1208 bp, Mus musculus
cacaaaatggtctacataatgttctgaagtgaaattgtatgcttgtctcatttaagttccacatgttcagttttatacgagagagcaaaatgtaacaggtgaatgaaagttcttaataagaaaaggttttaagagatgcagtgtggcctgcagttcagctgcttggtcattttcaggacattcctgaaagcaagagttcaagggcagactagacagtggctcagaaagcaaagatttttcgggaaagtctgggtgttgtagtttctgagacattaccatgcattcgttttaaaaatttaatccccacattaaaaatgaaagtaacattgtaaaagtaaagactttagagttggctgttcatcatcctgcaaggtctgtgtcttgcccttaactttttccggtgtgttattttatgtgaaatggaagttggatgtaaacttgatgagatccaagttaaactaatttagcaagaatgtctgggcgcgtggtggcgcacacctttaatcccagcactcgggaggcagaggcaggcagatttctgagtttgaggccagcctggtctacaaagtgaattccaggacagccagggctatacagagaaaccctgtctcgaaaaaaaaaaaaaaagtctcacaaggaagtgtgaacttcgtactatgtacatgttaaaaaatagttctgggtgtgtactggctagttttgtgtcaacttgacacaggctggagttatcacagagaaaggagatccagctgcaaggcattttctcaattagtgatcaagggggaaaggccccttgtgggtggaaccatctctgggctggtagtcttgattctataagagagcaggctgagcaagccggggaagcaagccagtaaagaacatccctccatggcctctgcatcagctcctgcttcctgacctgcttgagttccagtcctgacttcctttggtgatgaacagcaatgtggaagtgtaagcctaataaaccctttcctccccaacttgcttcttggtcatgatgttttgtgcaggaatagcaaccctgactaagacagggtggaaatgaaagagatcaccagtctgtgtctgggcaaggcaaacttctgttatggatcaggaaggtgtgctcagaagagtcaacttacagagacagcaagtacacctggtttttattcttactcaggtggtaactgtgccttttccacact

SEQ ID NO: 31374 - DNA, 2492 bp, Mus musculus
cactgccctggcacgggtgtgagtggagtctgtaaaaccaaggaccttgttccttatgcagtgggttttaagccgttcactctcccttcaggagccttgggcaaagcacccagtaaagtaaccgatgcccttcctgagcctgaacccgcaggagcgatggctgcctccgaagagggagaagaggaagaagatgaagaggacctggaggctatgcagtcacggctggccacactcagaagctagggccacccagttgggggtctcaactctctggtgtcctcctctaggtgtgtatctggcctctgaggagtcaccatttcttgtatctcttgcactacacctctgctgtgaagcattacatttggagagggttctgtgctggtatatcttcacgatctgcagaggatttaaggattgcttttatgaaggtggtgtaatcaaatgtattattttcaggagcataaatagcagaagtatcttccttgggggagggcaaagaaatccattttctcatgaagcaattttgagaagagtagattgaatgatgaggactctatatttggtgtgtatgtgtaaaataatatattaatggatgtcaataaacttctgctttagctcttggtctcattgtaaatgtcacatgcaatgaactcaagatattaatctcccagattgtctcagtgttggccttggaaagaggacatgctatctccaagcatcgggacatgggagcttagcagaagtaccttcagctccggggccgctggtcctgctcttcacaggctggttgtgggggccactcttgtgcattttgtcatttgtctaaccttcgggttaacgtgctgtgttgactgaatgaccatatcatacactggtgtgtacaagggagtttttacagctggtaggcattcttccccactgcaagtgaaatgcaggacagttagatctgggatcaggactcttgcagtccatccctgcttggagctaagtgtcttgtacccagggacgtagccttaaccatgagcaggaagagctaaccaggaagaggtttggattatgcagtgaaacacacacagcagagcatgctttagatgcattgagaaatagcccagcagtagcactgtgtggagcagtttgaaaagctttctggtatgcatgatcttcacaaatgaggacagctgtcatctgaagtcacaaaccctaaagtacaatagccagtatccgccagtattgtacagaatggctttgttacccaaaacacaacccatgtgctgttcattgcttcctctaatcccttggcacccactgacccggttgctgtctccatgggctttcctttcccagcctttcagtatgtcttccctcacgtggtgatatgcatttacgttcctccgtggattcatgacttgactgttcagcccttctcattgagcagcgttccattttctagctgtaccacagcttgtcttgaaggccacctggactgcttctgagtttgggagtttgaagcaatgtctgtagcaggtttccctgtgtgttttaattcctctggataccagagagctcaaccctgggatcatgtggtcagcacaaacctgtgctgtaaggtaaaccagccgtgcagagcacgtactgtccccgtctcaggaggaagagttctgcctgccatcctgtggctttggcagaatttgtcatgagggatttgtgttgaagtaccctgggcatgtttttatacttgccttctctgtatcttgtttgaaaatgttgacatagtggccttgaactcatgacctgtctgctctaccaccacactgagcttgccgcctggatttcttcgttgttggtgtttgttcattttataacctggattgtttgttttctgattattcaagtttaaggacctcttacagattttgaaccaatcatctatcagattatatcctattctctgttctattctctcattgttgactgtttttcaaagctgaaggtttcttttttacttttaataaaaccctgcttctcaattattttgtatattatgcctttggtgtttaaaaaaaaaaaagtattgggggctggagctcagcagttaagagcactgggtgctcttccaaaggtcctgagttcaattcctagcacccacatgtctgtaactccagttccagagaatctgacactctcaaacaccaatgcacataaaataaaacgaaataaattataaaagtattactacgggggattggggatgtagctcagttgtagagtactgacctggcacgcacaaggtcctgggttcagtcttcaggtaccaacacaggcacgaacccacccacacacacatgcacaagcacaagcattgctcatgcatgcacacacacatgcatgctcacatcctaatccaaggtcatttaaaatctctatgttacctagtaatttatctggtttagttacgtgtatttattgtggtggaatgtggaggtcagagaaca

SEQ ID NO: 31375 - DNA, 1628 bp, Mus musculus
ttgctacttgtggttgagcaggattggaagaactgaacattgggatcagatggggctgttgttcagagacttcgagtagtggtgtgaatatgtgtgtgtggcagctcacattgcaatcccagcttcactaatccagagtctgaggagggtttgaaggccaccccgagctatacagcaacatcacaatttaaactaaatcaacagtgaattaatgcatattgcttcaggtttgaaaactacaagtctgataaaacactgtatactcatccttggccaaaactgattgtaagttcttcagagaaggatggtgtaggtatggcatactggtctccaggagccagaggccctcaaattacatgttgagcattaatttaagttctaagagaagtttgtgtatgtggtgaaattattcttggtgagagattttaggttttaatgaaacaagtaattttttttcttctgttgctttaggtgaaaaatgttatctaccatgcagtgaaagatgcagttgctatgctgaaagccagtgaatccagtttgggcaaaccttaactcttctctgcacaatggagatgaattattggcagctgatcaaactcttcaggcaggattcctgtggactttgagatttcctgttacctcatcttcttttttaaagtacacctgacttgggagggtactgtctctaatgtatatttctagtgtttacagacactaagtgtgtatatgtagtaactatttacagaccacgcatccttatactgtgacttcacctagatcttctaccaagctgaagaccctgctggctctgaaacaatccttgcagttactccccagctgttcgtctggacagctcattcaagtggatttttaactattagggatcactgcgaagtttcgttggattttattttatgtccttcagagcaccctcccccacccactagggtccagaagagcaatggaggaagtgacagctaatggtgcagttctaaatatatattgcataggactggcattatatagcagaaataactactgtataattcttggggttaaccatctttagttaatggaattttaatttaaatgaagctttgctaattttaagtggtaagcattttgcattaaaatattcctataatattttgtcgctgttctttgtcctttattctttgtttactctctcgaaaataaaagggctaaactattgaattagataatcatttcttagtgactaatacagcgctgatctgtcctgcttttgttaagagccatcaccagtttgaaaatgggaactaaccaaaacccaaatagtgactgttaactgctagggttaggacagctgcacctaaagtcctcatctctgtgaagggacagcattggtaaagaaggctaccttgtggtccctctcctgggctgcagaaggaatttgttcattagtgctaagcagacaaggcctagagtgtaggtgttaaccttccaagtaataatacatttctaagtctatcgaaacagttggtgaatatttcttaaaagctcctttgtagatttggatctagaagctacactattgcttagaaatcagctatgtcagaacagcagcgtagggaagccaccttcaagcc

SEQ ID NO: 31376 - DNA, 1200 bp, Mus musculus
tgtcagggctgagtttcatcttaacattgcctttggaaagacttaggaactcacgctctaatgagcctcgagggtatgtgtggacagcagacaccttcaaatctgtgaggtcctagctgcagtgcttctaataagatgtctctctttctgctgttgttggtttacttatttttacttgttactgtctttgctgtcaagatccagttctaggagagattgtctatgaaggttacatgataaacttgggtcaagtacaaaatacacatctctctcatataccctatctagcctgccttttaagagaaaaacagtgattattgtttgttttacttaggtttttttaaatccttccaagtgactagcaagtcattgtctgccattagccatggagagtacagaaaaacaggacaggatttattgcctgaaataatatttatgtggtaattagaagttattaatcaatcttgttgttttcccacttccagattacaattcaacaagcatggtgtgttgcgggtagaaggcttcttaacaccaaacaagtatgacagtgaagcgattggcttgtggctgcctttgaccaaaaatgttgtggggactgatttggacacagcaaaatatatcctggccaatattggagaccacttctgtcaaatggtgatttctgagaaggaagctatgtcgactattgagccacacagtaagagcatctcttagggggcaggatgtgtgagtcctacttgacctctgtttctttctgacacctaagttgcatggattttattttcaccaacatggtgatactatcgtgacattgcagttttctttttatagtaggtttcccctgagatgttctgtctagagtttgttgtggaagaggtctaaggtgtagcatcaccttttggtttgaagggtcaatgtgagttgttagttgcatttgcacagccttaaccagatatataggctcaccagaagctgggatcagacctcgggttgattacaacaaaagattcttaattcgtggtacatagtaaagacggtaagaccagctaggcataccctaagcctcctgagtcccacaatgtcaggctaggttccaggcatttgaatggaaccagctcagatggagtcaattcttcccacatcctggtttgaaaggatagctgcagctgctaccttagtttgagactctgctctttc

SEQ ID NO: 31377 - DNA, 3584 bp, Mus musculus
gaaaaaagttcccataggaactataaaactcagccaagggctggagctgtcccctgaagcaaggaagccatgccattctgtatgcccttccttctcttcagcctcaggaaggagcagtggccttcccggggggcctcagcctcacctcacagggtgcaacgctagaatctgattcctgttgtagggaacccagctctacccaacaacagagggagctggctcaagtacccctacctgacgctgttccccaagattccaccctcaagcccctctctctgctttctctctcaggcaccgcctagaaccctacgatcccgcttcaggaagaaaagtacctcatcctcggccactgaaaccacgtgagatgagccaacagccccggatccacacatgtctgtctcctctgccttaaagagctagtcactagtaccatggaagtccgcaggctgggtgtgcttcgagtgtgcagcccacggacatggcctttactcgctcccctcttctgcctttaagactcttctgttctttcctttttgttcctgctggggagaggctaaagggaaaaggtggtggtggagggtgacctttacgtcttctggggttagtgattttccccaattggattgtcattgtggccgcagtgtttttagatctataagcactctttccatgatgctgctgagatgtacatttgtaatttgtttgttgcatagtttttagtcctgtaaatgcaaacgacgtgatcttttttaaaaacccttttgttgttcttggtactaatacattggactatggtgtacatagttacagcttttggcttaatgtaatgaactcgcaagggctgccagaagttctggtgagagagctgcaaaaacaaaaatgtagacaaatattttaattctaggcaatgtctccaacttccttacaaaggcagtgccagtaaggcatcccttctcctgcaggaaggcggtggtgtgcttctggcggctgagtggttggtaggtcagagcggaggcaggagtgcagtgttccagcaacaggaagaaagttggtgggcatcagggaagagggaggaagagtacggcttcttcagttctgggtccctggctgtcctaataggtttgttgtgctgtacctaatctcacccttcctgccctttggggtcaagaacagaagcttccgagccctttggggagcactggccctgcttcaggcaggccagctcacccttacttagcacggccatttagggaatgaagatcagctgctggcagaattgtgagtatctcagaagggcttggcaagagtgtttctccttcagggaccagcgctgtggccgacttctccaggagcctacatctgagcaccttgttttagagtacacaaggcaaaaagaaaagtctagaactagcttttgttacagatgtgctcaaaacacatgagacactcaaatctcaaatggtcgccagaaggcagggtctagggaggactgaggctaagccacaggcagctgtggctcttgctcctttctggcttgtgtggaaggtgaatgggaaggactgacactcatgctcactccatgtcttcgtggatgttttatacaagccaggactgcagtgagaattttgacaagtctctgacttagataacattgcgttgagggagctgccctctcctctgatagctgagccaaattgtagggctagtctgtgtgtgcgtagagttggtgttttcgttccatggaatgcatgcagcagtcacaacccagttactcctatttggattatatttgttcacagctatgccctgaaggctagagaaatagtgttgtataccacatagaactgtcaactgactgcaaacaggctcaattacaaaccgctctggtaccgagctatgcaaacatgcactgggagactgctccatcagctgggccttggccatttcacaaagggtttcagttgcgagttcattgctgccagatacacctaatggaattttccaaaggtgattttgtatttcagaactaacccaagagctgatgactgacggtaaatagtctgcctgggccccatatccatctgaacccattaagcaaagcatctgccctcttcaagctcaccccacagctccagacaagagaagtgacacccttcaaacataccaacgtgtcagctgggtgtagccaggatgaagaggaacaggtgcaggaaagcctgagagaagcagctttgcagctccccctccaccccccgaaataataaatggctttagagacagagttcaagtcctagtgtattttcatcgttttacaacaggaagtcataacacatcgaggctcttgagtttgtactcagccatgccaaaacccagtttgaagcactcctcagacatgctgtattacttctcgctcaagatttaaaatataaaggtatctaaatcgttgtcttattgtaaatgtaactccttttccttcaagtgttgactaagttgtttcctctcttaaagacactcactgtacagccaaacacagctgtcttacttcttgagaactgtgtttacttttctgacaagctgtgtatttgtatgtagactgacatatgatgtgaatgaccttgtatgtagaagtgcggtgctctgtctacgcaggataaatgaatgtttctagttcgctgacttaagacacaggctgtttacaaatcgctagctcgaaggtctacttgtcgcggctttgagttactctccatttctgcagaggtgaggtgcagtctcctgctcatcaactggagatttagtcataatgcctcctgagtttgtgtgaatagcttgctcactttgctggcctttgatatgtatgttctctgtggtaaactgtccatgtgtttgtattaagtgcttatcaaccacaaccatcacgtagccatcccagttcttcaccttgcacagtatttgaagtattagacgtggtggaagatgtgcttcatcctctgacagtggacgctcgaagagctcatgttccagattgtgactgtgcgcatttcctctagtttctttctgaaatctctctataaatgagtacaattaatagtatactggactgtgtatctacaggatgtaaattgcagtattccaaaggctgaagctctgctgttttgttataatgcctgataaacatcttgaataaagtcttaacatttttcttttaaaaaaatagtgtaatgttgggctaatgagaaaagaaatactttttaaaaaagatttattgccaggcagtggtggcacatgcctttaatcccagcacttgggaggcagaggcaggcagatctctgagttcaaggtcagctcacagagtgagctctaggacagccagggctacacagagaaaccctatctagaaaaaaaaattattattttggtagtttttaaacaattaaataattattgacctagatcagtaagtcattcctcaatggtcctaaggaggactaccaggagatgaaaagatatatgagataggaaagctgtgtcttattccagacaagtttgtcaagaagtacagcatcttttttttaattttgttttgt

SEQ ID NO: 31378 - DNA, 1199 bp, Mus musculus
aagctaaggagggagacactgcacagccttagacttttctagagtcgacatggatggttcagatctctgttacatggcctcagtgccttggcttcccctgtagccaaggacaggctaggcagaggacagcggccacaggctgaagtagaagggctgcaggcacacctcggatggaaagggaacttcttcatacatacagcttttgtatgtgggtaggggagcctttcatcaaagccaagtttttagtttgacaacaaagcagtttgctttagagcctgcctaaatgatgttcaagtgtatgcataactgtttatttacatgtaatttattgaacacttgtcatatttaagcaaatctgcaaaactctgctgcacctcatgccaaccttatacaatcttatacacgagctatcatttatccctgatataaattgaaggcactaaagcttatagaagctgaaataaattactctaaaatatagctaatgcatcccagatcccctgtctaactctttggaatcttgtgtacttcctttgattttctaacaacataggatactcatatcttgatcaacaaatgactgtgatctgacactagtagtaaatactctacccgttcaagtctgagttgtgtgactttgctctctacctgtcaactctgttggtgcataaccctggcttagtaaatgagtaatgaatgaatggatttctagtctttcttcccatctcttcttcctgttttctgccctctgaatctgctgctttagtttctagtctgtgtactgtaaaaacaagagaaccgaccacacttgaaggtctttgtgacctcccagtgaggctagagtgagcctgctgccttactgttggttggttggtttttgagatagagtctcaattagccccagctggcctcaaattgatgtgtaactgaggatgaccttgaatttctgatcctcttgtccctacctctggatgctgggatggatggatgaaagtcatgttatatcacatcctgtttatgcagtgctggagacagaacccagtaccttgtgcattctctatgacactatgatagcgatggccctggtgcctggtgctcatagtttcaaggcaagggatgcagaagtgctatgggcatttttaccatccacagtggctctgcacatacacaagcctgttctaacctgcataggcaatccc

SEQ ID NO: 31379 - DNA, 1250 bp, Mus musculus
gagtgcttgaattacacatatgtaccctatgtctagcttgtgattttaatttaaataatctttctaaagtgttaaattattaatcctcttctacacatgctttttaacctgttacttattgcaaagagaaacaacccaatctctgtaggtctggctttgctctttgggcctatataccataaattatggagcatctgctgctgcctttgcaagttttaaaatgtctttggaacattatctcataggctggctataagaaaaaattatggaaaaagtcaactgcaagaaagaagcgcttgagggaatttgtgttctgcagcaagacccagagtaaactcctggataaaatgacgacatctttctggaagaggcgcaactggtacgctggcgatccttaccagatgtaccacgatcgaacaaacctacgagtatagttcagagctatcatagttcccagctatggaatgtgggtctttgtgtacataatgcccttgcaaagtgagtatgcgttaaactgtaaactgtaccagctgatcggcaagcttagattaccaccattgtgcattaaacattcccagagttggtcatagaactaaaagttaaatttattgtgcattatttcaaaaaactggtaatggctttccttatttctggaatcttggatgaggaaaaacacgaaaagacgctcaacagtgggcctttgtgtggaattgagatggtatccaggtttttgcacatgctaaacagacatcttacatgcctattcccaatatgacacatgctgtgtttaaaaaataaatacctaggaactcaggaacctcctcactgtctcctacctgtaactctctgccccagctttggggagggcaggaattggatgaagcaagagatggtgggactttatgccttggttctactgtgagagtgtgtggtgtgtgtgtgtgtgtgtgtgtctactcaccatcactctctttagtcttggcttttgtttatgtaaagtttctatctctcagactcccttcagcctgaacctttgggttccctttaacattacaaccctcaactcttgtcatctcttctctcttaattgccagggaactctcattgggccatcctgccttttcctcgtaagtctgaatcaatgccatcatgcaatgtagagcttatctgtttgtggctaggactccacccaggctctcttagttgtatcagtaggttcatatggagtaaaaaggtaggtgtgagctgtt

SEQ ID NO: 31380 - DNA, 1199 bp, Mus musculus
tagacacacatatgatgcacagacagatatacaggcaaaacacccatatacagaaaataaaaatacttgtgtgtgtctgtatgtgtgtgtgtgtgtgtgtgcttgttttgggggggaggggtagggagtgtgtctgtcagtgtacttgtggctcacaggagaatttgtgggagttggtttccttctgaatatttgttagggctaatcatagttctacataaaatggcatatagtagtgattgtgtctacaagctgtctttttagaagtaaagttagtaaattagaaagccaggacatgatgagttcagattacactgatttggagttcttagaaagagcagtgtatgctgcctcacacttattattattattattattattattatcattttattatagactcacccattattttgcttagaattgatagtgctttagttgctggatagtagtttttaattgctactttgactggaggatttgaattttgtgttagcttctttctgcagtatattttcagtgacagcactaacactttgatgttacctgtttagctggcaaactctctactgatgacctgaactcactcattgctcatgcccatcgtcgcattgatcagctcaacagagagctagcacaacagaaagccacagagaagcagcacattgagctagccttggaaaagcacaagctagaagaaaagcggacctttgactctgcagtggcaaaagcattggagcaccacagaagtgaaattcaggctgagcaggacagaaaggtagtggaggaagagaatgacctgacatttgaagttaaccttgtttgttctgtcactgcctgctagtggtaaatataatttgtgccaagctatcattagagtggtgttttagggttttttttttttcttttttaaagatttatttatttatttattatgtcagtgttctgcctgcatgtatgcctgagaccagaagagggcaccagatctcattatagaaggtcataaactaccaattggttgctgggtattgaactcaggacctctggcaattgaaggtgtgattattcaaaggaaaagagatacctctgttcaccatttgtttgtttgtttgtctattggcgtggctatgtttttggttttgataattttgtaattatatttatatacagaaaacttagtgtgcatttaaccaaattta

SEQ ID NO: 31381 - DNA, 1597 bp, Mus musculus
gggtacttggctgtggtgtggacttgcagtctcccagtttttagtgttagtagaatcaggtcctcatcaaacagtgtcatctcttgttaatttgtgaaaagactgactctggccaagttaacaagacctgttggatgcagtgtattgaaggtgcatctggtgtatgtgttcgaggaagatagaaagtatctttctttgctttatatcattttattattattatttatttaattaattaatttattttttattgtaggtcatgcagttgctgaagaagaagccagaaaagcccaccagctctggctttcagtggaggcattaaagtacagcatgaagacctcatctgcagaaatgcctaccatcccattggggagtgcagttgaggccatcagagtcaactgttctgataatgaatttacccaggctttaactgcagccattcctccagagtccctgacccggggggtatacagtgaagagaccctaagagcccgtttctatgctgttcaaaaactagcccgaagggtagcgatgattgacgaaaccagaaatagcctgtaccaatacttcctttcctacttacagtccctactcctgttcccgcctaagcaactgaagcccccggcggagctctaccctgaagatataaatacatttaaattgctctcatatgcctcctattgtattgagcatggtgacctggagctggcagcaaagtttgtcaatcagctcaaaggggagtccagaagagtggcacaggactggctgaaggaggcccgaatgaccctagaaactaagcagatagtggagatcctgactgcatacgccagcgccgtaggaataggaaccactcaagtgcagcaagagtaaggcctaggaagagttgtgtaatgtcatatttcatatcaaagaaaatcagcattggtatctgcagggtttgcaacaagggtcccagaattgtccagaagtgagcaggttccaagtcctgtgtgagatgttaacacctgttgcatttaccgtccttacactgctatcatgccaatgaactccaggaggctttatttgcaacttgtgtaacacttcctgttttttaggttttactgatcaggcttgtgagccactcaaaataatgtttgtgatccctactattgattctgcccttggagcaaactgaataaagcaacacaatgaaaactgagtactctatcccttttcaaagctgccatttccagtttgttgtgtgagcaggaagcttccttgagaagcagcatcagtggtaggaacttgtggccacagtttgggtctgtgagctgggtaacctgaatgaagtccaggacctgctgctttgggtgaatgggtcccctcctgacagtcacaatcaggagtgatgcagaagccaaataaatgccagtgtgtttatagttgggaatctagcactcagcgattgagaggcacaggaaacagtctgcctcccacaggaaaagttgtttgttgtgctggggtccagcacacatgcatctctacctcagttctcgagccaccactctcattcctgctgtggtgctgcttcccagtacctgaagctcatgagcctgga

SEQ ID NO: 31382 - DNA, 1099 bp, Mus musculus
gaatggcaggaaaaaataattgtaaacagtttttggtcattcaatcctaaataatacaagaagtatttgcctagattttatggcatatcagatattactggtggtctagaaatgttttgaagtacacattagggtatgtgtgggttatatgcaaatatgtcaccatatcagcatatagtagccaggcatcagtgggattcttggtctatatccccatggataccaagtggacactgtctgcagcaatgggcttgccttatacttggtgttctctacaggaaatacaaggttactttaacatttgagagacattttttctgtagctctcttgattttgatggaaactgattgctttgttagccagctttaaattccatgacatttttctagcatgattagatgctctaacccaaattatgtgctaacatgctgtagatacttcagtaattacttggagattaggtgggcattaattgacttcatggtgctttgctcttctcactgattgtatgaatatgacaaagtattgctgtctttacggtgatctcatctgcttatgagatgagctaaaactatcttcagaggaatagaaatagtaacattgtgtttcagctttattttggttagctgtgtttttactggtttttttttccccccttcatctacctggtaatttgagaaccctcacttgcaacataccatcatattattcacctcttttatccaagaggtatgtataaccttacattatcttgatttgtatataaattgaccatctctgttgagttgttagaattgttaaagtatctgctctatatatgaattaagaacagagaattcactgggcgtagtggtgagtacctttatttaatcagaacactcaggatggggaggcaggtggatctctgagttcaagggcagcctggtctacctacagagggagttccaggacagccagggctacataaaccatgttttctggaagaaaaaagaaataaaagagttcagaggtgggaaaaaacagtgactgctcttccataagacccaggttcaattcccagcacccatgtgatggcttaaaatcatctataactccagt

SEQ ID NO: 31383 - DNA, 1141 bp, Mus musculus
ttaggtttattatgtgagtgagcgggtgttgggttttttggagttcctatgggaatgagaacgccagtgcttttggttgagcaccaggctgtcttagggactgagccgagctcccacactgagactgacatgttagagcagagcttgtagggagctttccggtgtgtgtggaaggtgtccaggtgtactgtcttccccagttctacccattagatgtgagtgacttgtttctgcctcattctcagttgtgacaactgaaactgtctctaggcattgccagtgcctcctggaagaaacccgcttcactgggatgccagcttcccaagagtaggcgtcttctgtgttgtgtgctcaccttcccagttggggagactttgatgatgttcgctttttcctctccagcaccgagcttatgcacaggcactgaacgtgtacacagagttattaaataacagacttagtggtgagtttaaggccctcacacctctgtcttcctctaacgcagtggttctccaccttcctgatggctgcaaccctttaataacattcctcatgttgtgctgacctccaatccataaaagtattttcattgctacttcatatctgcaattttgctactgttttggattgtaatgtaatacctgatatgtgaacccagaggtcatggcccacacagatggggaactgctgctcttactaagattcagtgaggtctttggattttgctctagttgttttggggcttgggagggtgtttttgtttgtcttgtgctcataattaaaacgggagtggagaactagttctaaggccttactgaggttagctaagacaccaagactgaccattatctcattttcagcttttatgaggtgaattttcagcctcacgttttgttacttttcccttacagctgatgtatatacctttaatgcattgattgaagcaaaaacattcatactcaatgagaaatttgaggaaaaatggaatgatatactggtaagcaagcagcttctttaccttcagctaccttactagtaaaggttaacttagcatttctgtggagcagctcctcagagcctatctaccaggagggaagaaagcactgatcatcagtcaccatatacagcaagaattcaggaa

SEQ ID NO: 31384 - DNA, 1205 bp, Mus musculus
ctccgttaacctgacctagaaaattcctcacaggcatatccggaggctggtccttttggctatttttgaatctgtcatgttgacagcattaactgtcattagaatgggagtgctttgaaggtagagcagtccctttaaaagcatcttagaatccctagtgcctcgcttagtacttgcagtaaaggagttctcatttgaaatacattagaaacattagcaaatggagtaaaagcaaagtatttagatcaacctcaggttgaggcccttagttgaaaatatggagtgaaaatttatgtttgaatatttttaaattttcatcaagtcaaggagatgcctaaacagccttctgtccaggctgcagacgtgtactggcctttctcgcttacttgtatattctgttgtgggctttgtactaagatgtaggtgttacgtggtgtaggaaacaggaaccagaacagcctcgcctagtgtcaccctgccaccttggcctgttcgtagtcattcacttctcctcttgttctagtgcttaatgcctgagtactttgagcctcagattgaagatgtaagcgaagctgccctggaggagcgaatcagactcagaaaagtcagagcttctgtggacatgtttgaccagctcttgcaagcaggtgactcttttcagtcagagccctccttcagcatggggaccttgtatacagtccagttagcttggagtaaaaatagcaaacaatgcttactctgcttgctggcgctgtttgtgatttaattgatatagtatgcataattcattttctgctcctagcttcaccgtgaaattataagtgaagtagagctgcaggtttattcccttctgtcctgtgcactggcaaaggaagtacatggcctctgtttctagccttaggtgtgagaaggcagagccaaataaaagagaaaacttgatctttattttatgtgtgagtgctttgcttgcatgtatatctgcatcatttgtgggcctactgcctggggaggccagaagtgggcctctgatcttccttaactgtacttataagattcatttattattatgtctaagtacactgtagctgtcttcagatgcaccagaagagggcgtcagatcttattatggatggttgtgagccaccatgtggttgctgggatttgaactcaggacctttggaagagcagtcggtgttcttaaccac

SEQ ID NO: 31385 - DNA, 1142 bp, Mus musculus
gaaatacttgttagatggatgaatgatttacagaagtacaaggccagaaatgtgtgacaaacacaaaagcataaaaccaaactgtaaaaccaagaacacaactgacagcagcttgaccaaacgtagacacaaatgccaaaaatctgccgagtaactagaaccagatgtgattaaataaagaaggcctgtggaactggatgagtttgaaacacatttgccgtaagacagaaggcagttggcaaatgttgaggccagtagtaactccggtcctgtggtttgtgaggtggtctgtttctaagtgagggtgtggagccgagagtttgggctttatccgaaagctcttggtagagtggcctccaagcagatggttagaaatgaatgaatttgactttaaatttgtctttattctcttcttgtccttttgatttgcaggatggccagccattggcaggactgatccaagatcacatggtttcaggtgcaaacatgaccattcggggatgctttttcacccgggaacagtacatggaactggtgtaccgagggctcacagacaaagtgggacgcgtgaagctctttcctcccgccatcctgaagcccttcccactgtggacaggaaaacaggtaattgggagaatcgcagccagtgtataatttaaaaggaaataaaactcttatataacagtttcaaaactgttctaagagatcctagaccagagacagaaaaatctctaatcatgaaataatgtgatttttcttttgggtagaaaactcaaaggtgtatctactaagaacaggttgcacggcttctgtttattgactctaacataacttggtgtctaacttgattcaaatacagtgctaatggcaatggtgttacacctctaataataagtttcagtgggaaatactaagggcttttctgagttctttaaacttgttttcttagtgcttaaattcaaccttctctctttaggtgataattgcaaacttaatgttaaattacacattcaaggttattagagaccgaattggaattcaaacccaggattttattagtgcctgaagtaaccatataatagtatccatggaaatcaagtaatggagtacactacagtatattcttctactgttgcctgaac

SEQ ID NO: 31386 - DNA, 1074 bp, Mus musculus
gttattagacgcgttctcacgaccggccaggaagaacaccacagaccagaatcttctgcggcaaagctttattcttacatcttcaggaaaagagagcaagaagcaagagagcgaagcaagagagagaagccagagagcgaagcaagagagagagagaacgaaaaccccgtccctcttaaggagcattctccttcgcctcggacgtgtcactccttgattggctgcagcccatcggccgagttgacgtcacggggaaggcagagcacaagtagtcataagatacccttggcacatgcgcagattatttgtttaccacttagaacacaggatgtcagcgccatcttgtaacggcgaatgtgggggcggctcccaacaagtatatagctttgcttcagcaaatacagttttccccctaatggaatccccttttgggtgtcagtcccttggtttcatggggttgtgcacatgttgcacatggtgttgtgagaggttgccgagtctggagtgaagggttgtaaggctgctgatgctctagagaccccaccattggccccacacagcatttccaagatcatccacagcctataggcaagaaatactagtgggtttatgtcgaatgtttcaaactctgacacacacctttgagtatatcaaaaaatccctgagctggactgtgaactaccatatagctctcgactgtaatcccaattagtcaggagcctgaggcaggaggatcacaagttcaaagctagcttagatgacatatgaagactttatcccaaaactaaacagaaaagtttagggaatatttgagctacaggatccaggtctgggatttgcaggacagcggtgaactccagcattgcttctcactgcagagtggcatacagtgtcctcaggatgcatgagggagtgcacttagggcttctgactcctgttgcttttgatccacgtgtccctccgcctcaggcaggaagagagcgatcccagggcatcacaagtctttaggagctattggggttatgaaagccaggattctagaatctaggaaatgaacaatctgcatggctagga

SEQ ID NO: 31387 - DNA, 1984 bp, Mus musculus
gaccagtcctagaagtggagagggcatctgtgagcagagctctggatagagacctgggagagacaaggccagcgtgggtttgggagagaagtgctaactagcatttagtagtcacctcactctgagtgtcatgattgcctgggacaggtctttgcctcttataccatagtcatgaacactgtccatttgattccagaggaaccttaattggacagtaaataatgatgccatgcccctgctatgctttggacaggccaaggtgaattgcccaaagcatcctggtcagcaccatgccatgggacagactctgtccctgttttaagtgttgagctggttcttaggtcatcacggccaaccaggttcctgctcgcgcttcccctgctctcctccagagccggtgcctggagttggagatgcctgtcccggtgccttcccacctagctaagacacggcttgctgtctgttcagatgttacagatgtggtatgacttggatgaagagagccgatggaaataccagaagagggctgccccttgtcccgaccctagcctttctgtgtggcgcccagacatctactttgcatctgtgtctgaaacatttgaaaagaagattgatgacttcagtcaggaatgggcagctcaagcagagaggagttacaagaaatcagagctttccctcgacaggtgagattattgacctgtgacagggtgtgtgagcctccaggccaggccaggagaggaaggcaggcagccttcacctgcgacccagaaggtctgctttgccttcagaagcatagagaagagcttacataggcacacagctctatggcttcctccacgtgtgctgcctcacactcagttgttcatacacatcccgggttgctgagtgagccccttccatggaagataatggtggttgctaatgggccagccacctgggaaagatggttagtacattacagagttgtgcagtgcagaccctgcataatacgggtgtgatttacacaagcagatgcactcccctacctctgagtgcttggtaaacctcaacctatttccagtgggtacagtggaagtggaaaccaaacttctcttgctggtcggggagggaatgtgaatggtcacaaagtaactactgctcagagggcctttgtcactggcctggcaagggcatatgatgttcttgtgacaaacaaggaaccagctagggctctgtgttcccggtttctagtgtagtggatagcctaacacttgctcctgattcctgctgttgtcccctatgtctccaggctgagaaccttactgcagctgaagtggcagcgctcactgtgtgacccaggcgaggctgttggcctcctggctgcccagagcatcggagagccctccacacagatgacactgaacaccttccactttgcaggcagaggcgagatgaacgtcaccctgggcattccaaggtataagggcacaaggaggcatactgcagctgtgccatctgctctaatattcctgggcaaggactcatcttatgagagggacaaggaacagggctagtgagcaagagatctctaagtatggattcttgagcatatttggagccagagtggtttctgtggctagatcttgtagggtttctgtgtatccttctgccacatcatcaggttaccagaaatacctgtgagacctcacacacaagagtatggttcattccaacacagtgccacctgtttgcccagcttcaggagtgtcattcttgtggccatgaccctttaggtacatagccatacactgcagtgtggtgactgctggggaagtggaaaacatggacccaccctgctggcattcctccatgcacattccactctctggcagatcgatgctggatagcttccccaactcctcaacctgagagttcgctccagtgactgcagaagagaggctgagcccactaggctgctgttgggatggcagggctcagtaagagt

SEQ ID NO: 31388 - DNA, 2049 bp, Mus musculus
agagagatccagggtctcactgtagcctgcctgtgtcagaggatgctccctcaagtttgccttgtctctgtttaaccttcctaatgttctgcccctgtgacaggcattgcagttgatcctcgccatctctccctggtggctgattacatgtgttttgagggggtttataagccactcaatcgctttgggatccagtcaagctcctcccctttgcagcagatgacatttgaaaccagcttccagtttctgaaacaggccaccatgatgggtgagtgtgggcagtgacttgggccttccctgggcagatgggcttgtctcaccccttgcatgcagtgagatcttggaatcagaagtggagaggcagccgacagtaaatgtctgcattctgatggaataaagagagagctcctcttccaaacttaaatacagtgccatagcatgagtccacgggggtggggggatgggagggtgttatctccggctaacaggtaccaccacacagcctcagcactgagccctcagtcccccacacctcccccagacccctaacacaagctctttctgtcttacataggatcccatgatgaactcaagtcaccttccgcctgcctcgtggtgggaaaggttgtcaaaggcgggacaggcctgtttgagctcaagcagcccctaagatagcagcattgtctgcccagcctggaggacctgggggtgggcacagctgacagtacagagtgacatagcaaagcagtagccttggggtccggaaagcagatggcctgagctgggccggcttccctcagaaaaggctcctcctacctagcctttctcatctcgggatcaggagcaaggcttcccaagccctcagagatggctgttgctcgacttttgctcccagaggccccagccaggatcctaacaagacccaggactacacagtgggaagatcaccgtgagccacatttgctgttgggaatcccaggtgccaccgttgctgtgcgtatgctagtggctaaggaaacattcccaggggttcctgaagatccagaaagggcatgaaacctgctccatgtgcctgtccctccctgctgcagctaccaaaggagagtcctcaaagaggctccactcagggctgctttcctgggcctgagtcaatggcacaaggcccccgccacactgccattgctgtatggctgcatacaccagaccagaacactcccacagccaagacatctctctgggaccgcagcagctccctaccccacagcctaaagtttcctactggggctattcagcaaggccacgtagcttgaccttcctgcctctacactcagctggatgtcagagcccctagtcacccccaggccctgtactgttggggtctttgagccatgcagtcaggttccctggctggacagaaaagacagaggctttatgaagccagaccgtttctatttttgtccactgttattccagcgtgggctgagtaataaacatggctggaactggctgttagaagataatcaagacttaagtttttaatctttcccttcatttatggtttctgcatctggtaattagtattttcttggcacagatttcaggctcctcttcctacttttatctggcattgtaagggcagactgtgccccctgcccccaactcccagtcttcacctctgaatcctacccatggccagaagcacagaactgtggaaggctgtggggagaatttgtgttaccttagtcgggtaagaagactgcggtgacttcagaaatgggctggcctaaaggttaccatgccagaagagattctgcagtctccttcaggctcatgatggaacctatcctgtgtatacccaagaaagccagcacctcaaaacagactgcaggacatggcatagaagactgtcacagcctctaagggaagcagacagaaggggtcccagaaaaccctgccctgaggacgcagcctgcaggatagatagggcattcattctttgggtgaaaaggcagggtgactacttactcactttcttcttacactagagtg

SEQ ID NO: 31389 - DNA, 1197 bp, Mus musculus
acacacacagacacacacacacacagacacacacacacacagacacacacacacacacacacacacaaagtaataaaatgaaaaataagaataaaaacataaatctttaaaaaattaaaaagaaacaggtagattcaagtttccacttctctggaagatattgacttctaaactcacacgcacctagagcccacagcttctaaccatatgtaattcgttaatgaatattttataatcggttcgtcatactcagtcttcaaagcctgctccccgctccctctcttgtaaaccatgagaagtagttttctcagtctgtcctcactgggtgtagaaacgttacatagactagctcattagatttcaccatagcgctgtgagcttggtaccattatcctatccctcccgttttataaagaagggtgttaaggtcaaaaaagaggtaagaagttccagagggcagagctaggattcagacctaggcttggagatagtagatgaggctacggttcccatgtctttgcagcaaataatgtattccgatccctcagaagatatcccatcagaacttgggtctccgtggtcagccttctgtctcatactacctcatgaggggatgtctccatctgtagtcaagcctcaaaagaggtttcttcaacatccagttccacttagaaaaatccctcttattcctccagtatcatttcagcacctctggtagggactgctcatttctctgtcagcctcaggatattgtccctcttgggctgggcccttcaaacattatcctcagacttctccaaccaggcaggacctgctgtccctacactagtgacatctgccctccagtcccctccagttcctattcagactaagtaagtcactagtcagtaactaaggcgctggagcagacatgttccttcttcggaggagcgcccccaaagctctaaaacctcttggaacacttcgccctagtgcccagtatagagtccaggaagagcgaccaccctgggggtagcaacacctcctccagcaaggaggaatgctgactcctaatgctgactccttttcattcaaaccaccacaagctcggtgacctctgaccacccagtgcctgcccaggcggctctcgccattgtcctgcttagaaccatggagtggatgtcccggggtctgcttagttgagtcttctgaccgctg

SEQ ID NO: 31390 - DNA, 1193 bp, Mus musculus
agggacatgtggcaacatctagggacatttaaatcttactacattttattgagacggtgtgtgtgtgtgtaggcatgagtgccatggcaggagtttggaggccagaggacaacttccagagcctcttcttccaccatgcgggccttgggtcgaacacaggactttaagctttgaggcaaatgtctttccatagtgagctatcctattggcccaggaaataaaattttattaaaaggattatttattatttatttttatgtgtatttgtgcttgcctatgtgactttatgtgcaccaagtttgttcagatgcccatggaggcctgagtacctcagattccttggaactggagttatagatggttgtgagttgcctcctctttgtgtgtgtgtgcgagtgtgtgtgtgtgtgtgtgtgtgtgtgtgtgtgtttgtgttgggaaccaaactcaggtcatccgaaagagtggtaagcactcgtaataatggagccatttctccactcccacaagagacatttttgattgacacacaggaggagcaggaggaggagtggtctagagatgtggctgaatgtctgatgataaatggaaccacccctcccaccaactgtggagctgaacatgtaggcaccaaggtggaacaatgatgcagaagaccttatctctgtattgttacaggctaggattctaagcgtgtgtgtgtgtgtgtgtgtgtgtgtgtgtgtgtgttgcaatgctaaagcaagcctgtggttagctacctagattgtgtggggatggaaatcacttgggcaaggaagagtgggttgattgctagagtggagaaagaagttagaaatcaagagtgtccaaagccatgcctgctgcctaaagcacagagccatttcatagtggctctgtgaggtttacaacaggttctgcagtacgtagacaggaaagtggtctctgcaataaagccaattcgtggacctgtcatctcgcagctcccatctctgtgattggagtgcctgtaataaacatctctaacaagagcccctcatacattttgacctactttaaataattgttttgatttgtgtgtgtttttttttttttgagacaggttcaggctggccttgaactcggtgtataccccaggctctgcatcacacttgcagcaatcctcctgtttcagcttccccggtgccagggtt

SEQ ID NO: 31391 - DNA, 1439 bp, Mus musculus
gggccaacgcaggaagtggagctgctgtagccttgcttgcagggcccggtgctttgagtgtaaggggatcagattgtgtggctccagaagccagtcagactttcagaaaggaaaagtatggaagcctatcagtcagcaaggaagcaaagaagtgtgtgtgtgacttgtgagttagcagagatctgtggctctagttctaggagatccaaagctgtcttctgacctgtgtgcattaccaggcatgcccatggtgggcacatacatacatgcaggtgaacacgcatacacattgaataataaataaatctgaaaaaggatggaagaaaagtcacgggtgagtgggaaatgaaaatggaacgaaaggcgctgttgtggatggtgcggattgtttttgagactggcgtgtgtatcggtgtcgtgctgtctgtttgctgcacagaatagttacttgagggctaactcactgaagagatcactttctatttctgacagatttggaagaggcgggacaatgatgaaaccaaccagcagggggcttgaacgccttgttgggtttttattcccaagggctgtggctgaagatggtaaataaaaatactgaagctgtcgctgaacacagactgactgaaagattcctgccccagtccagtttttatggattctggctgcatcaccatgaaggagcctgtctgccctgatgttctgcgctgtctccggcagcacgttgtggtcgacactcttccctttcagcatcagcaggcagaactcttacagatggatgccttatttgaattgctgcaagtatcaaagaacagacagttcggtagaaacgtcaggtctggagaccctaggagtaaacgtgaagtcagcagcagccttctgtcataggtagtggctttcctgtagctcccttcatctcctgtgggacgtgtgcgatggattaaatatcctcctgtttttaaaccaggctgttgtttcatataccccattgaggcttgttaagggttttgttttccttcttaactttatattatatactcctgtctgtagtctgtcagcttgtgggtgggcactatccttgtctcttcctgtcagcttgtgggtggtatgtcgttaggggtgtatttgtctctaagtcacaaaatatctggctaaaatgataggttttcgtgcctacctagaaggctgacagtgggtgatttgggactgaggttcccccccccccccccccgcacccccaggcagagaagtggaatcattgtagcttgagcaggtctctgccaggctgatgggaagcccgaggcaggggctgactggcagaaatggcttctgtcaagctcagtcactgaagggttggaggccttgggcctgagatgtgggcaagctggcacaccagtgggcagcaggcagctcattacagcagctctcttggaattggt

SEQ ID NO: 31392 - DNA, 1280 bp, Mus musculus
gtgtcaggatgagtccatgtgatcttcagggagcctgtcctccttctctaagctgctgtatccacaaaggtcttgcaggaccacatctgacctgtctctcagcagccatttttcttgtctcattcatctaacctaacattctggaattttatgacagctttggctaacttggtgttttgggagcagagactttagggagagccaggctttctgaagcttttgcctgtgtggtgctgtcttgatgaggtcgtttgtcaggccccttcatgtttctgctttcttccactcatctttgcctaggcctgttttcagctgtcacttttcctttctcctatctttttgccttaggtagaatctatgtcccccacccccagcatgactgtttctctgccactcaggaatttagcatgggacttctgggagcctgccttcctaacaaggtctccaagtacttctgatgccaataaacaggagagctttggttttgaggcctctttggaagcacatgtccttccccttttgtggcttgcccaagctcctcataggcctcactgcttaaaactgtctacgtaggagacccaggaagaagatgctgagctaagctgcagtccttagttgaaaaacctgtcctgctactcgtggtggcacatgcctttagtcccagtactcaggactcaggaggtagagatgggtagatctctgtgagttcaaagccagcctggtcatatcaacacatctagttccaggacagacagtggttgagagagcctatctcaaaacaaaacaaaaaaagaagaagaagaagaagatgaacccgccttggctaggcttaccaaattcaccatctagctgtaaagcaactaccttctgctcagactaaaggggaattatcaaagcagtcttaaaagtaactcttcaattgtagtttagcaatcttgaatgaatgaagttgagagagttgacaatagctataattgttctggggcaggagggctctagttgcaaaaaagagagagttgtgaagaacatcacagaggaagtgaaatggccctttctctgccccatgctttctttcctacctcccaagaatatgtctgagcctgatgagacacactttaaccccagcatgaaagaggccaaagtatgaggactgctgcaagttaaagaccaacctaagctgtctcaagaaaaaactaaataaatgtaacttaggtcctttgggtaaagatccccagacatagcatttttccaacgggggacatgtttttcaacacaagctt

SEQ ID NO: 31393 - DNA, 1138 bp, Mus musculus
tctaaaccaggagagctggtctcagggttcagtgccttaagcattgtcagtcctaatcccaggatgctgtcaaagggaaaagccttcatcctgtacttgtgcactagtgctgtaagtgcctgtggacttacatggttagataccatcagagcctcccgggtgaaggagggtctgccaaactccatgctcttcatcctgcaagtcactatagtctccagttaatcagtccatattctgacttgaaacacaggattcactggaacgctggtcgggacaaagaacattggaactttttgggggtctgtgttcttagagctgtgcttcctatatcctgattctgttattgaaccaaaaaacacctgaagaatctgaggacccgacacctacaaatttgccgttattcccacttcttgatgaaggaatagctagatgaacaaagtgttctgcagaggccttttatgtgtttatgtggtcctcaaagacctcagataggagactggtggaaacttctctaagttctttttccagaagcactttgcttatcagtgtgtatgaaagattttctagctaagaaagctctcttgattcttgctagtttatcctgtatgactacctaaagccccaagcctgtgcctaaatgaagagtggtcattctgagccagcctgttagagctgatgtttctaggcctcctccctaaaatgcctcttggggctgccctcagccttatggcttagcttgattgctctgctggcctattctggggtctgtaataatactggccagtttatttggcagacctgcttccagatagatgtctcttaacctatttcaaaactcacgggccatagtgagttctcagaactgcccagtgtttttgcacagtaggcaggacttaactacaaactgcctcagaatcaacattcatttgaatagataagttcttatctgtcttttgtgtgtgtgtgggggggggggagatgggggcaagggagactgggctacaggtatgacggtacatgccagtaatcccagcatttgaaaggctgagataaaaggtttgccccatgtcccagaggcaggaaggtcttttagtttgaggccagccttatctacaaagcaagttccagacaaccagga

SEQ ID NO: 31394 - DNA, 1162 bp, Mus musculus
agatatataagtgtatatgatgagaataaagtatatactggctgcagtctagccagcaggggtggatctaaaataaatgtgaaagaacattccatctctctgatcatctggggtgcattgctaactagagagcagcccagacaggtgggaagctctttgggtggtgagtatctagcctgctgtgtgtttgacaagacctgtgtcagggtggtgcttcccagataactcgaatttaaatgagacctttgtataatgagcattcgactttcctacctctgagccttttgaagaaattgcatatggaatgttgacagttatttgaaaccttaactcttttgaattcctgaggagctgttggcatccagcccaaatttccttggtgttagagtactgctagaagtgaaagccttcctagttaggggttcctcctttcccagagcaaacagaacaagaggttgggaatggtggtgaacagctcaagagacagagataggaggatcactgtatgtttgagagtagcctaagctacacagcaagcatcagcgtgtcctggctatgtcatggtgctaaatgcagaaaaagccatacattctttttctcatttccagtgtttctgtataaaaaaatgaattatgcaaactgtttgaaaatcatggacggtactttttaaaccaataaactatttttacagcatttttttgccaaaagttgtgaaatcacttgtgtacttggggggaagggagattaagtgcctgccctaaagttactctgctacccagtcagcactggaaatctctcctcttgctgtgctgattattttaagagctgttctggttggagtgtaacggctagactcatgtaacctaagagttgaaactttgaaagacatctggtctcacttttgtcctcttaggcagcttcctctttcaggtgtccttaaagcctgggcttcattagaccttcatcttaagagagttgttttagggattattcaggttggcatattaaacctaaaagtgcctgcaacaccaccgcccgggaattctaacacctaacaagtcaggagaatcagtagagctcgtgaacaatcttccaagaccttcccctaaaggtgaaacagagagacaaacccagctcagtaggatacaatcaataagttagg

SEQ ID NO: 31395 - DNA, 1132 bp, Mus musculus
catctccaagggttaaggtaagaggaacaacttatcttctgttcactgaaggtggtagtttgtgggcaggaccaaacaggtaggtgggaagagggggcaggcccaactaccttgctatttaggccccaatcagctagatgctaactagttttccagggtaacagctgtcctgggtaaaagcctgggaggaaggcagagaactggccccatcactactgtcttctcctagtggccctcatctgcctccttcggtacgggcagctcctggaacagagccggcactcctggatcaataccactgcactcatcactggttgcaccaacgctgcaggcctcgtggtggtcggcaattttcaggtgcccccgccccaccctcccttaatagggcctggatgcctgtaagggcaacacctggaggttgaccaaggaaggaagggagaagtgatggatggggcaggagaggtggggctgcttcatggattggcctctgtctgggccaggtggaccatgccaagtctctacactacatcggaactggtgtggccttcactgctgggctgctctttgtgtgcctgcactgtgttctcttctaccatggggccaccacccccctggacatggctatggcctaccttcgaagtgtgctggctgtcatcgccttcatcaccctggtccttagtatccttttgggatagggaagccaggaactcatcccctagctgaatccttctctcccaggttggggtaggggtgggaccttgagtccagtgaccactgccctagtcctagtctgatgcggcccggtcctttacctcttctacttgcttgggatggcctacaggtgttgctgggtgcacacaccctctaggtgcacacaccctcttaggtgcacacaccctctcgaacctttccttagctctgctccaggtggagtcttcttcctccacgagagttctcagctccagcatggagctgctctgtgtgaatgggtgtttgtcctcgatatcctcattttctatggcaccttcagctatgagttcgggacaatctcctcagacacactggtggccgcactacagcctgccccgggcagggcctgtaagtcctctgggagcagcagcacctctaccca

SEQ ID NO: 31396 - DNA, 1786 bp, Mus musculus
tgaaatcaagggagagagcagggctggaaggcaggagcaggaaaggaccggaataccgctcttgatttctctagacaaattcctgccctctgtgccgccatgagctgcccactgatgatgacagctatgaagagcacaagaaagacaaggtctggtcaccccacccctgctgcacactccccactcctcagcaggcttggctaggcctctgaacgcccccctcacttgggctcccttccaagtcagtgtggtgagggcaaaggtctcagcattgttaatgttagaagcctgaaaagagaccccgtgacagctgctctctgcatggtcctatccatgagtattcagacccagccttgcctaagcctggcgtctttcttctaggctcgcaggcagcagcagcagcaccgcctggagaacctccacggagccatgtacacgtgaggcagctgccagggctgagcgctcagcctctctgataccttccctctgcactctgaatcattaaaggtttctttacccaccctgcagctgcacggctcaccagccgaagcaggggctccttccgaatcctccaccctgctgctagccagaaagatgtcaaaggtgtcaaatgtccgaaggtgccaggctgcaattccctctgccagcctctagactctgggtggtggggccctagaacaaccagggcttgggtctgagtgttcttttagaagtcaaactgtgtcagagcctggcgctttgtagctgtttaaaactgataaattaacttgcaccaccccactccggaaatctctagttaaccttggaacctttagttaaccgtggaatcctgggggtgttctttatttccacatagaaaacttttaacattgtaaaagttgctctctgtatcccactcctgtaggcgccattatcaaggaatcaaaggtcaagccagcccaagtagggcaaggctgtttagagactcttcaaagggggacagtccttgtggaagttttgaaagtgggtttcattcactatgtgaccttggctgtcttggaacccactatatagaccaggctcgccttgtacttaggacatccttctgctctgtcttcccagtgttgggattactggtatgtacacacccttacgatgtatctgaatggcatctgtcactcttagtttctggcaacctcaagaatctttcctgggggaaaggacttctgtccatccctgcccactggatcggaccctccgtgattctccagaacacactgcagacgtgcaaattagaattcttttaatagatataaaaaagtactaaaatactcgtgtggttctgctgtgttatttgccctaaaggaagtgaggggcagagtgaagaacccaagtgcagctgggtgggccttcccttaggctaaggcatgctcctcccatcatccagactcgtgagcccctgccaccccagccccaattcctgcagcagaaggccccagtggtctggctctggcactgggagtagaaggcacctgaagggctggctgggcaagggaggacaggtgacctttaacacagaatactactctggtatgaggggacaggacaagcagcagaggcagctgtggaggccctgtccctctatggcacaggtgggtgttggatggccacttctccagaagtaaggaagcctagatcccaacaatactctctaaaacttgtttttggtacaaaataaatgcaaagaaggtagagggtgcgggtgttttggaggctgggccagccaccctccagacctcagatcatg

SEQ ID NO: 31397 - DNA, 1225 bp, Mus musculus
gggcagtgtggcacataaggcagaggcacaaatacatgttataaagtatttttaagaacctttccattcctattgtaagaggaaagaattgttcacttatttgtgtttttatttcgaagtggctatcctccagctccagcgtctttttttccgtttcctacttcgatttataatgtaatgtaaacatctatactatggcatgtggtgtccgtctgtactctcagtctgagggcaggagctcacgactttatcttatccccaacagtctgaacacttcaagacaacgtcccagaaggtggcccggaagttctggtggaagaatgtgaagatgattgtcatcatctgtgtgattgtccttatcatcgtcatcctcattatactttttgccactggtaccatccccacttaagagtcccttccatcccaccctactcctcaggggtgacctccctaatatgtgccaagaggagccctctcctgtcctcctccacccaagtgctgctcagtccctgtgagggccttctgctgcatcagatgccccagacgcaccttgatcccctgggaggagacagctggactgtagctgcatctcatggtcctgagagtgggttacagagacccagaggaccctgtctgtggctgggaaactgttggtggctggtgggcaataaagacctcttggtatccctaagtgtacgaggcgctttactcctgtgtctttcaagtgtctgtttctttctttctgaggaacccctccaggctggtttctcccaatctagaaccaagatagtgcaaggattgagcacaggtttagtgaagaaagatggcagctcagaggctttgcatacctgaattagatatgccaatcactagacccagctagaatcaataagtcagtcagtctgtctgtctgtctttaaaaggacttttattttttaagaagaatgagtatgggtttagagagatggctcagaggttgagagcactgactgctcttccagaagtcctgagttcaattcccagcaaccacatggtggctcacaaccattctgtaatgggatctgataccctcttgtggtgtgtctgaagacagctacagtgtactcatagacactaaaaaaaataaagaaaattatttaaaaaaataagtatgagtatgtgaatgaagagcctgcagaggccagaagaggatgttggttcccctggagttacaagcccaacatgg

SEQ ID NO: 31398 - DNA, 2028 bp, Mus musculus
gaactgaactcatttgccagaactcttgaaatgagtcttgctgattgttttgctctgttttaatttaatgctacatattaagttatggacttgtatattccagggatctggatctgaagaagccaatttatcagaggactgcagcctatggccactttggtagggacagcttcccatgggaagtgcccaaaaagcttaaatattgaaagtgttagccttttttccccagacttgttggcgtaggttacagagaagccttcaagctctgagggaaagggccttcttcctaaatttttctgtcctctttcagctcctgatcagttgcagtcactctaatcaatgacatgaattttagcttttgtgggggactgtaagttgggcttgctattctgtccctaggtgttttgttcaccattataatggatatagtgagcataggtgagccatgtaactgcctagaaacaaacactgtagtgaataatgctttgaaatcgaacctttgtgccctatcacctaatcctccaaagtcctaattgcaattactttcccaccagatgctgaaaacatccttgtagtgtgcacgtaaagtacttgtagtttgactgtagactctggcaatgccacagccctgtcagcatgaatctgtaacgtcttgagctctatttattgaatgtgaagcccctgtccttatcctccctgtaactcatttctaattatgtagttctttatcagggagtgttcctatccaatcaatcttgcatgaaacgaaagtttcagttggagctctagcctgactttgaaaaaaaaaaaaaaaaaggcagttacgattaaaccatctccctggtgcttatgctattaattgccacctcaaacagcaccaaatcaaaatctctccacttttcagctgtctttggaggacgtacgtaataaggttttatttagtaaaccaaccctatgcatggtttcagcactagccaaacctcaccaacttttagtctagaaaaacaggcatttggcacccttgtgatatacagagaagtcacagggcagtacctgagggtctgtaggttgcacactttggtaccaggtaacttttttttctttataagaaagagtactccacactgcacaatagctcctcccagggttttaactttgttttattttcaaaaccaggtccaatgagctttctgaacagctggtgtagctacagagaaaccagcttccttcagagagcagtgcttttggcggggaggaggaaatcccttcatacttgaacattttctaattgcttatttattgtattctggggtatggcgtaagtacagagaagccatcacctcagatggcagcttttaaaagatttttttttttcttcaacaccatgaattcctttaacatgtttccagcattcccaggtaggccaaggtgtcctacagaaaaaccttgggttagacctacagggggtctggctggtgttaacagaagggagggcagagctggtgcagctggccatggagaaagctgacttggctggtgtggtacagagaagccagcttgtttacatgcttattccatgactgcttgccctaagcaagaaagtgcctttcaggatctattttttggaggtttattacgtatgtctggttctcaattccaacagtttaatgaagatctaaataaaatgctaggttctacccaaactgtgtctattacttgtccattgttgctttctgagctaaaatttatagcatctgctacccattgccagcaataaagttttcaaccaggactacgataaaagcttagtgatttagaaagcctggcttatactgtgcatgcaccacggtttatggaggtcaggatttttattcacacttggagatccgtcctgggaaatcaacactgtctgaaggctttggcaattaagtgctgccttttggatggcagaagcaagcagaacaggggtcaagaggcttctgtgatggcaggaatttagtctatatgctagataggtattttactctt

SEQ ID NO: 31399 - DNA, 4092 bp, Mus musculus
tcactatagcctaagactcatgatgtaatctttgctggcctaaaattcatgatctttctgcctcagcctgagtgctgggattacagatcatgagccaccatattagctaaatgtacaactttcaggtccatatcttatttcttttcttttttttttttttttttttttttttaaaagatttatttattcattttatgtaagtacactgtagctgtcctcagacactccagaagagggcgtcagatcttgttacagatggttgtgagccaccatgtggttgctgggacttgaactccggaccttcggaagagcagtcgggtgctcttacccactgagccatctcaccatatcttatttctaattgactttaaaactcactattgtgactcctgcacttttattaatggcggtggatgactttgtcttactgacatatctccctgaaaaagatgagtgttatcaaccgagtgtgttgttctcgtttcagctttgatctttactttgtctgcaagaaccgtgtcctccctgctgatttgttcccaatgaagagaaatgaaaagactgtgacctcctctggggtttggtggcaagtctgggctggcagagatgggatagcttcaggttttgcaccggcactttgatgacactctcctctggtgatgttttatttacttttgtgttccttgtatgctgacgtgttccatcatcctttcttccttggagtgcaaacggaagaagcacatggaaaaatggatgtgaccaaaggaagaccccaccttaggcaggccacacaatggaccacctttccacagcctctttatctttgcaactctaggcgcaaactgtagagaggtgctttctagacaagatgtagatggttatgtgggatactgatgggcagagatggggttgaatacttattctctacagaaggctcagctgcaaaccaaactagcaggttaaagagtgttaaagtctggtccatctgatagtctgtatatttctctgaaagtttgcatgctagttgtactagcataaaagggactcgaggcttctgaaagtaaaatcactgtttgatgggattttttaaaaaaatgatcattgaacaagtgtgttcttgcatacattcaccccaataggaacttcctggaaagggacaggttcatgctttgtggaagaaaacacataggagggatttagtatgcaggaaagaggttttctacaaattgagttttgcttttattgcccgcagtagatagatatttagaaactaactgcattcttcacactcctccttgctgtttaagatgtgcagggaataaggaaaatctttcctatcctgtcatatctggtcatgaaactgtaggaaactaaataggttccctgagataactgaagatgtcttggattatgctgtgtctagcgttttattccagtctgtatggttacgcctaaagagagaaaagtctcagctaatctcagggatgcagagagaacgagaagaagaaaagtatgagtcctgtgctgttggggaaatcagtctaaggaagcaatggtcttggaggtcttttccagtgctgactgcagcatgggcttgaaattgaagtatgtattcttggcaggtggcattctagaaataaggccatggctactattgtctcagctgtccacaagtctgttacttttttccaagcctttttcagtctcctttagcttttcctaacacctctttagttccccacttccattttttcttcctctctatagacctgtttgtacatctctgaatgaacaccttccttatagcctgtatgcacgcccatacctatcctgttctagttggtgttgcttctattgccttccatcctcttcctgacatttgcagggttgccttggtctgatttcctcctgtttctcaaggtttactcagttaacagatcaccaaattcagcagctcattttcacagcttgtaacccttggtaataatgttggatgccggggcctatgcatgttgacattctggttgtctcttgcaaattatcctttgccttatctcatggggatggaggagggtacccaggtctctgttgctttgactgtctcaataaatccatccattctttatcctctctgtgacgctcatgttttttttggcctccttcccaagaacccagttctgctaaataactcagccacgttgtctgcttgtcacacaaccagagtttctctcttgtatctattacgtttctctatctatccttcactttctctaatcatctgaaaactccacactataaactaaaaacatttttatcatcacagaagtccacttttttttttttaaagaaattatctaggtatactctccgctaatttttaggaaccagctgaattgaccttaccagttttggaaacattgatcattccagaatgtgccccggtctgaagcttctgtctgaggttataatctagactacagattcctccttggctgcactgcgacactcactccgtctctgcctctgccctcctcgtgtctttgtatcacagcttttcggggttgctctatggttaggctgtccccttcttccagccttctcaggcccttgtgcttggaatatgcatagtggtccttccattccacactgatagcttactgtcactctcatcttggaacttcagtgtgacatagttctgatgttctgtgatctccccccaagaaaactaagctctgagagacagccattgtcattgttctatcagccagagaccttaggggtcaaatttcttgttggaggtgtagctgaaactggggctcacatagctcttcctggatactgtttgctatgaccttatacttgttggcttttgctcttgaaggaccggaaggaaaattgatttttagcaacaaagattgacagtgagtggacagacatgtgaaggattgccagagtctcctcaccctcttttggctgctgacatgttccttgtgctgacagagtacagtagaatttgtgttcacttgagaagttgcactgaaggaaatggttcccaccaaagaaaagttctttttaggagttttgttttgttttgttttttgaaggtagaatacttgaagcatatttgctagagtgtgtggcaatggtccagctgaggtgtctataccagggattgggttggcatgtaagaagcatatgaagtctcaagtagcactcttgtggacttttctgagcttgctctcctcagtgtttggctaaagggcaatttcttaaggggaagctgcttgaggtataactgttaatagtttgttttcctgctgtggactaaagaagccagctctggacaacaactaacaaaatgtgctaacatgtttcccctagaaacagagctctgtgcccttcagagttcctctggtagggatgcactttctcttttcttcggggcatggtatgctttgcacatatcatgagccgttcgaaagcagagaagggtgtgccaggccctgtaccatagtttctcaaaactgcttactaggagggttctgtttggcattgccttaagaaagctgtaaagagtcaggcgtggtgatgcatgcctttaatcctagcactcaagagtcagaggcagaaggatctctgagtatgaggccagcctagtctagaataccaagtttaggcagccaaagttacacaatgatagcttgtctcaaaaaaaaaaaaaaaaaaaaaagcagaaagctgtaaagagatgttgaaatttaaatacatcaagatggctcagtttgttttgttccctgctcagatgtgatactaagtattttagcttagaaactgtgagtttggatctcagcttgcatagcatagcaaactacccatgaagctggcctcctcacactgttaggaatttaattcagactaccatgttaagtgagtgaatgttgaaatttttttccttgtcttgtgttcccagttagattgctactgttagccatgtttggtattgtcaccttttttgtaacttaactgtaatggcttaattttattttttttaaagcttactgtggtatagtaagtatttttcagtatatttta

SEQ ID NO: 31400 - DNA, 4092 bp, Mus musculus; identical to SEQ ID NO: 31399

SEQ ID NO: 31401 - DNA, 1167 bp, Mus musculus
acaacagtagcaaaataatagctataaagtagcaatgaaaataattttatggttgggggtcagcacagcataaagaactgtattaaagggtcacggtgttaggaaggttgaggaccacgggtgtacaacttgagttacagatggttgtgagtcgccctctggatactgggaactgaacccaggtttcctgcaaaagcagcctgtgctcttaaccctctctctagtcccctgtgcagctaactgtggtgtttgagcaccgaactctcagtgcttagggacaattacactgaccccccacactgaccatgccctaccctatctttcaccagtctcttcctgcagcgcggagaaggatggggggcagtgtattgtcgttgttcacaagtatttcatcttccatatgcacaaggagaatttgttaagtgagcaggagtggggaatggtctctgagaaagatggatagcccttatatacatctccttactcgagagccatttccctcttctcattcagaaatgataactgtgatgcatgagtcaggtgtgtgggcatatgcctgtaatcctagtacttggaaggcggaggctgagacttagaagttcaggccaacctgggctacatagcaagtattcaaaaacagaaagaagcaactacaaaaaataaaagtattatgttcatttcactatgtcacttgagaaagtgccaaagagcataagggacgatagctggcatgtatgtgttgctacataatgtaccactggtgtgtgtgtgtgtgtgtgtgtctgtctgtctgtctgtctgtctgtctgtctgtctgtctgtctttacaggcactcaccaccatagttggtttaggggctctgaggattgaactcagggccctgtgcatattcagttagtaaaggtgctggccaccaagcctgactgacgacccacatggcggagggaacagaacagactcctacaagctggcctctggcttccacacacatacacacactcacaaaaaagtcaataaataaaactgtaataacatttttaaaagagcaagacttggctggagcatggcgggggagggggggaggttcatgagttaaaaaaacaaaaaaacaaaaacccaagcctgcagcccgcagccacttacactaatattgtaatagcgaatgc

SEQ ID NO: 31402 - DNA, 1175 bp, Mus musculus
tgtgtggatgctggaaatccaacccgggttctctagaagagcagccaatgcttgtctctccagccctgatggactagaatttaaacaaaagaaatactgatgttttaaattcatcatttaaggagaccctgtgactaggcatgttgtctttaataacagaagtaggggcaggcggatctctgtgaatttggggccagcctggtcttcacaagttgttccataccagtctgggctacacagtgagaccctgtctctaaaacaacacacttcttgatgtgagggtggggcattgagctgagagctgaccatttattgacacccatgtgaaagatgtttcagtgatcttaatgaacacgtgctaaggattttcgaagcgccaaacttcccttcccttcagggagctcagtgtggccccagtcccttctgtatcagactggtgacgtgcaaccccaaagagatgctcaactctcctctgaggatgagttccaaggagctgccaggatattcctacagtgctaagcatttgctctcctgcggcactgtgtctactcatgacaggacttgtgcacctcctctgggaccctacctgtcagtagcctttgtgccatttctaacagtaatctctttggggtatcagaagggatgctaaagaattagtgtagttatttactgcttccagaatggttgcttgtatgtgaatatgtggtatgtcaaagtccaagttagcaaaagtatttccagtgatattaataaaatactttaatttcctacagcccatcatacaaataaactcttctggcccgtatctaggtaaacctctaactccacacctctgaggaacatggtggcacacacatttaatcccaacacttgggaggtagaggcaggaggacttctgagttgaagctaacatgtgtctacatactgaattccagaacagtcagggctatgttgaaagctccctccaccccactccccaaaagagcaaagaaagggcatttttgggtggagtttcggttatcaaccacgtgagctctgggagccaccttgcggaagatctgctgtcagcagttccctggatgctgacgtggaagagtgctccgtgaagtggccgttgtggacagttctgccagcacttgtgtgtcttgacagaggttgtcaggacaggaaggcat

SEQ ID NO: 31403 - DNA, 1197 bp, Mus musculus
tttatccctttgtcctttttttttttttttttttagtgctgttttgttttgttttgttttgttttgttttccagacagtacctccaggactatactatgtagccctagctagactggaactcaatccacatgtagaccaggctggcctcaaactctcagagatctgcctgactctgcctcctgggtgccgggatgaatgggcaaggtttggcatctgaattttaccaggctagcagttggctccctggatgaagccctttgtgcatccattttaggtcaagagtactctgcccttcactggagggctctaagttgggttcagcgcaaacaaatattcctctggagtctcgtttgcgattaatgtgttctgtctctgcccggccaaggtaaatggagcgccccaacccacacttaatgagttttgcctgtgtaaaccgtattaattgtggttgttgctttttaattgtccttaaatttctcgtacgctaactgccctagggcaggagatctggtttctgcttagactgtagacctctcctcccaccgttccttccacccaggagtctcataagccggcaccgaagtctgctcccctcccccaccatctggcagcagccccggaactggaccagggctcagaaaaaataaaaaataagcatgcaaaaacttttgtaagagcctccttgaccaggactgggaggcagaggtagagatattttgaggggttcctctcaaggaggattcaaggagttcctgaactagcatagcaggtgggaggggggccttcagacgaccttggtgggctgtctcagtgtgacaaaggtgtctacagacagaactgggtgacttaagagttgcctttctccagcaggtgaaaaccagagccaggcacctgatatgggaccagagccttattctgcccggagtggcgctacacagtaccttgtgtagtgggcttgttagagactcctgctacagtgtgtcccctgctcctagccctgtctgcccaaaccctggcacaaaacaagctcctcacctgatggtgcatgagcagtcactgtgacagtcacagtggagtcactggtagggttgtccctcctgcagccaggccttctccacgactatggtgccacctttccttgttcatggatgtgtgtgcacctgcaggcagaaggaggagaaaacggacctgacctg

SEQ ID NO: 31404 - DNA, 1194 bp, Mus musculus
atggttgtgagccaccatgtggttgctgggaattgaactcaggacctctggaagaactgtccatgctcttaaccactgagccatctctccagccctacatttgtatttttgtagaaaggatgaactctggggctagagagatggcttagcacttattaacacttggtgatcttcagagaactcaagtttggttctcagcacccacatcgggctgctcacaaacgcccgtaactccagttagatccaggaagtctgctgcctgcttcagccctccacagtcacctctcatgcatatatatacatgaagtaagttctgagcttttgtgaggtctaacacaaggctgtatggtcagtcagtaagatatcttatactggtggcaggaagaaaagaggagatggatggtgagctgagaggcactggcgtgtgcttttccacacgctctaacagtgggagagaaggccctgattcctgtttgccagtttccttgttggaagcactcctgttgtggtcgctttcaaactgccaccataatgcgtctgagcactgagtttgggagggatgccaataaccttcctgggaagtcagctgtggcacctatgtgaagttagaggggaagactctccccacctaagccttctcccccaccactttcaacaatagataatttggtccttttaagtagaaatcaacgaccgaatattaagtatagcctagctcaatggcatggctttttataagcctgctcacttcgtgtaacttcatgttacattgtgtgtgttctgtgtgtgtgtgttctaagcatccatcaatctcatctgtccctccgagaagagcacagagtctgccgcatttggggtacaccttaagtaaagaaaagcagaaactgtcgtctgtaggggatgctctgtatagaccaagcaatgggctgttagagaagtaattaacagctgggttctaaaaagcagtttgttactggccaaatgctggaacagatagcccagagcaccagggggtgggagcaagaccagccctggggtaaagcagatggcgggagcagggtcctactaatttctactgaggatgtttgtatgttattcttctttcttttcctttctgactaatttaatgatttaggagtggaaaaaaaaattaaccgatttatcttgctgtctgaataatgttttggaatgagc

SEQ ID NO: 31405 - DNA, 1125 bp, Mus musculus
tcttggcccagagaactggatgtgttttatgcagtccttgttcatggaagataatttaggctctaggtatatttttagtttattggtttaaaacttaaaaataataataattcgaatgtagccaccatttatttttagtactgtaactaaactctgttaagatgctgttatttgtactctctgagggactggataactccatgtgtccaggaatagcctgttcttgttgctcagtgaatattcctttcagaaccaccctgatcctttccctttgcaaaatcttaggtctaagagacgtcccagaagacgacaatgggaatttcttcttctacctgggccttgagtgaaaactgtactgtttttcactgaaggccccagagggaaggagttgtaagtgttactctacaggtctgtctcaaactccacacttccctcatttatgtgcacggcattgtgccacgaggctggagaccttctagcctccagcttctcctagatattcctgttcatctggggctagcaacagggactccacattggatgaagtctgggtctccacttttctacttgtagacacgttgtgctcaagaatccccccgccccggggtggggtttctgggttccaattgggatgtaaagtgaataaatacattaattaatggagggaaaaaaaaagaattctatgtttctgaggctagagagatggctcagggggcaaaaataccagaagtgtgagaccaaggctgaattccaagcatctacttacaaactaacatgaccacgtgtgcctgtaacaccattattgcaggggccaagactggtaaattcggacagatcactgctagccagccagccttgcagtgaacttcctgttcacagtgccataaagcagagagtgatacagaagaagacaccagatgctccactctggtctccacaggcatgcacacccagacacaaatgcgcaacacgcataccacacacattcacacatcgtctgtgggataccctgaataacagcaggggcaatcccatatgcagctctcgaggcttgatcagctaaccttcccctccaccctggttgaggccctcatcacagcggatgtgccaacatttcccatcctg

SEQ ID NO: 31406 - DNA, 1131 bp, Mus musculus
ttaaaagtctcctgagtgattccatggggcaaccagggtgggaacgttgtttgagatacaccaattggatacggagattgagcctcgtttcccgggatattatgcaagataattgttttctttttatttccttaatagattcaaaaagtgtgccttactggtttctttagatttaactcatatgccacaaaatccaccctcaaattaaagtctgccgttcaacagttttagtatattcagaattgtatgactaccaccaccatcaaattccagaacacttccactattctgcaaagaaacctgtactcattaacactctccctgtttcttccttcccatccctggtaaccagtaattgagtctctggagtagtcctggacttttatgtaaattggataattcaacacatggccttttgtcactggcttctttcttttgcttagcacagtggtctcaaggtttatttatattgtagtgtaaaagagctcacatttctttttatggctagatgatgatctatggtagttcatcagttcatagacatttgccttctgtccacttcagggctgttatgaacaatgctgccacgtgcactcatagacaaaagtgtttgtgtgcacatgtgcacgctcagtctgcacattcatgtggaggccagaggtctacctcaggtgtcattcctccatcctgtatattaagacaaagtctcaccatggtggcccaagcctttaatccagcataggaggctaaggccagcagatctgtgtgctcaaacctagcttgatctacatacatagaaacaagagtctcacttttaactgggaccatagtttagcaagactacatagcccttgagccccaggaatctggttgtctcccccttctcatcacaagcacaagccactacacttggcttgttcacgtgggtcctggggtggaacctgaatcctcctgcttgcattgctagtgttctgctgacagccacagccccatcccagatgcaccatttcccctatctctgatagtggatgagggcaccgatttctctgcatcttttcccaaccctactgaagtctcttctcttcattatgaatatcctagtgagcatgagttttgaacacatttttatgt

SEQ ID NO: 31407 - DNA, 1212 bp, Mus musculus
tttgttgaccgggctggtctcaaactcagagatccgcctgcctctgcctcccaagtgctgggattaaaggtgtgcgccaccaccgccctactggtgaagacagttctttagagggcatgaagatgccttcctttctgagaaggctgaacctataaagtcaagtagcagcttagaccactgtcacaattgttcccaaactggagtttacagtatgcattgtcaatttctggaatgggaggagggacctgctcccccccaggattcacacaagtgaaaaggaattcctaaactcaggatgaacgcaccaatgccagagggctgtgtctccctgaattttgggctttctgtactcatatagatgcaccctgctgcctattaattgtgtgtgtgtgtgtgtgtgtgtgtgtgtgtgcgcgcgcttgcttgcttgcttgcttgtgtgttcactcacaaaggcccaaggttggagtggggattgtttcttgatttgcgttcatttccgctgtagcattgagacagggtttctccattgacaccagcgctccccatgcagctagctggcttgctctctgctttctgaacataccaagtccctgcttcagacttgttcagcgggagctcctccctcccttcctaccctgcaacatgctcaccgtgtgcacatagtgcccatggaggctggaagagggtgttgggtccctaggcctgtggttaactctcaggtggatgctgggacctgaacttgggtcctatgggagagccacacatgctgttaactgctgagccgtagacctttccatcttaaccacttttcatttgtagtccagagacaccacgtgcgtttaaactctgcaagcacagagctctcgtcaaggccccagtaacagccattaattactccttccactaaccaccacgcctcactttcctgtccctctgaatttgagcattaaacagattttatcatttcctcacccaagtcatctgcacaagacccagggctgagaagcaaagagatctttgtgattgggaacttgagtgctaggtaggaggcggtgggggaggggaggcccgctaccaggaagcacggcagggtttcaggcacttggggtgtaccaggcattctgtctctgtcagtgctcaccccttcctttacagccaagaccctcggggaggtctgacaagtcatgtggggcccacacatcaggactt

SEQ ID NO: 31408 - DNA, 1193 bp, Mus musculus
tcttgagacaggatctgtctctgtctctgtttgtgtgtgtgtctgtctcccccctcaggacctaggcttaggcttatttcttaggcttggctgactcctgtctctgcctgtcaaggcctgagattaccaacacacggccacagccacacctggccttttttttttttttttttaagattttttttttttaatgttatatgagttcactgttgctgtcttcagacacaccagaagagggcatcagatcccgttacaggtggttgtgaaccaccatttggctgttgggacttgaactcaggatctctccagccccacacctggcattttcaagagggttctagggcttgaacccgggtcctcgtgttggtacagcaagcactttaccaactgagctatctctcccgcagtattctggtgtgtgcatgtgatgaagttggttatgcaacttgggcaagctgggtaaaggacgcctgggactttatgtgtttcttttacatttcctatgtctatgcaatcacttcaaattacaaagacaaaacacaaaacagcattacactgtctgataacagtgccgaacctataaaaacacggctgtgtgtctgttttgtgcagaaggatgggaggtggcttcacctgatgccataacaattctattttttacgaacagaaaccaccctggacttgaagcagatacatctaaatattagcactggtgaattttgatgattcgatttatcagtgccttgctataaatatttctctgccctcataaatctgtttggatcattcttttattttgaaaataaactgaatacaaacaaaagcaacaatggcgttcaggtattttcacattatcttagagtgttcacaaaattgatctgaacacttaatctttccttgatgaaaccgctgcttgtccactcccagacatcagcctccccccaatgagtccccgatgctgggttgcagaggctaagaatgccatgcatcttttttattgtgacacactaatttcatcttaattgctcattatagtattgcattataaggaggcactatttttaattacctttggggaggctgtttctaaagctgtctgctctctggggctagagccatccgttcccaaggagtcacctgactgtgaactttcaatattggcctgaatagacttctctgcttctcagagtgga

SEQ ID NO: 31409 - DNA, 1132 bp, Mus musculus
tgcctgtggaggccagaagagggcttccaatccctagacctagagttaactgcagctgcaagcacccaacttgggtgctgagaactaaacttaggtcctctggcagagccagatttgcccattaatgctgatgccactctccaatcctaagcttttttaacagtgtcagttctaggggtcacactcatcattgcttaaagagcaatcactttatggactgggcggtctccccaagcctcgctcacagattcctaatagctctcatctgagcaaatcttttcgattctcaatgaaacctcagcgtgatcgtctctaccgtctggctcccaggagtctctcatacttgccctctggtggcctccaaagcaaggaagtaacagatgacccgtggggtgtttcctgggctccaggcactgctccaagtatctgtctaccccttcatgtacagcagccgtagaagggctggccccacttcacagatggaaaaatggaactatcatgaggccacatgatttgttcaacaccatgtacagccaacaaacagcaagaagccaatggcttcttcactgtcggcactgaacatgagtgattctcagcctcagcctgagaagaacacttgacagtgccccttgccccatctcccatagttttgtcaaagccttcaactgcttctcccctacggtttctaagggaggctttgagtgatttcaggttccacagatctcagggtccagctgtcctgtttctatgcttgttagtaattttggtgggactagagacgagccttcccaaagacgaagttcttgaacactgacagagtggcctgcatatttacgtaaggatacgaaagcatccctgcgcagtctggccagtgccaaagactaagtgtaaatcaataaactataaaccaccccagggaaatctatctggacgtggtgactcgaatctgcaatcttagcactctggaggctgagctaacctgggctaacatagtgatatagattggactcaggagacagataattaagtgagcatgaagacctgaatttggatattgagaacgacagatccccagagtccactggccggtcagcctcttcagatcagtcgtcagtgagaaacactgtcttgg

SEQ ID NO: 31410 - DNA, 1349 bp, Mus musculus
agcccatgtgggggcttcagtatactcccaatgctgtgtcatgttcctctgtttatttaataattgtaattggacacggcaattgtttcgtaagtaaagtctcttctgtacttatattttgttctcccaattgaaaagcacatatattcctgccaaccagtagcatttcaacaattactagccgtggctggcgagatggcgcacctagcacgggtgctcatgtagaggactcacgcttggttgccagcacccacttccagtggctctcaactgcctgcagcttcacctccaggagctcccatcctctctcatctggatccagacgtatgcactcacgcatgcgcgtacctagatagtcacatacatatgcctgtaattaaaaataaatatacatataaaggaacaagctcactggagggctttcattcatctcccataggatgtccaggtggttctgaaggggcacacacaggtagtgagggtaccaatacctgcttcacctccgtgcctctaacatcaccacactgactacaaacatttgtcagctgatgaggatgtctgctcatggatcaggtggactttcagatcttaccaagactgaagctaccactcagcaacagcttcctattcagtgctgagcctgaggcaggaggacctactccgaggctggacagatggcatagggttgcaggtgtgcacagagaatagtgtccagcgcacagcagaggctttgtcaaggcaaggttgtcaggatctctctggctggattataggtgggctgccacatttatctgacatctacgtgattctagagttccaaactctggtcctccttcgtgtgggcaaatgctttaatcactgagctgtctgtgaggcctccatcttatgtttgtcagaatgggtttcatgtaacccaggctagccccaaccttgctatgtagctgaggacgaccctaaattctgatcctcctgcctttgcctcctgaatgcttggattatagtcctgtacttcattgcccagtttatgtgatgctggggcctttgtgcatgcctggcaagttacataccagcctgttaactttaattaccttttttttttttttttttttttttgctagggatcaaacacaggtcctcatgaatgccagataagtgatctaccattcagtgattatctttactccctaatgtttaattttgggctgccagttttcttgaatttatattccaaaggaccctggctattaaatttttattttgatcagtgtgactctgagacactgcctccgatataaaatctgcctacgtgtgtgaatacttgatattgtttatttctatttctctctgtg

SEQ ID NO: 31411 - DNA, 1106 bp, Mus musculus
gtgaagttctagtctgcattcaacatagaatgttgaatttgaatgttgaagctagaatctggggtgtttttgtttgtttgtttgtttgtttttaaatctcactcctgtagagtttgtcatagactgatatttattttgttattaaggggaggtgggggcaggatcttgcttttgtagcccattcaggcctagaacacaatccttttgggtcctgatcttagatattgactggtattgcaagtttgtgtcccattacacagctctctctctctctctctctctctctctctctctctctctctctctctctgtgtgtgtgtgtatttactcgcttacctgtttgttttgggggtggactcttgctatggggcctcaactggcctagaactcacaatcctgctttagctttctgagcactggaattacaggcagactgtaaattagattctctagaacttttaaactacatttatttcattacgtatgcaccacttcatgctcctgaaggccagaggataacttgtgggagtctgtttacttcttccacctggggctggactccagtcgttgggcacgtgcccttactgtgttgagccatcttgctagcctaggtaccccctccccccctttttaaagacagggtttctttgtctaccctggttgtcctggaactcactttagtccaggctggcctccaacttagagatctacctgcttctgtttgttaacctgagcactctgccattgacctatatccaacccgcaattcttcttcctccccctccctctccccctcctcctccctctccctttccccctcctcctccccctccccctcctcctcttccccctccccctcctccccctcctcctcctcctccctctccctctccccctcctcctcctccccctcctcctcttcctcctccactcacagagatcgatcctcctgggatcaaggcatgcagcaccatgtgtgtgggaccacacctagcaaggcaaagaggatcttccccaccaatagcatcttcttttccagttagatgcatcatcatcaaggagacgctcacaggcagctgcccctttctggggttagcacacctacc

SEQ ID NO: 31412 - DNA, 2272 bp, Mus musculus
ccaaacaaagcgtcccaagcagactatagaacttggcctcgccgttcattattcatggactttttaccaatacagtctttccttttttacctgtacaggttgaatgatcccaaaatgtctgaagcagagcgccagtccatggagagcgagcgtgcggaccgcagcctgtttgtccaggagctccttctttccacgttagtgcgcgaagagagctcgtcctcagatgaggatgatcggggggagatggcagattttggtgctatgggctgtgtagatattatgcctttagatgttgctttagaaaacctaaatttaaaagagagtaataaaggaaatgagcctccaccacctcctctttgatgacctccccactcgaagacaatgtcctctgtgctgtatttgccaatgaaagtggacaacagctatcctgggtttgtgtggtgattgtaatttcaggtctgtcactcttgttacattgtgtacattcaaaaggaagagagaaatatatatgataatcatttccacttaactaatttttacttctagcaggtaaatgtaggtagcagtgcagggtgatctctgcttcctgtaccttgacatgcaaaaggctctcctaatactccacattcaaactgaagaggaaaattgaaatctctaatgaagctgctgtgtgtatttatgaatattaatgaataaaaactgcttggatggtttacctaactactgcatgaggttttttgcagcgtgcatgagtttcagtggccttgttatttaaaaattaaatacaaggagtaaaacttaaaaaaataaaatttaaaaataaaaataaaatacaaagcccaaagctttcccagcgttatccaatggttactggcagagtagcttttgaataatgtctgcctgactcacccttatccatgtgcctcctacgcacaaagccagctctgcagtggaacccagggggcctagccagctacagcgctccactgtatgactgtcctgtcgccctgttaaccagtccagcctgtctctgtctcttgtctcaccagaagacacaccagtaaaggcggggtcctctgcagggcgactgtgtgccctttagacaaatcctgtttgtgtttgttggaagtttttactttttgtggttgtttaaaattttttgattgttaaacatgttcattcaggtgtagatggatttcatttattcactgttcagtgcagttaacctgaattatgttgtcttgttttttaaaatctcaccacctcaatcatactttgtgccgtttatgtgtgtgtgtggtttgctgagacagatcagtatcaggggagccttcccacaccttaccaaccaaattcttaatgcttattttagcaccttgtatttattgtttttcccctcctggcataaaaagtaaagttttttaattgattcatgccacccatatgcctatgttatcaatcctgtgtgttgaaaaaagaaaaaagtagagctgccttggtagttagggtgtggaggatgggtgctttctgtttgtctccaggtttcacactggctccagggaggggcagaggctctgcgggggtggggcagtttttgaaatgtaaatttagaacttttaaaaaagatgcgcagcttctgatcaatttctatgagacttaatctaatcatgtctggctccggccctcttccctgtgagccgtccgtcctctgttggttctctctcccgccatcttgtcctcccctctgtttttcatgacaagcatacagacttgaacacccctgggtgctgtcaagaactgtgaagtccatggtcatccaaatctaccaaaaaaagaagtcaccctccatgtctaaaaaaactgtcgcttctcctcggaaacttgagactccaccagcttccagatacagtagctgttttctttagtctttgatggaaatcttctgaaggaaccgccctcgctgggctcctggtacaccagaggtcaaggccggtggggttttctttttttaattggttgttgagaagtttcagaagttcgttttccagctgtggtcatttcagacacatctgcaccataactcacacatttcaataaagcattttcaagactgttggccactcgaatttctttggtgttgaattaacctgaccatcattcagaggatttttttttttttttaacatctctaatgcagtttttttttttttttttttttttttttttttgctttttgtgctaaacacagagttactggttttgtgtggatgta

SEQ ID NO: 31413 - DNA, 1104 bp, Mus musculus
ggtatccagtgttctcatctgcctccacagacacctgcactcaggtgcatgcgacagttgggaagacattgccctcttggtttttgtttagtatatgtatgtgttttctatatctttttaattccaaactactcggtagagttaatcagagtgatttcatttcctgtgcatttaaaaaaagatttttttttaaagatttatttattattatatctaagtacactgtagctgtcttcagatgcaccagaagagggcgtcaaatctcattacggatggttgttagccaccatgtggttgctgggatttgaactcaggaccttcggaagagcagtaggtgctcttaaccactgagccatctctccagccccctaaaaaaagatttttaaaaaatgaccagagcataatgtgttgtctcacactctctgtcattagacacacactgacttctgaaaggaccgttgtctcctgaagctgtgtaatagatgcatggtgacctgcagtctgcagatcttcctctcctactctttcccttccagagtctcactctataatctagactggccttgaactcatgctcctgcctcaactttcagcaacagggcatggtaaaatttgcctataatccttataattctttttttttttttttttaagaattatttatttaatatacatgagtacactgtagctgtcctcctcagacacaccagaagagggcatcagatcccattacaggtgagccaccatgtgggtgctgagaattgaactcaggacctctggaagaacagtctgtgctcttaaccactgagccatctctccagccccaatccttatcattcttaaggtggaagcaggaagatcaaatattgaaagtcatcctaggttacattgtagttaaagaccagcttatttgcttttgggttctttggaccttcaactgtattagcatgctttataaactttgaacagaaaagcaactgcaagctgggcatggtgacacacgcctttaatcccagcacttgggaggcagaggcaagcagatttctgagttgaaggccagcctggtctacagagtgagttccaggacagccagggctatacaga

SEQ ID NO: 31414 - DNA, 1167 bp, Mus musculus
aagaggtgatggttttgtttttcagtctgtaacaccatctttctttcactcacggtccctgcatctctaactggaggcagttagattgaggaaaggtagaaattactggaaatgtgaagaaaatggaacaagcctgagaaattagagcctgaggaactgactgacctcggactgacaggtcacccacctctgggctgggactgtgtgtccccacacccagctggggatttttgtttttgttagctttggtttttgttttttgggtttttgtttgtttattttggttttctaagacagggtttctctgtatagccctggctgtcctggaactcactttgtagaccaggccggcctcgaactcagaaatccgcctgcctctgctgcctcccaagtgctgagattaaaggcgtgcgccatcactgctggccaatgttttggttttgttttttcttctttttgtaaactacttattctttccttaaccttgagttacgatgaatcgagtggtgttcgacatgtacgtagaatgtttcaccctgggcgggggctaggaggccctcgtgctcggagatcaaacatgcactttactagcagttctactggtggactctcttcttctcagagttcatactctccaagcagtagggaagccatggatcctatagctggtaagtgtgtttctacttctgagtggcaagggcaggggtgtggagctcctttaaagatgatttgtgaggctgatgtcttacttttgcatctagtcctgtgcttggattccttcaaacatttagaagtcttaggacatttgtaagtggacatcatagtagcccatgtactactgcgtttctcaaaggcattcggggtaagataacacaaaagaagggctttagggaagatttcagactggaagaagaccttcagaattccatgattccactttaagaacttaggaactcattaagttctccttgggaggaaagtaggaatgtgtcctgctcatcacgatttgagcacactgattattgaacatactgaaggaggatgttacaataccttcaacaacttcactaaaacaagagtctgggctttactaggccagagtcaagcactacaggtgtgaaggacttgccttgccaagcactgccaagtactttgaaacagcagtga

SEQ ID NO: 31415 - DNA, 1079 bp, Mus musculus
tagggagatgtacttggtttgttttccttacttgctatctagagaaacagaaattagaagagtgtcctaagtttcatatggaaataaaggttttataaatgttaacagttattaaaacctcattgaaatcaagcttctaactgtaatcttaacactcttaaatgcaccctctcacacaactacactcctttaatcccagcggggcaggcaaatttgtgagtaagccagggttacagagtgagatgaaattgtctccaaaattaattaacttaaaaaaaaacaaaacccaagaccttataagagagtagatttattgctatttcaggccatagcatattcgtcacactcttgtggaccgtaactgtatttgtatgtttgagaaggagcatgggtgatctcaatgcaattccactttgttttccagatttgtactatggtggggaagctttctctgtagagcagccacagtcttttacttgtccctattgtggaaaaatgggctacacggaaacatctcttcaagaacatgttacttctgaacacgcagaaacatcaacagaagtggtaggtgaagtattttgctaaaaatgatgacatatgttactcttgatgttgctgaagctaggcactgtcatcctcctgtatggtataatgactacttatatagtaataaaaattactttcaacagcaaattttagagccctaggatgctgcatttcttcaagatacacgcaggggtgcctcatcagaggcagtgggaggttgaaagggcccagccagccgtcttctgcctttgtaaagggttcttgttattgttctgggctgattttttttcttctatgaggagcttttttctgggggaaactgcaactctttacttgtgtactaagcattcctggactgtgtgtacaccacaggccttccttcaatttcatcagattgcgtcttagcttcccaggtcagaactcagtgcttctcagttcttcctttctgatccctcatcccacactcccccatgaatgacaaaaagccaatagctagaataaaatatgaagtctaaacttgaaaactttcaaca

SEQ ID NO: 31416 - DNA, 1177 bp, Mus musculus
atacatccaggcaaatcacattcaaataaaacaaatctggaagaggaaaagggtcactaaaaatagaaataaaactctaactttaaaagtatttaagcctaaggggctggggagatggctgtggttgagagtgcttactgctcttgcagaggccgacttcagttcccagtgctcacagccaggcttggagccgcccagaacaccagtttgattgtggggagggagctaataccctctggcatccttgggcatcagtacccagcttgtgtacattatgcctacttctatttttttatgtaaacataaaacattatttctagttttggtgagcatttgttttttagttccactgtgatgcctaacttcaggtatcaacttgaatggattaggatacactcaggaaacatttttcatgtgacaattaagtctctctatatcatccatgtgtgagtgtgctggcctatacatacatgtggaggctccccacccatccatcgattttggaggcagggctgtataggtctccctgtgaagcctaagttggcctggaactcacagagacccacctgcctgtgctgcctctcagatggcaatcacaggcctctccctaactggaaccttgtttcttaaaaacagaagtggaatagaccaaataactaatgacaaaatgtagcaagagaaaaatgaagaattcaggaacatttcccagaaatgagcagagagacagttgcatcagtcaggctgtagttgtacttgcatccaggctggtcttccaggttgatgttgttcaccttcctgctcatgccctttcctcaacagcaaaaaaaaaaaaaaaaaaaaaaaaaaaaaatatatatatatatatatatatacatatatacatacatacatacatacatacatacatacatacatacagggtaagaagaatagtagaaaactaatacatgccggtgtggtggtgcatgcactgagaggcagaggcgggggttctcttgagtcagaacagccagggctacacagagaagccctctctcaaaaaccagaaacgaatgctcccttattttaaacagacaactgactcaccttacagatttatatacctaaagagaactctaaaacatggtcagtaacaagcagggttccccggagcttttccatctttagacttctcgga

SEQ ID NO: 31417 - DNA, 1099 bp, Mus musculus
ccgctccccaccctgaaaatctgtggttttataggacgagttgagtagaggtaaccaactaagagaattgttggagataaaatacagaactacaaaaacgggagatacattgaagtcagtgagaccagcttctccagctgaatacctctgtgtgtaagtagaagggaagtggataagagacattgattgacttgcctaaggttccaaaggggaagtggaacaaggattcacttgttctgacttctggtccagtgctcagtttgttttctcttctataaagagggatgagatagtaatgccagcctctctgaggatggttgtggggtaaaatgccaatgtgtgtacagttttgtaagttagagagcaatgactgcaggagtgaaaggtgaccgtgtttttatcatggaagaccagagtagaagtggaggttggagcatgagaggtaaaatgcgggatttcaggtcccataaggacagtctgggatgaaggacggattgattatgcctcagttttttttttttttaagatggacagacagacttggtgacctgtaatcccagcagctgagggaagttgaggcaggaagattgagacttacaagacagcctgagctacttgaaaccttgtcttaaaaaactaatcagagaaagggtacaaagagatggagcaagttttagaaaggtgtgcagtagcatgagatgaatagatagatggatgcttttgacaaggaaactggttaaaggctttttgctaaaatgagctcgaaataaaaaaaggatctgatttatcaatggcagtaggaacagaaagggaaaaagatgacaggacggagtctcattgtaagacagcaaagaatagacagggtactggaagaacagcagattcttctagcaaattgggagcataaggatgaaaaaaacacacgctcagcttttgaccctttgaatgaaaggtggtggtggtggtattccatcaaatagaaaccagaggctgggaaatatacttgggggagagaaataggggctggtggcaagcattttacagccatctgcatagaagcctggacattgagctgctctcagtaagacaacacagggaa

SEQ ID NO: 31418 - DNA, 1176 bp, Mus musculus
cccttggttgtagaacttgctaaaggtatattctttggtcctgcctagatctgtctactggaggagattctgtagggtgggcccagcaggctgcttttttgtaaataaagttttatggggaaacagccatatctagtcatttatgcgtcatctaagctatatttgtactgtaatagcatagttgagtagttctgacaaaaccactggaaatatttactattttgctctttacagaaaaaaaaattgtaggtttctgcaataaacgataaaagcataaatatgcagtagcgcatttggaggtagcaggtgttagggaaacccataacaccttgtaaataaggttatcagagggcccgtctgaatgaagatggggcttttaagagaaatctgaactgatgaagacatgtaaagggaagggggcatttaaacaaaaattatgtttaaaggagaaggaagtctagcaagtgcgcaggtcctgaaacttgaagagcttttggtgaggccttctggcaggagggcagtgattggggtaggaagagaggaaatgaggttggcacagttgaccatgcccttctgtcctgtcctgtcctgtcctgtcctgtcctgtcctgtcctgtcctgactgaggacagtttaattgggagtagaagcacatttctataactgcaggtggagggcgggctcttagggtgaatggataacaggctggggttgtccactattgtcctccgcggaggtatctcagaaacctttctttgcaaagtgtcctctgcacagatcgctttattttggtattactcagccctaatgcgtcttagactaagctgttttcttcttgcaggttgagggctttatggagaagaagtccccctcccttagttgaatgggaactccatgagccttgaactaggtggtcttcattagctttcaaaagggaaatagacacaatctaaggcatattttatactatgacccaggagtcattgaatcatatgcacctggtgtaccaaacaagttttgcaaagtagcactcacctacacttggaaaaattcgtggttttttttcctcttctgtttcattaaaagaaaatatatgattgtgattttttttaaaaaaagaactattatattttacatatatgagtacactgtaactgtctttagacacaccagaag

SEQ ID NO: 31419 - DNA, 1172 bp, Mus musculus
catatctcattacagatggttgtgagcaaccatgtggtggttaggatttgaactcaggaccttccgaagagcagtcagtgcttttaaccgctgagccatctctccagctccagtgctagtgtttcaatgcttctgctctgaggagcagcttgtgaaagtcatggctcccccaaggcaagttctaaagtagtgaattcagaagaagataagttgtttctaatggaagctgagttttcagccttgagattaagatgacctctctaggcttagtaatttattataagtggtattatcattattattgatttggtttcttttgagacagagtctctctatgtaaactaaacctagctgttctggttctctatatagaccaggttagaccaggttagcttacagagatgcctatctctggctcccaagtgctgtctgtctgtctgtgtgtttaatacttgctatcaattacagaccctgtcctaaaattcaggccttgaggatggagcacagtgatagaatgtatgccacgcagctcagaagacagttctcccctttcactgtgtgggtcctggggattgaacttgggcatctggcttggtgtcaggtgccttaacactggttgtatctgttagaaactcaagacttgatgtttcctgcctgttttactgaagaaacctttctgctgagcagctggtatccccagattcatccttttcagttctgccccatcagatcactggaatgacatgcagctattacatttgttgtcagtagtctaagttaggtggttttgttattgtttctttttctgcaccaccctttagctgggtactgcggccgccgccgccaccaaccaccccacccccaggatttctctgttctagaactccctctgtagaccagctgtccttgaactgcctctgcctcctgagtgctgggattaaaggtgtgcgccaccaccacattgttagttggatactcttccccagtggtcttttaagtgtggtccaagtactactaatatgggcatcactaagtgggtgtgtcgcctaaaaatacaccctcaggactcatgtaattaagctagacatagtgtggtgcacgcctttaatcctagcacttggaaagcagaggcaggctgatctacagagtttgaggccagcctggtcaacata

SEQ ID NO: 31420 - DNA, 1148 bp, Mus musculus
gaatcactaacagcagagaaaaagagcccttccctattcagaggtgatggaggcctccaggtaccagctggagttgatctgttatgtaaaccaggcattggctccccaacctgtctgtccgctgatctgccctgactgccggtctcactactaggttttaaatttcttgtgaccaggaggatacagctcatttgaactaactgccctcatctatttatccagtcccttgggggtaaggcaaaaatgtggggcaaaccctatccaattgtttccctccctcccctcctacaggaaaaggctacccctgtaatcataagcctgcttcagtgcccaatacccttgggctcctcctccattagccccactgtgctggtcccaccccttccctgtgggtcatgaaagggtgtgacctccttcagttctgccgccacaacgcacgcacccgctgctctcttccaccctcagaggatctgtctgggaggcagctcagcctatgctccctctataatggctaacgcattcgcataaggttcagagacaaaaaactaggctgatctccgtggctgcagttctgaagatgttccgcaagttgtgatataatgcggttttatctggcctttgtttttatttcacctcattctgttaacacccaatagaaaacctcgtgtgtttgtgtctgagggatggaccccgacctcgcccaatttcccacattcctgaatgattctttgcatcctttcctctcagactttaacaaatcactgcttctggtgtgcgtgaaaggttaagagggcagaagaaaaggtaggatttgaagagccgatcaaaagcaaagcttaatcttttggacagcatttttcaaaatggggttaaaattgacatggatcgcattaagggcgaagcaactgagaacccaggaaaccgcatgtcgagaagcacgtaaaacaaaaataaaaacgatacatcctcctcacccattctaccacgtcccctcctctctccctgcggcacaactcactcccagaccgctctgcccacgcatactcaactaaaaaattcagaccacgccaaccatgccacgaggtgtttttattttcatcaatcatacaaataattttctataatatcccagggcaaaccggtgaaat

SEQ ID NO: 31421 - DNA, 1162 bp, Mus musculus
cccaggcagcctggagatgctgagcgccccccagcccccgcgcgcgctggccacgccctccgcgcgggctggccacgccctcgttgcggcgggcgagaggcggggcggggcgcggtgtatataagacgaggggcgggcgccgctcttttgtctcttgctgcagcaacgagagtgggagcacctggagcgcgagctcggaaggagaatccacggtaaggcacagcgccggccttggggcctaccctgggtggggtcgggccagtttatggctggcgggcgcgttccccttcggttgcaacaggcgacccggcggtttggaatcttctggggctagcaggccacgccctggggcttcggagggagggtgtggtggacgagtctaggatcctcggcctccgggctgcgggaacgcccaggactgggaatgccacgttgagaggcgttcgcggaaggcgcgggatccaggacgcgctggtcacccccaagcccctggccacccattatcaccttgtttcgcccatcagagttgtaagaaaatggcagacaagccggacatgggggaaatcgccagcttcgataaggccaagctgaagaaaaccgagacgcaggagaagaacaccctgccgaccaaagagagtaagtgtgccccgggttcccaccccagcgctcctcccttccctgctgtgccagcccggcacccccacccccatccggccactatcttcccaccccgaatctaaggccacagccacccttccagtcacacaaagcactttgtctcttccaaaccccttctctgtccgcaggcctcgtgggtgcctcacccacaccaggtttgtgggttgggtatggggggctgtaaggtagctccaatgaccacatccctcccttcgcagccattgaacaggaaaagaggagtgaaatctcctaaaagcctaggaagatttccccaccccaccccaccccgccccatcatctccaagaccccctcgtgatgtggaggaagagccacctgcaagatggacgcgagccacaagctgcactgtgaaacccgggcactccgagccgatgccaccggcccgcgggtctctgaaggggacccctccactaatcggactgccaaatttcaccggtttgccctgggatattatagaaaattatt

SEQ ID NO: 31422 - DNA, 1128 bp, Mus musculus
tgactgctagcctgtttgttccttatgtctagggcatttgtttgttttaagcatttctaagcttttcaacattttgttcaaatacaaaatgaatcagtgttacgttttagtctctgagaaagtcctcattgccttattaaagggccttttgcatgtgggtgcacattgtataggtttggataaacagtggtgcccatcagccacatgcagtagttctgcagtgaagacggaaggattgttaaagcagccctgtttgcttcggggtctaaaggaaaaagtcaagctctgtctggagcttagactgataccagcaaaggctgatttgaaagtagctggttttccagcaaggtccctgttcccacacattttacctctgcagagctgaggtcctaatggtgacctagaatttgaaaatcacttttccatgaatgtcatttgcattttttcttctttcctgtttgtgaaggagtttgaaaagaggaagatgctttgaaggacacaacaagaaattctttaaagctgtggaagaaatctagacgtgagggccagtccaggctgtcagcccatgcagctgacactggttggtctctcagtatgtgggaaatccaggcaagttttagaatgtcctaaattgagctattttcacttactgtgtaacagagacagataataaatctatcatttgatttgaacttggctgtgaagactttttattgttccagtggctacggtggtggtggtggttgtagtggtggtggcggtggagtggggttgtggggggatggaagggcatgtgtgcttgtgcaggctaatggctctgtggaaggcacgccagacttttagctgaatgagactgtaacaactctttatttcaaagaccttagtggacctttgaatcatagttaagtcatatgtaagccttcactgtctggctcaccagaagtaggagataaatgtatttagtctttagcatgtaggaaagcaaccctgacctccttcagaacctctcccatcaccattgccaccattgtcacagatcggaagctgctgctcttgggaaatggaaagtacttactaaagtgcttcatcgtggctggtcatagggccacctcctcgccatccatctta

SEQ ID NO: 31423 - DNA, 1172 bp, Mus musculus
atgctacttattatgtgatagttctggagcatttcattcagaccctaacttaacaattcctctgttagataaattgggaaaaaagtgtagttgttaaagaaaggtacccagaatgtgctcagaagcatagccttcaggtaagagctttcttaagttattaattcttcagagagagtggtagatacccaaagcattagagaagattcaatgctactaaacaaaggtaccttctgcggaagggaagaacctatatccagaggcagaagtcttgttcagtagtggtgaatatgtgatcttttctgcctgccttttgtcaaaatgcatcctagataggatggcagtgctagggagtaatacttgcaaacagcacagctcatcatagtgacaccttgataggtggaatactgtagaaagcatggctaaatctgtgtggccatcagtaccagttggattcaaacaatctcctcccttttatagccaaaatcacaatttgaaagtctaaacaggtgctcgcttcggcagcacatatactaaaattggaacgatacagagaagattagcatggcccctgcgcaaggatgacacgcaaaattcgtgaagcgttccatatttttatctctccacgaatccagcccttcaaaggataataacagaaaaaaaccaatacaagaacgggaacaacgccctagaaaaaacaagaaggtaatccctcaacaaacctaaaagaagacagccacaagaacagaatgccacctttaacaactaaaataacaggaagcaacaattacttttccttaatatctcttaacatcaatggtctcaactcgccaataaaaagacatagactaacaaactggctacacaaacaagacccaacattttgctgcttacaggaaactcatctcagagaaaaagatagacactacctcagaatgaaaggctggaaaacaattttccaagcaaatggtatgaagaaacaagcaggagtagccatcctaatatctgataagattgacttccaacccaaagtcatcaaaaaagacaaggagggacacttcattctcatcaaaggtaaaatcctccaagaggaactctcaattctgaatatctatgctccaaatacaagagcagccacattcactaaagaaactttagtaaagctcaaagcacac

SEQ ID NO: 31424 - DNA, 1099 bp, Mus musculus
ctgtccgccgtctccgcacggcctgcgagcgggccaagtgcaccctctcctccagcacccaggccagtattgagattgattctctctatgagggaattgacttctatacctccattacccgggctcaatttgaggagttgaatgctgacctgttccgtggcacactggaccctgtagagaaggcccttcgagatgccaaactggacaagtcacagatccatgatattgtcttggtggctggttctaccagaatccccaagattcagaaacttctgcaagacttcttcaatggaaaagagctgaacaagagcattaaccccgatgaagctgttgcctagggtgcagctgtccaggcagccattctatctggagacaagtctgagaatgttcaggatttgctgctcttggatgtcactcctctttcccttggtattgaaactgctggcggagtcatgactgtcctcatcaaacgcaataccaccatccccaccaagcagacacagactttcaccacctactctgacaaccagcctggtgtacccattcaggtgtatgaaggtgaaagggccatgaccaaggacaacaacctgcttggaaagttcgagctcacaggcatccctccagcaccccgtggggtccctcagattgaggttacttttgacattgatgccaatggcatcctcaatgtttctgctgtagataagagcacaggaaaggagaacaagatcaccatcaccaatgacaagggccgcttgagtaaggaagatattgagcacatggtccaagaagctgagaagtacaaggctgaggatgagaagcagagagataaggtttcctccaagaactcactggagtcctatgccttcaacatgaaagcaactgtggaagatgagaaacttcaaggcaagatcaatgatgaggacaaacagaagattcttgacaagtgcaatgaaatcatcagctggctggataagaaccagactgcagagaaggaagaatttgagcatcagcagaaagaactggagaaagtctgcaaccctatcattaccaagctgtaccagagtgtaggtggcatgcctgggggaatgcctagtggctt

SEQ ID NO: 31425 - DNA, 1356 bp, Mus musculus
tgataaaccaacacaataaaatatttatagtagaatgaagtgtatatgtatggacatgaagtgaactaataattgcagcaaagacttagtaattatttaccatggcgtctagccatgcagagaaattttggtcaagacaacagaagaatgtatagcacaagtacatactgcttaaaatattatagacttttattttggaagggtagctacaggagaagtttactagatttaaagtatgcatcttgtggtaccataagcccagaaggaggaggaggaggagcagcagcagcagcaacagcagcagcagcagcagccaggaagctctggaaaggcttctggttgctaggagaagttttagatctgggtggcttggtagatttgattggtttcagcaaggaaggaagaattaacttcaagtgtggtctgtattgaagaagatgattattcaagaaaaagaccccttacactgtttggggcaactttgttaacatgagctttctgctcaacaggtctatccaggaaaatggagaactaaagatcgaaagcaagattgaagagattgttgaaccattaagagagaaaatcagagatttggaaaaaagttttacccagaaatacccgcctgtaaagtttttatcagaaaaggaccggaaaaggattttgatcactggaggtgcaggctttgtgggctcccatctaactgacaaactcatgatggatggccatgaggtgaccgtggtggacaacttcttcacaggcaggaagagaaatgtggaacactggattggccatgagaacttcgagctgattaaccatgatgtggtcgagccgctctacatagaagttgaccagatatatcatctggcatctccagcctccccaccaaactacatgtacaaccccatcaagacactgaagactaatacaattggaacactaaacatgttgggattggcaaagcgcgtgggtgcccgtctgctcttggcctccacttccgaggtataagaatcattaataatttccccaagatgtttttatacctttgctcaatgagccacctaaccagccaataacaatgtcctttttttccattaacttatgtatttattcagttgataacagcttcccttctagtcttcctctcaccaatcccctacccatccccttgtattctgagaagggggatacacacagccccagatactatcagacctagcacatcaactcactccaggactaggcagatcctctcacattaaggccagacatgacagctcagttaggggaacagaatccacaggcaggcagcagaatcagagacatcccatgcttctattattgggggatccacatgaa

SEQ ID NO: 31426 - DNA, 1210 bp, Mus musculus
gtgccaggcttgcactgagatcctcatgcgccaccctgtttaccattgcaactgcccgctctgccgccgcagcatcctgcaaaccctcaatgtctacctctgaggactccctccctgcctgctcatcctctgcgctccacacaccgggacagcatcaacactttgcctctgggttctggcctgagtcttcttttcccccgaaggcggcgactctgccaagcctcaagccatatatccaggacgtgtagcttggaatactctggaagactccagtctgggtgggacagagtaacactttctctaaatcctgtgtggggccctgagatgctgagggtggtgagtatgtcactatgcaagggccctgagactctgtggtgggctcttgtgctgcgcctgccagggcccacccagatgcctgcctctagggctgtccttctctgcttctggctcttttgttggagtttttggtcctttcccccaggccacgccacgccacatcagtgttgtttgaggattttggaaactcatgggccttagagtgatcttgattctttttctcttttttgttttttcttggtttggatcttgaacctttatgttcagccagagcctctgccctggtaggtctgggagtagaaactcgcagatgcccttctgcctgtcactgtcttttaaagactcccaacttgaccaggacctggagtcaggggtttatccctgagtacaggggtgcagctacacctggctttgggaccattcaccttcaggcaccccagctccatggggagcctcgaaaggaacaaccagatgtctactcattccctacatggcatagaacatagcattcctcctgggctctctccggcagtggagagggcattccgcacttttcacttgggtccaaacgaggggctgggcctcaggggtcatagctccatttagtcggtcggactgcccagtttctatgaataaagttctcttgacagctctaaaaaaaaaaaaaaaaaaaaaaaaaaaaaaaaaaaaaagagtcacgaggaagtggaaagtcagtcacaaggaaaaatacctgataattgtgtggttatttctcaagacagtttctatgagcccctaaaaaatagcacatttgcatagcaggttccagaaccgatcagggtaacttttttttttttttttgaacaaacactccctgaacccaggaagcagg

SEQ ID NO: 31427 - DNA, 2107 bp, Mus musculus
acatagctacaaaatgagatcgacatgggattccttttgactcaccccagttgtgactgcaacatggctaaaggtagggagagtttaaaaatctatcgccaggttctgatctccaaggtgcctcaagatgggcccactaatttggctaaggtaaggggtaatgcaggggtggatcgaacctccttcaatgttccttgaaaggcttatggaagccttcaggcggttcactccctttgatcttaccttgaaagcccagaaggcctcagtggccatggcctttcataaggcagtcaactccagatatcagaaagaaacttcagagattagaaggtgtattataagagggagacagttactcgatctagtaaaagaggcagaaaaagtgtgtgtgagagagagagaaaagcgagaggcaaaagaaagagaaaacaggagggatcgtagacaagaaagaaatttgccacagtggtaggagaaaaaaaaaaaaaaaaaagacaggatctagacaggaaacctgggcaactgaagaccaagcctcagctaaagaggctcagctgtgtcagactgaagttacttatttgggatacaccctttgagacaggaagcagtgcctaaagaaagccagaaaaaagactgtaacttagatccccaccccaactacaccaaggcaagtaaaaaatttttgggtaccgctggcttctacagactctagacacctgggttggcgaccttagctgtccgttgtaccccctaaccaaggaaggggaagtgtttgtgtggaccccagatcaccagaaagcctttagagaaatgaaaaaggccctactgatggcgagcctttgcctgacctaaccaagcctttcactctttatgtgaaagagagatcaggggtcgccagaggaatcattactcagactttgggactttaaaaaaggccagtggcttacctatccaaaaagttacaccctgttgctagagggtggttttcttgcctgccagctggtggttttcttgcctgatggatgatgacaacactcctgtgatacatcagaactttttgttgactgaacgagtagccttcgcttcattccacctgctgtcccactgtgtgagactacacctactcatcactgcgctgagaaactggtacttaaaatgatccgaagcatcagatcagccttggcctgagagttcgaactggtacactgatggcagtagcctcgcggttaaaggtaagcagaaggcagggacagcagtaaggtggtgaacagaaaacaagtgatctagacaagctctataaatggcaaaagaaaagtctacactgacagcaggtatgcttttgccactgtacgggacaatatacaaagagggctgttgacatctgcagagaaagacctaagatgctgtggctaaaaaaaaaatcagatggcagatctaacaaatccaaacaggcggcccaaggagcaatgatcctggcagtcaaggaacctaaagattattatgacatcagagagaccagatttagatataccgctgagcactatcaagttatggacagtatttgacttggcctgggggccaagaaattcaaaggtgtggttaggtcctttgactactatgttacaggactctctgacttggcagaagaaatagtcaaaagctgcaaggcctgtgctatgataaggtagaatttctaaaagaaatcttcccaaggtaattgggtccaaaaacggacctgtctttgttgcccaggtaaatcagggactggccaagatattggggattaattagaagttacattgtgcatgcaggccccaaagctcaggacaggtagagagaatgaatagaaccattaagggacccttaccaaattaacagcagagactggcgctaatgattagatagctctcctaccctttatgctcttcagggatagaaacacccctggacagtttagactgacccccctataaattactctacagggggccccctccactggtaaaaatagcctctgtacatagtgctgacatgctgctttcccagcctttgttctctaggctcaaggtgctccagtgagtgagacagcgagcaaagaagcagctcc

SEQ ID NO: 31428 - DNA, 1119 bp, Mus musculus
atattcctccggccttttaaatgtaatcaggtgttcataacttgtttccttctgtagagactcttttttatttttattttttcaggctagtgacatgtaagagccctttgagaaaagtagctcagttcccagcacccatgtcggcctgcgcacaaccactcagaactccagctcctgcagagtctggtgcttccggcctcctcaggcaccagcccctcacatgcacaaatgcacattcataattgcaaatagtgaattagatctttttaaaaattgagcttcgtaataagcagacatagtctggggtgaattctgggtgcggcactgtccagtagaacttttgttatggtagaagaatgtctatatcttcaccatgagtacagtagccactgccgcaagaagctgttgagccgagtctttacctaagttgatatggtgcgatatgactagtggctgcagtactcagcactgcttctgaggatggacagtgtgagggacagtgtgagggacagtgtgagggttctgaagcgcaggtagctctgctctcctgaggagaagccagtcgggaacaatgtgtggcataatttctaataatcacagagagtagagttggcatgtgggtggtaaattcccttcagagtacaggacagttccacggtaaagagttgtcattcctccaaatacaccatcgagatagcagatgtgctatttaaagatggcagggctaggtatgatggcacatggctgtcacccaagcacaaagccgtgtgtgtgtgtgtgtgtatgaagaatgtatttgttatgtgtttggctgtgagaattaaccagtgataggctgtctgccttgagatgttccctgtggcagaggttcttcttacaaaagagatcacagttgatctcagcttattagatgattgcttgtctggtgggcgatgcatacgctaatgccacttatcagaaaaagcacgggggtgtctgtatccgttcagccctcgtctgtctgacatctgctgtgtgggaactgtggagacgtgaggggacaggatgggaaacacagtcttcccttccctgaactctgacatgtaacttgggagaggattacttcctgtgacaccagca

SEQ ID NO: 31429 - DNA, 1593 bp, Mus musculus
aacaggtaaacatgcctgttggctcaggcctgatgccctgaacttgactctggaacccagggcggaaggcgagtaacaactcctaaaagttgccctttggcttctactgcacatccttgcgtatgtgtactgcaattacacacacacttaaaagtatctttctgccgggtgtggtggcgcatgcctttaatcccagcactcgggaggcagaggcaggcggatttctgagttcgaggccagcctggtctacaaagtgaggtccaggacagccagggctatacagagaaaccctgtcttgacaaaccaaaaaaaaaaaaaaaaaaaaaaaaaaaagtatctttcttttaagcccttgttctgagaatgcctttggttaatgtattagctctttggtttgaaagccattaagtttgctttgtaaggacatagtgattaaatgagcattcctcacttttcggtacctagcataaagtctgcatgtcagtttattgctctcaaaagagcaatcacctgacagtcattccctttctatagccagtgaagttagcatcaccagaataagatgaactgggatctgagcaagaggagtagggaaaaaaccataaacacacaacagtgtgcaagttaaaatgtaagaataggagctgtagaggtggctcagtagttcagagcacttgctactcttgcagaggccctacgtttagttcctagcacccaggcctgtatgtgtgtacatggttccagagaccaggaagtatcagactgcctggaactggagttacagctgcttatgacacaggtggtagtttgaatatgcttggcccatatggagtggtactgttaggaagtgtggccgtgttggatgaagtatgtcacggtgggggtgggctttgcggtctcatgttcaagtgtggtcagcgtcagactctcctagctgtagttggatcaagatgcagaactctcagccgtgtgtctgcctggacacttccatgatgttaatggactgaagctctgatactgttaagccagccctaattcaatgttgtcccttatgagagttgccttagtcgtggtgtctcgtcacagcaatgaaaccccagctaacacaacccacctgataatctctccattgttaaatgtctagttttgacaggctcattagctggtagaaaagggtcctgttttgctacatggcagttttaagaagaatgtgggaatctgagttgttgtattctggcttcatttcccccaagtttacaaaagccacttgtgaggaattccatgggtagaattccaagtgaagtctgctaagcagacctcagggtacctggcagagcctgtgtgaactgggtgtgaatgtccagcaggaagatggtcagagagtgttatcttccctatgaatcaagcttcagcttttgggggtcagcactccctctagtggggcagagtgcagctgaacatgggctgggaagctgggatgcctcacagagtaaaggctaacccatttgtaacatcacagtgccagcctggatctcaggactatttttctggtgagctgctctgcattccgtgtcattttcctggctgctaact

SEQ ID NO: 31430 - DNA, 1150 bp, Mus musculus
agagcattaactgagtggattttaacagctccattctctcaggctcaataaaaggttaaaagtgagagccagcagagaccaatagcccctttctctgcttcctgatcccctgagatgtgaacatggaaccagactgtgctaggaactggcccttccaccttgcctcctctgccagggtaaaccgtatctcctgaactgtgatctagaataagcctttctcctcttaagtagcttcttgtctggtatttaatcactataatgaggcaagtaacttacacaggaggcctgcggtcagtggacaagcctactgcgcaatgacagtcctatgccccttacagcttgctcctgcaagagccatcctgtagacctctggggaaagcatgaagacaccttcgtccccatacaatggcttcataaaaacaaggctgttgtcttcagattgcctgctgtggaggaggatctgggctcagggatttacatacatgatttcaggtgaactttgcattgattcttccaataaagagctatttacttcaccattttcaaaacagacatgacaatcagagggagagagagagagagagagagggagagggagagagagagagagagagagagagagagagagagagagagagagagagagagagagagagactttgtcatggaccttgcataatgaggatccggtggtttgaggtcagtctgcctctaagtggccactgctgaagcccttcataatctttgtgagcattgaatggcccttgttagcatggcttgcccacttgtgacatgtttagcatatgaattatcacccaaatgatggggtaagaatgctgtagttccttagggaagcctcaggccaggggctggcaggctccaggaatggactttggctctgcaaagaacacggtgcacagggaaatgcctagcagcctagaggacccaggtcattgctgtgtctctggctggctaaattccacagctgttatttgcagcctgcaataatcatggccacaaaaataaaaagaaaagaaagaattaaaaaagagagagagaaaaaaaaatcatggccacaaagtctgggttttgttggtcagcaaattgtggtagtttgtatctataatcctagctgttctgaaggctgaga

SEQ ID NO: 31431 - DNA, 1151 bp, Mus musculus
atgtagagaatagagaaatattaaacttgttcaagaccaacctcttccagtgtaagataataaatgtatctgtttttcttttgtcgggggatagtttcacttaggtgtgagactattcacctttgtgtctagcctcagtccggggctgcccatctgtcatagtccttgccttgggccatggtatggttgcctgtgtctttgacctgccctttccttagcacactatgaaagcaggtgggtgcaagttggtataaccttcctttgcagcttttagaatgaccacctcaaaagccactgaatcagagccttgtctttgtagggcttgccctccttactaaaggcttcttcgttggacttgagactgctttggggggaaccaggaaagagaagtgattcttccaagtcaccagatggccgttacttccatgggtgggtggggtgagctgcagtgagcggatggtaggaatagaaatgaaggtgatctgcttagacttgaagggacagtgtccaaccttccgccaagcctgttgtcagtttccttcgggatggcgcctcttctgctttgctttgcttccctaccgtccttctcagtcccccaatgcctatcctgctccaatcataagtctgagcaaaagccaaggagacggtgcccccagaacccatttctgaccaatggtcctcactgttggaatccactacaactaggaactctcagctctacactcagccctccgtgtaaggaggatgacggtatgggccatgatttctctgtctccttcatctgcgttgggggtcttgtttcttttcctttttggtttgaaggttgttttgctttattttataaaatcatagtttgtacttaaaagaataaagaaaaaaaaaaacaaggtctctccacccctgtcaaaataaatgtatatgacacatatcaatacacccaagttataaatcaaagggtgactggcatgcagttgtcactggtgagtgtctttaagaaaaggctttggtgtttagcccaggctggttatgaactggctgggttgctcaagctgactttgagactgccatcctcctgcctccgctggtatgataggtaggtgccatgaagtccagcttcatttgctcacccatctgtttgttttaagatttta

SEQ ID NO: 31432 - DNA, 1209 bp, Mus musculus
ctactttcttatagaacctaggaccaccagcccagggatggcaccactcataatggacagggccctttcccatcaattactaattaagaacatgccttacaggcctgtctacagtccaatcttatgtgggcattgtctcaattaaggtgccttcccccgcccccgggctggtaagatagctcagtgggtaagaacactgctcttccgaaggtcctgagttcatattccatcaaccacatggtggttcacaaccacccgtaatgagatctgacgtcctcttctggtgcgtcggaagacagctacagtgtacttaagtataataacaaataaatctttgggctgaagcaagcggaattgaccagagagagcagggctgaccggagcaagcagagatgctaaaaattcaatccccaacaaccacatgaaggctcacaaccatctgtacagctacagtgtactcacatacataaaataaataaatcttaaaaaaaaaaggctccctcctaactgatgactccagcttgtgtcaagttgacacaaaatcagccagtgtgtacactgggtgtagaagtgctgctctctagcaggctaaattttcctggggctgggatggtggctgagcaggcaaagtgcaagcagtaacctgagtttggatccccagcaccaacatagaaatccaggtgcagtggacacatttgtaaccccagcacaggggatgcagagagagacaagttcacctggagcttggtggctagccagtctcgctgagtggacgagctctaggttctgtgacagaccctgtttccaaacagaaagtggaaaactgattgagggagccacctgggggcagctcccagcctctgtccacgcgtgcacaccccgcaggaacacatgcatgcatatttacacaaagagttctccatttttcattttttcatatgtgctttataaacagcttgccacatccctctgctgtgttgtcacttttattgagatggtattaaatttatagtttaatttagggagaatcaacaatttaaaattactgagtttctcaagagtggggtctgctcttccatttatccaattattctgttatgttcctcagtggaattttaaaagtttgcttcttgcagattttgccggtgtcttgaattttattctagttgctctggtgaataaaatcatcctagctgacatgtgctgtaa

SEQ ID NO: 31433 - DNA, 1645 bp, Mus musculus
ctatgcaaatactttgtcccaggcccaccacttacatattttaaagtctgatgactaatttttacatgtgttcagctctgctggtgggatgacttcaatgaggcacttgggcttcccaggacttctcgcatttttgcatgcctttttaaggctgtggaaaagcagaacttcccttcagcgtctcttgtgctctgcttgcttagtgtctgtcattcgtgggccaatgggccagaagggattgggcatctctatgtctggctgggtatactagagtagagacagatggaggaaaaagtaaattagtaaaacctgatgataacgttatataaagcttaaagatcatctctctgttgcttttttttttcccataaaaacaccaagtgtatgcatgtgtgtgtctgtgcatgtaaggtcatttgcctgaggaggccagaggtgtcaggtgggtccccatggagctagttatagtctctccctcttcccctccctccccatcctcctccctcccccctccccctccctccttccctctccctccccttccccctccctccttcttttcttctctcccccctccctgtgtgcatgtgctctctctctctcccctctccacccatctccctatctgcatgatgatttccttggcctagttccttactggcccaaaagctgcccccaattaaatctgccttttgactcttaaaataaaatggaaaaataaaataaaataaaagagttataggcagttgtgagctgccagacatggggctgggaatcgaactcccatcttctggaggagcagtgtgctctcttaaccactgagccatctctccattctcgatatagcatttcaagatagtctcatgtatcccagcatggtcttgaaattgctgtgtagctgaaggtgaccttgaatttctactcctcacaccctgggatcacaggctactcccaacatttatgctttgccggggatcaaatctggtttttgtgcatacaaccactggcactaaatcctaagtgtctaaaaagagcatctcggactggcgagatggctcagtgggtaagagcactgactgttcttctaatggtcatgagttcaaatcccaacaaccacatggtcataatgagatctgacgccctcttctggtgtgtctgaagtcagttacagagtacttatatataataataaataaatctttaggcctgagcaagcggggccaattggaggtagtgggtggggttgaccagagtgagcagaggtcctaaaaattcacatgcaaccacatgaaggctcacaaccatctgtgtagctacagtgtacttacatacattcatacatacatacatacatacatctttttaaaaaggaacatctcattaaaaaaaggttagaaaaacctgcaatctgcctggttctttctttgtattagaagatgtttccacttcatgctaagtagctctgagcagctcaaatttaaggcatttttctgttatgttttctaactattggctctgggttctctatcttgggatcccccttcctttctcttagaaatttggttttcttgaggtctttttgtttcattcttttaattttaaagttagttgcaatattttttgttttgaatttgaaatgacaatt

SEQ ID NO: 31434 - DNA, 1177 bp, Mus musculus
tacacagagaaaccctgtccctaaaccccttcccccacctccaataaaaaatagaagaaagagagaaaactaggtagatagaaccatctcatatggggctggcgagatggctcagtggttaagaacactttttgctcttatagaagacctgggttggttcccagttcccagcacccacatgttagctcacaaccacttttaactttagttctagggaatctgtcattcttttaggacctctgtaggcaccaggcacatatgtggtacacatgtaggcaaaacactcataaagttacaaacatgagttaaaaaggtagtagtattgagccaggtctagtaccacatgtctttattcccagttttcatggatctctgagttcaaggccagatggtctaccaagtgagatcctgtctcagaagaaaaacaagttagtattgaattcagtaaggatattttaatttttgttttcctttcatctttgggtgctaggtcatggtgtaaaatgcatatagaatatcaaatgccattcgacctctttctcctggtatcatgcctgtgatgtcacattataggtaaaaaaaaaaaaaagaagatgtagatataacttaggttgactagtcaattgactttaaagttgattatcctgggctgtctcagcaggccctaataatgcatgatcccttaaaagcagaactttctcctgaccaagagtaaaaaacgcatgtcaaattcaaagcatggaagaaaggcctttcccccttaacctccaccccagtttctccctgcagccctggctgtcctggaattcctcctatggaccaggctggcctccaactcacagagttccacctgcctcagtttcaaagggaaaaggcctttctaattttcctggctttgaagatacaggagacaagaaacgtgggcagtcttaagctaagaactatggtggcctgcatagggagagccatcgtgacaaatacctgcacaggttctgccatagtgacaaatctgtgagtactccaggaaatggtgctggccgttgtagattcagcatctggctttggtgcttggctttcttctctgctgatctcagtttcacgaggtcccctcccctgccccacatctatgttctatatagtaatttgttgatggaagctcttgcctggtccctgctgc

SEQ ID NO: 31435 - DNA, 1202 bp, Mus musculus
aaccctttttaaagttaaaaatgctttgtttagaaagcctctccctttttgaatgttcattaagcagtgtggtgattctttagctctgttccagctttaattctaattctgtgcattggcagggttacttaccaatggactaccttctctaatgacatctcccttgggtcttttggatcaataatcctcagattgcatcatgttaccagcatgtccttgtgtgctttaactttgccctgtttgtgacactaccccagattgagacatgtccttatacattgctttcctctgttttgaggcactttggattgagacatgtccttgtacattgctttttctgtttttaggcactttggattaattgtggagctggatggtctgagccttggctgcatctgtcacctttcccctctgtaagcctcagctttggagaaagtctgcgcatgtacacaatcttcttactctttttacccaagatagaagaagcagagagctcttggataacgttctccaccaagtcttccattacttgagtctgtcttccaattcaagcctggatgtagctgatgctgtttggggcagagatgaaaggactgttctgcatagctggcttaatgagcacagactagaataaaaggtctttgttcagcttctttcctgtgttttatattgcctttgctcttgccctgtgactgggaacccatgtgatcaggcacagactttcctcatctttctaccaaccactccaagtcagtctttttattaaatttgttctttctcagcatgtcattggaatgtggatcgataatatatgggatacctcttctccttagaagtcaaatcgatgtggtcccaacagttttattcaagtataattcatgtgtcatattcaattcaaactgtaacattcggtggtttttaaaaaaatattcatagatatatgtagtgagattttgaacattttcctgtgaatggattcacatgagtcttgtgtatggcaaaatttagataatgttatttaaagttaatctatgctatgatatgtatttataccctttaagttgtgaaatatatgtgatataaaatttcccattttaactgcttttcagtgtgttgctcagtgagattgaatattttcagagtgttgcacaaccttcaccatcattggcctccagaactttgtaacagtgttctcagcctgg

SEQ ID NO: 31436 - DNA, 1149 bp, Mus musculus
ctcatctcagtgggctagagtccactaatctctgcttgcttttttttttttttgttgcaggaactgttcgtggagactatcgcaaaagatgcctactgctgtgctcaacaaggaaagaggaaaactctccagaggagagatttgggtagagtcgctgtggtaccccagggtggacaggggagctatgggctgggctttcttatagctgtttcacaaggcatcattgaagcaaggggaaatttggcttttggtttatttgtctacctggtaacccttccacatgtgtaagcctttagagactgtacctctcattcccttctatgctgccaaactctttttctagtatcttttttttttgtttttgtttttcgagacagggtttctctgcagccctggctgtcctggaactcactctgtagaccaggctggcctcgaactcagaaattcacctgcctcagtctcccaagtgctgggattaaaggcgtgcaccaccacgcccggccttgttctagtgtctttagagtagagagaaaagtgaattttggaataagacaggattgtaggatgccttgaacagcattttcgctggcttttgaggtgagacagttaaaagaatagtgagtgtaaagatggatcttaggacctctgggttacagtttgtaagtgatgtcatttgcataaaattccatgttgggtctgatgtctgaatggcaagagccaatcaagtatccctttaccttgtgtttcagataatgcaatagaagctgtggatgaattcgcttttctagaaggtgagttcactgcctgcacagactatttctctgttgatgatgtgagcttcaaaccttataaaaccttataaaacagatgtgtggttttcctttgtatacatggcagcaattctccctgttttgatagaaaaaaaaggaacattttccattcttggggaattagaaattctacagggaaattgcaagcttaaaagaagaaggagggagtatataaattaccagtagaattggatttagattttgaatcctgtttatatctccaaactaaatattaatattgctcctttataatgttaagaattagaaacaatttgtaactttttttaagattcctttttatttacgtgtatgtgtgttt

SEQ ID NO: 31437 - DNA, 1209 bp, Mus musculus
cttcaaattgagatgttctatgactaatcagcctttgggaaatgaagaatcactgggtctctccaaagactcaaatttgatctttagtccctaggggaagagtggctttcctgtagttactggggcaacccttgggaacatttcaggaatcctggcatatcagacatcctaggtacacagggacaactggcagattgtacactactggtaaagttgggcttggaacacgggcacgttcacttactggggcttctgtaagaacataccacaaacttggtggcttaaaccataggactgagttgactcagagttctagggtttagacatctgaggtggaggtgttgggagggctggctgtgtctgaggactgagggaatgggttccttttgcacgtggtcatcatcttgctcttgtagccttgttcatcttcccacgtctgtctccacagttgccccttttattgagacgttgattatttgctgaacatcttaatggcttcattttaacctaagctcccctcaaacagcccatttccaaggaagatcacatgctaaggaacaaagttaagtttgtagtagttacttttctgttgctgtgactaaacaccaggactaaagcaacttatggagaaaagaggttttatgcttatggttctagtgagttagattccatgatggtggagtggaggcagggccagcggggtagggggcaggaggtggaggtggaagcaggagcagagaggggcaggcagcaggcatggcgggtggagcagcagctgacaaagcagagagagaaaactagaagaagtggagtctttaaactctaaaagcccacagggagtggacacacttccaccagcaaggccacacctcctaactgctcaaatagcaacactggctaggggtcaagtattcaaatgtcctagactatggggacattcaagccaccacattccacttcttggtcccctagtctcttgatcacaacataatgcaaatgcatttaatccaacttcacaacttttttgaaaagcccaaggtccagatcttttctgagccttaactgtaaccctctgtaagattcaaaataaaacaaaaaagcaaattatacacttctgatataaacttcattctgaatatttttgggtgggggggggggatacaattcagtccacaactgcttgcttactgttggctgagaagctaggcg

SEQ ID NO: 31438 - DNA, 3017 bp, Mus musculus
ggtcctagcccctgcaagcctgtctgtttgttagtttgtaggtgccgtgctccacgtctcattcctcattccaagctttgcttgaggacaccagccactcacatcccctttttctatctttccagctttgccaaagtcatgcatgagacggtgagagatctggctccgaaatgtgacgtgtccttcctggaatccgaggacggcagtgggaagggagcggctctcatcactgctgtggcctgtcgcatccgggaggccgggcagagatagaaccttggagcagacgggacttccctgcttcctcacttccctgttttaaattatgaggagatggacctcttggcatttccttggcagagaggaccccgagagactgggacttttgtcccgatattcactgtagagtttgatacccaatccttggccttcctgagaatcagaagtaaggaattgttcacaagttgttcctgctggtcacttcctggcatgttccctcccctgttctacttcctgtacagtcctatgggatggggacagtcttgcgaatatggttgcctcatcttggagctgaatgcgacatttataggtggagaacatcttgaaatgttgatacttctgtcatcagatcaggcattgggagggagggaggaggaggaggaagaggaggaggaggaggagcagtatggaacgtcccctggcctacatggctgtccctcttcagctcaacctgtaggcatcaccctgctggttctaaacatttgctgtcctggaatagaggaacccaaaccaaagctagactcgacacccccttcaagtgtctgtggctttacctcacacggctgaacgggtcatctatgagcagcagaccttggggctaggggtggctttggtagcttttcaatttcttttttttttttttttttaatttatgtttgaaatttatttagtttgaagcaggtcctctccttcattgtgtaatggttaattatgtaagtaatgtatttatatgttcctttgttctgtatatagctggccagggtctcctctgactcggccttgtgagtagatagatcattgtagttcaggatatgaggtggagacactgactggctctagaaatacctcattcacccgcgggaagaagagagactcggaatctcttggtgagtgatgggcagagcgccaccagcctccgggcttcaccttcctctgctccgtgaggtgtatgcgaggcagggatggagacagggtggttcgctgagggaaagaagccacaacacctggctgctccgtccagaagctttcctgagtgaggtctcacccgggatgttaggcaaagaaaaccaaaggatttgtttcaagttctcactgcatagaagatgtgatttttaggtcagtcggcgtttcagaatggtttgacaagttacaggaagccagcgaaaatgtttttaaagtcacatcagatcgttggagcagaccacatgaagcatcgagagaactcgaccaaacctcaggggcgtctcggggtgtttgtacatttatttgccctcctagcagatcccacctccggtgtgtctcgtgttttacacgagatgcacgctgtctgtctgcttccttggactgagctgcatcgagctgccgactagcctttttatacgagttatttattccagactgtttgaagaacgggaagacaccaatgtcctgttctctgctctaccaacacggttcgctctgaattcaaaagttcacttctcccttcaaaatattaaattgaccaccaatgttaaacctggataggtttaataaagaggaaacagccttgtaacactaataaacaagatacgggggtcaaaagagaaagaccaagagaaagctcagcatcgtggcagccatgttttgaacatctttcagacttgtgctgagcagagcctagttacaaccgaacaagctggtgtacagtgaaatgaaggctgcccaggtcctcccgggatgcccagagggaaggtcgagtgattcctgcctgatactgcctgtctggtgtagctccctcaacctgcagttaccgaagcagaccactgaaagccgaagccacctatagatgtgtgcagcactagggggtagccacctatagatgtgtgcagcactagagggtagccacggagtacaaatggattctgactaaattttcgaatcttgaattttaaactttaaaatcaagcaccatctaggaaaggacttttttttaaaaaggggtgtgtgtgtatgtgtgtgtgtgtgtgtgtgtgtctaacttttaaggaagttggctttcaatccagagcatgagacagtgtgctgtgttcctagtactaggctggctactgccagcactaggttgacagctctctctgctaatgctgctttgtgtgatcttcagtgaacctttgactcatctcatatccctgggcactcggtctagtgagcgttttgtcatcatgtacagtagagaactagttgaattaaccatgtgatgttaactattattaataaattttaacttttttttttcaaaatattcagtgtgtgattggatcttttaagtggggcaagttaggacttcctggtcagtctgatcaatcactgatggggtcgatacatttggagtggcctgttatctttcagtgtccgtggagacggattctggaattctgaagcctgtgggggtcggatcctgtgattgctttctatggcggagataagcgccgtgaacgatcagatgctgagagcagaagctgagcctcaagcagtaaagacagagtggtgtgagtccttaaaccctctgcagctcccagtgacacattcctccaacaaaggcacaccccctaagcccctccaaacagcagcactaaccggggaccaaatactcatgagatgggagagagagaatgggactagtgttgagccttgaacccagggccacctgttcagtggacttcacccctggttctcccaacaccactttcagatggggtctc

SEQ ID NO: 31439 - DNA, 1101 bp, Mus musculus
tggccctcctttcgactcttacacaaccttattttctcgaatttgcaaaacttctctgtggaagatcttgaaacaggattggcagctgctgcaagggctaaacagcagttgcaaaaccattttgagcaatgaaccatttatctctgtggttctcgtggtgccgtgagtgttttagaaaaacttagttctgatctctatttggaaaaggagatggggagccttcccttaagtcacaggcttctcccctccgtgttgagatgtgagtctctgctctttcacttcctttaggatcctgtggttgtgtctgctgtgggtgctgagagattagctgggaagccattcactcagtgcctcttccctcagtgggatgaacccaagtccctgtgaggagccacgtgtccttgggagagtccaaagataaaatgagcaaccgcactggcttagccatagatgactgacagtgattggaagggagtcttccaaactatccactggggtgaccctgaagtcctgctgggcagtcattgttgtaaagagccactgacgaaggacagcgtcatgtagacgttggaattctgcagtgctgaagcctgaagccgggttgctacttatcagaaatagttgctgtgttggaactttgggtttttgctttttgagacagcttctcctgtgaccctagctgattttggactcactttctgagatgaccttgactttttttttttttccttctgagacagggtttctctgtgtagccctggctgtgctggaactcaatttgtagaccaggctggcctcaattcccagagatctgcctgcctttgcctccttagtgctgggattaaaggcatgcgtcccctgtctcccatttatctattcacgttatgagcatcagtgacttttttgcatgtctttaagtgcgctgtatgcatgttggggaggccagaagagggcccctgaaactagaattacacatagtcctgagtgctgggaatcaaattttgttctgccagagtggtcctcactctgaaccgtagaaccatttctctaatgtttgagatagggtctcaccgtgtagcctaggctagcctgaaacttgat

SEQ ID NO: 31440 - DNA, 1203 bp, Mus musculus
tgtctgtctgtctgtctgtctgtctgtctgtctgtttgtttgtatatcagcccaatgtaacctacattggacttacctgtcagaaggatgacttagaattgatcctgcctttgcctccaaagttctagaatttaggaatgtgccaggcctggcaggttttgttgggctgtcttgtttcttgaactgctggggttcagataatcttgtacgtggtaggaagtgctccagcacagggacattcaactgctggctcaagagaacacaaaaaagacagggtcttacggtgttgcccaggctgccttagaacttgcaatcctcctgcctcagccacctgagtgctagggttacaagcctgactagagttttttgcaaggctgggttatatttaataacatagaacctattcttgtcccctgccccctttcaggttgaccagtatctctaccacatgcgtctctcagatgagacccttctggagatttctaggcggttccggaaggagatggagaaggggctaggagctaccacacaccctacagcagctgtgaagatgctgcccacctttgtgaggtcaactccggatgggacaggtattgtgtgtgtgtgtgtgtgtgtgtgtgtgtgttaactgtcccaagaatctctgaactgaaagtccactgagacataaaactaatctcagtcaaggcctcttgcaaggtttaacccttagtcaacgaaagctgatgcaaacactgggagatgaatggaaggctatgggatgggaggggatggccgtctgactgcttggaagctaccacagctgcttctgactgcagccagagtcaaaactcttctttgtcagccagccttctctgtgtaccgctgacagccatttgttttctgctcttgtgctgagcagagctttttgcctcagttcgggtttcccagtcccacatagataacacacagtggtggttaaccatgtcgaccatggttgatgggcacgttctgtaggcatattggtcagtgccgttcatagtgttttgattgtttcatgggctccgttgaaaagtcctataagttaaactaaactgggaaggatgtgaagaaccattgtgtccattccagtaacagttctttaaaatattcgttttattcttatgtgtgtgagtgttttgcctgcgtgtatatctgtacaccacataggtgtctgcccaaaga

SEQ ID NO: 31441 - DNA, 1175 bp, Mus musculus
ggtggtaggacccacccttctaggctcagcttaagttctaacccttcaggatgacagaagtgaagttgatcaacaccatgtatctttcgaaattagctatcttttatgtgtatatcccacttcctaagctctagaaggcagaaggtgaactattaagatgggagagggcctgtgtggagctaatagtgtctgtgccctttcagcatccttattgaactacagctccgtgagccaagcttccctgatgttcagcatggtgtcctcattcataaagttatcctgggctcccccgcacacaggtgatggggagcgtgctctgggggggggggttgggtgggatgggatgggtggatgtatccttgaacttctctgtctattctctccttgccccgtccatcctccacagggctggtctgcggcctggtgatgtgatcttggccattggggagaaattggcacaaaatgctgaagatgtttatgaagctgttcgaacccaatcacagctggcagtgcggatccggcgcggatcagagacactgaccttatatgtgacccccgaggtcacagaatgaatgactggaccggcaagagtgtgaagctcttgccctgatctcctccttgctttcctagcctaggttctgagtgcatgtgggtagaggaggagtcagtgaacctgcggagggcaagtccctctaaccgctgcatcagtcctgggctccgaagaacacattttatataaaataaaattatacctagcaacatgttacagtcaaaagtgggggttggatcttctcccccaccaaatggctagaggtaacgcggtccttaggagaacggagagcgatgggagctgaccctcttgacctcccctattcaagagaatgagctgctgccatcctgtgtggggcagttctttgtggtgtgttctgtctgttgctggggctgttggctgattctccatgcttgttggccaaaggtaatgacagctgaccccgtaaaggaggcaccaacttctgtttgacagtttgttgcctgtagtgcacaggtggttgagtgtagggcgcctgctgacatcaggggttcttgtggtaagctcctgaggtaatggcagcctcagacccctgccattgggggccagtggtggtttacagagagggtggtagcattttagacga

SEQ ID NO: 31442 - DNA, 1793 bp, Mus musculus
ccgaaggctccagtttgcaccccgccccgctttcagcgcagccatcagctccgcctcgactctcctcgcccgccctactcagaggcggtcctctagaacccggcaagcggtctaggagaagcagggcacgacggtagctgttcagcgcatgccgggaaacgtagtcccgtcaggacgcgctcctctccagcatacgcacacgctcacacacaaacacacacacatacacacacattccccggggccgcgaggcatgctgggaacgctagcccttccggggcgcctccgggcctcaggttctggcgtctcggcggatgcccaaagactccgccttcccaggggcccccgcggccctgcgaagatggcggcgacagcggccccgctctcctgaagcggctgcgatggaacctcccccagctccggggccggagcggctctttgactcgcaccggtaagcgctgcggagggaagagaccggtcagcgcgtcctgtcagcttcggcgcctgatcgcgtcgcctctcgccacaggctcccgagtgacggcttcctgctgctcgcgctactgctctacgcgccggtcggcctctgcctcctggtcctgcgactcttcctcgggctccacgtcttcctggtcagctgcgctctgcccgacagcgtcctccgcaggtgcggaccgcggcgcccgggggagcatcggggctgggctgggctctggaccgcacggtcaccgccgcctgtgtccccaggttcgtggtacgaaccatgtgtgcggtcctggggctcgtggcccggcaggaggactccggactccgcgatcaccgcgtcagggtccttatttccaaccacgtaacaccttttgaccacaacatagtcaacctcctcaccacctgtagcaccgtgagtggggggcgaggccgagagcgccaccgggtggctccccaggcccaagctcaaggctcccctttacccattgggattctcttggggaacaccgagcctttcccccagccccttaatcgccacctcacgtgtcacccttttcctctttctttctgtcttttcctttctctttctctttttgacatttccttccattcttcttgctttttctccccgttctcagcctctactcaatagtccccccagctttgtgtgttggtctcggggcttcatggagatggataggcgggtggagttggtggagtcactcaagaaattctgtgcttccacgaggcttccgcccacacctttgctgctcttccccgaggaagaggccaccaatggccgagaagggctgctgcgtttcaggtgggtaagcgcaggcatctggctccagttgagtgggtgccctagttcctttcctgtctgcccacttttagccctgccctcgaaattcttaattcctcagttgtctgcttatggagttggacagtttactagtttaagtcagatataagtggttggctgggctaggctgaactcccatactactcgctctctctccctctctcttagttcgtggccattttctattcaggacgtggtacaacctcttaccctgcaagttcagagacccctggtctctgtggtgagtgcatgctggacagggactactctggggtctggaagggaagtttcccacctgtggccctggcttagacctcacttcatgccctcccctcagacggtgtcagatgcctcctgggtctcagaactgctgtggtccctttttgttcctttcacggtgtatcaagtaaggtactaactgtcctccgtttttggtggctgggaa

SEQ ID NO: 31443 - DNA, 1228 bp, Mus musculus
aggtggaaagttgggtgtgaccacacacacacacacacacacacagagagagagagagagagagagagagagagagagagagagagagacatgttgccctccaggagtaacagggcattgggaggacttcagacaagttacagaactgtggagacaacggaggttggcctagggggtccgcacagagtgtgggatgctactggtagctgggaaccggctgggaaccaaaacaaaatttcaagtattggaggatgcctggctgcccaatgtccttggcccaggatactagagggacctgggtttaggcacagttagggaatttagagcctctcgtgtggacgctaatcgggactttttaaggcagaggcaaattacctcaaccaggcaaggcatggcttatacagatcagatggacccgcaccctgtccacacctggatttccaagtcaacaacttgagctagaatagacccagatcctggcgcgcccaggagtcggggtggccagggctacctgccagagctgggaggggaaggcagggacgcggcctctcacctccggcgactcgctgaagaaactaagtcggaagcggccgcgtttgaactccatctccagggcggagcccctggccactgtgatccgactccgatggtttcgagagaacatgctggcagccccttgcccagtacgctcctgggatcagtctctcgcgggcttgggctccggtccctcgacggccgccctcctaccagtacagccgggaatctcccccagctgcccggttcccaaaccccgcccccggagacgacacctgggctgggcagggcgcggcaccctcctcttccacccccgctaaagtcccggcccgtactcgggtgccaagccagtttgggtcgacagtttcattgccagaggcaccctaaagcactccagcagtgcctgagagcttccatcctttcggctggattagctcaccagcacttggggcgggtccccaaatcccctcctctgcagcacccccctccctacctgtcaaactggtgtcctggagctcggaaaacaccggtagtcacactgcactttctggttctagcttgacttgggaccgcccaagtctcacttctacagttgaatgcttctctctcccattcagactcccctgcatggctacctgtccatccacaatggcctcgattcataagggggaggaacttgacattccacttactt

SEQ ID NO: 31444 - DNA, 1171 bp, Mus musculus
aggaggcagaggaatctcctcaggcccctgctgcctggagccccctccctgactttgggtctgagagatgctgcctttcagagactcaagtcactactccctgccccacccggtctgaccagcctgtggctgtggccaccgggcctgagctcttctcaccagggaccaaacgtagggccttcccaagcctcggcgtcccttttctccacacctgtctgtggcccaggctcagttttgtagacaaggtgtcaactaaagccacctttggggatcgtgaggctcaaacacttcctaagtcctgagtgtctgtccccagtgagagtctcaccccctacaatgcactctggtaggcagggggagctatgatccacaaaatggttgcttctggaagggtcagactccagactttctcctgtcccactgtcctgcagaaggccgctggctaccatctggacctgttctgggtaggcatcctcatggctctgtgctccttcaccgggctcccctggtacgtggctgccacggtcatctccatcgcccacatcgacagcctcaagatggagacggagaccagtgccccgggggaacagccccagttcctgggggtcaggtaggagggagcaaggcctgggtcacctgaacaggagtggacatcttttatggaatggaattttttccctcagggtagtggggtaagaaaggcttcccttacaaccactgaaatcaagccatcggaggaatattcagaaggaaaagagatgaagattcacttctatcatttctaaccgatagtttttgcttagtagtctccagtagtaacacgcacacacacacacacacacacacacacacatacacacacacatacacacacacaaacagcggttctcaatcttcctagtgctgcaaccctctaatacagttcctcatgttgtggtgacctccaactgtgaaattatttccttgatacttcataattgtaattttgctaccgttgtgattcataatgcaaatatttgatatgcgatccccaaaggggtagcaacccacaggttgagggaggcgcctcccccccccccccccccccccccccgctctagagtctcacccacagtaggacctcttcttgccctttgtttgaccctctggaggcctctccatggattcacat

SEQ ID NO: 31445 - DNA, 1767 bp, Mus musculus
gatggttatgagccaccatgctggtgccgggcgcccaacccacttcctctgcaagagcagccagtgctcctacctgttgaaccatttctctagctctttcctacccattttgaagctaatgatggcccttacatttcttattgctctttcttgagtatttttgttatgacatggtaaagtaccatgtgatctttgccacgagcatctgtaacagcttgcctatcttgtttctatgcaggagtcaagaagaaagctggttatatcactcccgtccctggtggtgtgggtcccatgaccgtggccatgctcatgaagaacaccattattgccgcaaagaaagtgctaagaccagaggagctggaagtgttcaagtccaaacagcgcggagtcgccaccaactagcagcactctgagccagcccgagaggctaagcaggccaagaggaatgcagtgtttttaatttattctgtcgaaatggtttaaaatgtttgtatttattgaaagcttaaacgggtggctgtgtgcgcgcatggctctacagaacctcaccaggatgcccatcagttgtcctgcctttgacctggtgatgcacaggagacgtcctcacaccgagagtggatgctgaacttcatcaaaaaaaaaaaaaggtctgccgttttaggctctcatttcccaagtgctattccaatacaagttgatgactcatcttaggtcccaagcctttgagttcaactttcaaaccaaaggaaaccttagtagaggaaatgaagggaaaggaagagaaagcagcacagggtttcaacggcactcccttactctctcgggagtgcagccaggagtgctccgattgccctgaggagagctcagctggctgggcctagctgtccccctgtggcgggtcgtcagggaagggttagagtctccccacttgctgttatcctcctgtgagcttgtcctatctattttaattttctagaatcgaaaaagctcattttataaatgatgtgtgtattatcacgtttggcttttgcagcacatttaaacttttaagtttcagactgttaagagagttgtgtgtctgttttctttggcgggtgctttgaggcctatttgtttttgaaaaacaaaacaaaacttgtgcgtgataatcacgagggcagctcgtgccaccaaagaactgtcagcagctgcctgcacgtctttcacgtaccccgttggctttcctgtaagctatccaggagcttgggttaatataagacttagtcggattttcttattaaagggttttcttgcagttgggttttttgtttgtttttaaataaagctcatctgtcgggtgtggaatgcgtttctgaaatgctcttgtctcagtcagacctaatccattactatttcctacccaatgttctaggctagctgttcctagattacacccactctatgaggagctgtggcgatcccagccaaaacccgtttttatcccaacaggcagttctaagccaagagtttattaatctttaagattcacgtgattctgggtgtcttctgtcccctccattcatataccactcactacaaagggcttcttgcttgcaaaaaatcttaacacgtgtacccacgtgtgcggtagatctatgctgtccctgctatgcagtagtttgattgagaggcagactaaaaggtgcaagctgaccttccatccctgtagattctcatgggtgtttgcacttaggctgaagccaaaggagagtgagccatgccaccgga

SEQ ID NO: 31446 - DNA, 1191 bp, Mus musculus
gtctcagtatggggacgttcctggtctcacgtacttcaggtaagggatagtcaacctatacttagaactggcagaaacccccaaaaccgcaaagtgtgggatcccacccagcggggctcacctagctgttgcataggacagctctgctccattctacaggccttggagaaggaaatggtaggtttaacaacggtgacagcaaggatccatgggacattttgcagtttccagaacgcctgtcgccccattgctgaggcagtcccagccataactggctgatagtttaacgattggatttgtgacccaggtcatctgccttcctctgatacacattctaagacagagcagatcttttaatgcaaatctatatatctgaatgattcgtgttatgaacaaattaaagttctgtgtaaagcgtggtggtaggcaacaagacattttcagatgtggctttgattgtacttattcaaagttgaatctgtgctgtgtcatttggagtgtgtgtgtgtgtgtatttattgttatttatctttgcaggcattccaaccttagggaagaatgtggtagtggctggcaggtcaaaaaacgttggaatgccgattgcaatgttgctgcacacagatggagctcacgaacggcccgggggtgaggaagttccctttcctgtgataactctcaaaagccatcctgtgacccctgtgaacactcagaaataacctgcactcaatgccaccaaggatcctggaactagtctctgatagatccgagttttgaataaagcttgcttgtaggcaattagaaattgtcagttatggcttatatggcttagacagtcccaacgagctttcttactcagagttggtgtcctactctgtgtcatttgggaggaaaagaaacagtggctcctgcagaggagttaactgaccagaccggcgagtcatgtcatggtctgttaattcatctaagggaaagctaagtcaagaattgcacggaattacagtaataatgagtttctgggaccaaaggaaagctgtatttccaggtaccttttggcattattgagaaaactcacctgagtaattctagtgatgttttcttagaaaaggtaaaactctttaaagtccatgacataggaaatagattaaatgtgattataagtgaccccaaggaggtccagctgagagcagcgcc

SEQ ID NO: 31447 - DNA, 3084 bp, Mus musculus
ttattttctaaacttgtttgggattgtcttcatgtctagatgaggagagtgcatggcttctgacggtgccttgcaggttctcatttgagactcctcactcagattaatttcatatgtagcttggggcagagatcaaaacaactttcaaagctctgagacacacttggaccttaaagccactgtgtgcattgctgtttccttgcaggtcttgcggggcagtaggaaaagtattcagactacttgattatttcctaaatgattccatgtttttattgcaacttgaaacttctgtttctgtatagaaatgcacagacttcatggcaataaggacgaaggtcaaaaaccacagaatagcttgtgaggggtgggggtgttgtgtgtgtgtgacagcaggtctccttgggcctgtgagagctggagacccagcaaagagagtgagttgatagtaacttggcttcattctgcgcacaggctgcagtgacctctagagcttctatcctacttgtctttgtatcaaaacttgaatttttcctcatcctgtcaggataaaagactcctctactcgggaagtgcctgcttttcatgtggtcctcagatctagtcagctctggctgcctcctcagatgtacatgacatcccagggattctggacacttgcccggcaggcagagctggagttatcagcattgtgtatcagagctgggacttacacagtgctcattggcctcctatatggctttataaaagttagagttgatgaggtttttgttatttattttgattccactagactatactggaaagtattgcttagaaactccagttttaataactcattttcagtatgttcttaagtatactcagaatttcaaaggaactgttttgattttactttgcctgaaaccacatatcactgttagaggaattcaaattggaatactgatttagaaaaaaaaggacagtttggaaacagctcacaacccaggagtatgcagaggtccagatatcagctgttgtgcaagtgtatgaccgtcatctgcagacaggcttctagatgacaccaaggatgcatcacccctcagccccagactccatttactttgatttgctttagtctctgaggaatgaaattctttctcaaccagggcccagtcatttttatgaattctgacaccctcaaatcaaaggtccctcttttctctgcatgtgattcagggatagaaatgccctctccatgactgagctccaaatggagaagtgctaagatacggaggaggcagctcactaatggaatataaagcaaagtcttgttggtggaaaagaatgtctccactttttgtggtgtccccctcctctattttccttctgtcttttaaaatgagaacagtgctagactcccaagccaacctgccttaatcagtgtgcacacattgcactgttgctcacctctgaggcaaaaacccgagaggaggctgtctttctgtctttggctagagggtcgatttgtaacatctgaagaaatcagtctgtcctgggtttatctgcctactctcctgctccccgcagctggagtcagctgtcctgtctgattctgctccctgaactgtattgcagtggcttccaattgcctggagaattctgctttagccctgtggtgcttgaacttccaggactttgaaaaatttggatattgggggctggagagatggcacattgtttaaagaattggctgttcttccgaaggaattaggttcaattcctagcacctgtatggtggctcataagtgtgtgtaactcaattccagtggatacaactccctcatacaaacatgcatgcaggacaaacaccaatgcacattaagttaaaaaaagagaagaagaagccttagacaatgacagactataaaatatagtcttgcttccttgtggtacattttttgtgttaacagctactagactgttattctgctgaccgagtaaagtgacttaccagcagccagttagccagctctccatgacttgtagcaaacaggcacagtcctggtgatgaggtttgtactcttggcttctctctgagccccaagatcatattagatatagcttctcagacatgatgtcattacctcaagcgcataaacaaatcaggacttaaagagtgtaggacctacaagtgtgtgtcctgtcatggtgccagggctcctctgctctctggcagccatccccaggcagtatggagccctggacagtgccagcctgggcatgagcagctgagtacctttagcagccatgttctttcctcctgaggtcagtgagagttctgacaaagaaggacacggtagtcttttgatcttcctgattttacattcagttttgatgcaaggctttgttgggctttggagtacatgtggcagcagtaattttactgaagcaactgcattgaaattcattgaaatggttttctcctcagaatgtatcaaataagtattctgtaaagccattccggatggccagcatgctatgggctggttatagaacagcattctgtgttggtctgcatcaaaaatagtttgcataagatagtcttggttaccatctaaaataacttaaaatattcctcacataaaaaatttatgttgtatttttaaaacttttagggctttatctatttttctaagtcgttaactgtactttttaaaaaagtattttgtatctacttttgtaacttcatcagaataaactatattgaaagcaaaaatgcctttgaagtgtgttaacatgcttttgtttaaatatggaaatgagatttttgattaaatttggagagttgtctttgcatatcatttattatctacgtccttaaagcttagggaaaagttcctaaatgaaagcaagtataataccagagactattccaaaaaaaacaaatccctcttagtgagacccaccccagagagtctcagtcctggcattcttaggggactccagaccttacagttcttgggaacagctggggactgggacactaattttcttacctggaagtcaagtactctgtacccttaaaccctccccagctagaacagt

SEQ ID NO: 31448 - DNA, 6983 bp, Mus musculus
caacggcagctggaagccaggaaggcggcggccgagaagaagaagctgcagaaggagaaactgagcacgccagagaagatcaagcaggaggccctggagttggctggagtcaccactgacccaggtaagcaagggctaccaccctaaggggccttaccctcacctcacagcacactggccacttaggaggaacatcctgatgtggctcactctgtccttcagaaagacgttctgtgaagtacctagatataaatcgcccagagcacttggctgctccagcatgctctgactgtctgaggcagaggccattgcggtagggcccagaggtgggaagtgcgctgtgggtgtctgagctcccattcctccctggcagcaggtcctgcgcccccacacccacacgtgggagaaatgagcttcagctgaaactaaggcattttctggggtcagagagaaaagtgatggtggagaggacacaggttctgcacaggttgtgtctctccaccttgggaatctcaaggggagcccagtgtataagtccagaccaggtttgagctcacctcaacatctcatccatccacttgtcaggcaaggaaggagcttccatctcccgccctctacacccagaccttgctagactgtggcacatgtctcatcttctgctttgccttctgccttccccaggcctgtctctgaagggtggattgtcccagcaaagcctgaagccctccctcaaggtggagcctcagaaccactttagctcctttaagtacagtggcaatgcggtggtggaaagctactcggtgctgggcagctgccggccctccgacccctacagcatgagcagtgtgtattcctaccattcgcgctatgcacagcctggcctggcctctgtcaacggcttccactccaagtacacacttccctcctttggctactatggctttccatcaagcaaccctgtcttcccctcccagttcctgggtcccagtgcctgggggcatgggggcagtggaggcagttttgagaagaagccagacctccatgctctacacaacagcctgaacccagcctacggtggtgctgagtttgccgagctgccaggtcaggctgttgccacagacaaccaccaccccatccctcaccaccagcagcctgcttacccaggccccaaggaatatctgctacccaaggtcccccagctccacccagcatccagggacccctctccctttgctcagagttccagttgctacaacagatccatcaagcaagagccaatagaccctctgacccaggctgagtccattcccagagactctgctaagatgagtagaacacccttgccggaagcatctcagaatgggggacccagtcatctgtggggacagtactcaggaggcccaagcatgtccccgaagaggactaacagtgtaggtggcaactggggcgtgttccctccgggggagagccctaccattgttcccgacaagctcaattcttttggggccagctgtctcactccttcacacttcccagaaagccagtggggactgttcactggtgaaggccagcagtcggccccccatgctggagcacggcttcgaggcaagccatggagcccctgcaagtttgggaacggcacctctgccttgactggtcccagcctaactgagaagccatgggggatgggaaccggggatttcaaccccgccctgaaaggtggacctgggttccaagacaagttgtggaatcctgtgaaggtggaggagggcaggattcccacaccgggggccaacccgctagacaaagcctggcaagcctttggcatgcccttgagctccaacgagaagctatttggggccctgaagtcagaggagaaactgtgggatcccttcagcctggaggaggggacagctgaggagccccccagcaagggggtggtgaaggaagagaagagtggacccacagtggaagaggacgaggaggaactgtggtcggacagtgaacacaacttcctggatgagaacataggcggggtggccgtggcccccgcccattgctccatcctcatcgagtgtgcccggcgagagctgcatgccaccactccactcaaaaaacccaaccgctgccaccccacccgcatctcgctggtcttctaccaacacaagaacctcaaccagcccaaccacgggctggcgctctgggaggccaagatgaagcagctggcggaacgggcgcggcagcggcaagaggaggccgcacgcctgggcctgggccagcaggaggccaagctctacgggaagaagcgaaaatgggggggtgctatggtggctgagccccagcacaaagaaaagaagggggctatccctacccggcaggcgctggccatgcccacagactccgcggtcaccgtgtcctcttacgcctacacaaaggtcactggcccctacagccgctggatctaggtgccaggagccagcgtacctcagcgtcgggcccggcccgagctgctctgtggtgcttttgccctcatgcccgggggcgggttgggggtgcagaagtctctctatatctacatatatggatatgcttatcatatatatgtatttatggtccaaacctcagaactgacccgccctccctcctcttcttccccagcactttgaagaaactacggctgtcgggtgatttttttttttttttgatcttaatatttatatctccacgttttatttttccccttgttttgagggggcttttattttccttttgtttttaaaactttatccttgtatatcacaataatggaaagaaagtttatagtgtcctttcacaaaggagcgtagttttaaaattccatttaaaatatgtatttattgggtttttttaaagcaacaatagtaatgggttacaggtgggcaggaaaggccggcagtgcttcctgcctggcaagcccagcctcctgggggctgcaggctctctcagccatctgccccacaaaccaaggttagcatgtagccctggtctatccctccttcccacaggctggggagccttttgggaccaccccgttctcctctgtggaatgggggaagctgcagacatctgggggcctggcctggaaatgctggtgttagatatccccagaaaccaggttggaagtagacagcttcaagcttgctagtctccacactgaatcctctctgtccgttatttaccaagtcatatgatgtcctggttcgctaggcagcacctcaagctggagcaggagtcgagaggctccgaggagctcttctcgtcccgttgataaagccggtgagtactgggccgaaaggaagcttagtggcagttttcttaaaaatcgccccaaagtttgtcgatactgaaaaagggctactgtatctatagaatcaagaagttgaacccaagctgtgaagagccagtgtgctgtacggtgctctgcgggtgctctgcggtgctgtgtggtgctggagcctggtgctgtagtagtgcgctgggacttttctgactctcggggcaggtggcatcctgccggagctcagccagccaatgtgatggcaggtcacgcatcgtccttattcctggatcttcacacgggacaatggtgcagcccttgcagggcatggcctacacttcatttaaagtgcaagggtcaggcgttttcaacaggttgctatgcttttcctccttcaagggggccagttctccattggatcttttctctcctccctctcccttctccacctcccctgaaacacgcccatcctaaaatcctggtgcattcattcagctctttgaaaatgagaacgttggtgctttaatttctgtgacattgagaggttgggcctgacaggtggcagcggcagtggcagtggcagtggcagtggcgtgtctgcagcaggtcagtcctcaagagtgtttttcagaagccgttagccgtgtagtcaggctgcccgtgcgtgcgaacgtgtgtggtgagtgggggggcttcatcaggacacacacagtggcagccgagccctgagacagcagttagcacgtggctctagccaggtttggtcttaataaactgagcgtagcaatcccatgacaatgctgaaggcaggtccgagtccccaagcttcgcggtgccttgtgccagagccgagagccgagcggccgggtgttgactagagcccttcggaagcgctggcagagagtggctaaaaaggtgtcctgagcatttttgtggtctggttttaactgtaaatagtgaaagatttttttaagcacttttgcctagatttaaacagcaacttgaaaagaataaaaagtacattttaacctgtaattgtgggagagactgtaaatagtagctgaatatttaatgtgctttgtcaatccacctttaccatagtctgtaaagttgcaattattttacaggacaaaaaaaatgaaattattattgcttttgaaataaatacccaagagcttatcaggacttagaattattcagaattcagatttataggaaggcctctgaccctctgtttgacaagctaaagagtcagaggctttaaggcgcatgctaattgctaattttctagttttgagggagagttgggtcctttaaatgctattttgctatctatcgcatcagtgcttttacacaggtctcatctgactccgtgcttaggtagatgcgggggtgccttgaaaaacttcattttaaataatcttaaatatgatattttacaaagcatttggagaatgtgaccgtgtatatggcccatggaagccccaggttggctgatggcttgcgaggtcctgagcgtggcccaggtgatactgttgctggcagtgtgtggatctctcggacgtgaattcagtatgctccaaacctcctcaccctttggtagcaaagccattattagatgaatggagaaaccagtacaagctaaaaagcatgtgatgtccatcccccaagcctgcacagcctttgttcatgagctctagaccaggaagcaggctgccgtgaggtgaggcaggcaagaggctttccacgttggcccttcaggtccgagcgagcgagcgagcgagcgctgtttcggggctctgcgccgcggctgtgcttgagcccgtgctgactttcacacactacatgtataacctacctcaaatctgtcactgaattgagcatgctttagacatgtatttaagacgtaactatgcacagttctatatcccccatcccttgctgctgaaggcttcttaaagagaaaaatcaaaatttttatttttactggcactatcattttttaagtcctgaagatgattgacaagacatttttatcatgagaagaaaaaaataaataaataaagccattgcaactcaagaacctgacggcacgagcaagttttaagagtagtgttatagccgggaagatgatggcttcggagtctgctcccagggtgcccgtctgtccgtccgtccgtccgtccgtccatccgtctccacagtccacaggcagtgcaagcgtttggtgccccgcccccagctttgtttccttccgccttgtttttgttgtccctgcctgctgtgtgcaagaggacttttgaagttctgacctgagagattttcttttagaatataagtcatttgcagcaggagctcacaaaataactggagaaaccacctgtcagtagcaacactgagggtctcacggggattgggggaggggtcagtttgaagtctggtttttagtggggaccgagcagcccagcccagccctccagggtgctgctttgcctctttgctgtggtggccctggcccatgggaagggactctgccttctctggccctcccacctgctgctttaaagaaacagtagtttgcagagctaggggttgttagtgctgagcgacagaagtcgaagggctttgttgctccatagctgatggcggtggatgtgtgagtggtctgacagtagctgaaaatccagtgtcacagagcgaggagacttgactgcctcagatgtcaaagcaaggccaagctggtgggaaactgatatatccctgatgtgcctcaaccgatctcttttgttactgaagtgtgttttctggacttggaagcatttttatgaattgaaatagtctaataaatggtgctatggtgtttcaatgtgactgtccctgatcttgtctccctgaggtgctatcaacgtttgaaaccacaaccaaccaaaaaaacgaggtgggccccgtctctcggcttttcttccctcttttggtgctgtctttgtggacctctgtttaccgcgttgtgtctgctctgagcagggttctgggtctggtgtcttgttgttccccttggtggccaaagctaggctcagagaaggcagcttgctctgcgcaaggacagcagaggcccgcctgtgggtttgtctatctccttagccaggttagagagggagtggtggctttgagaaggggaggcaggacccctgcctctccttgtgtgtcaggtattctcttgtgtcccagggtgctaaccccagaggggacaggctgtggtccagaggcagcgcctttacctggccccggcagggacgggatgcgcaagactttgggttcttgctgctcattggtagctagctcctggtgctcagactaaaggcaggtgctttttttgtccctcaatgccaccaaggccgcttttagttggtgctaaacttctccctgtgtccacataagctgacgcaaaatttaagatctcgacaggaagcttcatttttacatcatccactgtcacaatttttttttaaatacctcaaaacaggacattgtgacaacttagattccatgagggtatgatactcacaggctgtccgtgggatgacttccttggccttgacacatctagggtcattctctgtgcattaagcagtaaaatgccagagtgcttaagggaaggagcgtggtt

SEQ ID NO: 31449 - DNA, 1199 bp, Mus musculus
ggccttgggatggatggtgttggttattggaagcttaagaagcccttttgggtttgatctgagctctcacagggccggtggcgctgagaactccacatagaacctctttgtgtgcttgtgtgtatgcatacgtgtatgtgtgtgtgcatatggaggtcagaggtcagcccttccatcccatgtgcctagagcttggtaggtaagccaagctggatagtcagccagcccagggggtcgctctaccattccccagcttggagatgataagttggtaaagccagctagaaggtgtagactgaggctcccccaagtaccagaggagaacctgcaaggaaagcgggcttggaagtattcctggtcagtgtgaaggaggtgatgctgcacaaatagtatggtttatgtttttccttttcccctctctgttctctctccagacaggctcagagctcagcccagttgatggacctgttccaggtcagatggactcagggccagtgtaccatggagattcaaggcagctaagcacctcaggggcgccggtcaatggtgctagagagcccgccggacccggtcttctgggagctgcgggtccttggcgggtagaccagaagcccgactgggaggctgcctcaggccccactcacgctgctcgtctggaagatgcccacgacctggtggccttttcggccgtggccgaagctgtgtcatcttacggggcccttagtacccggctctatgaaaccttcaaccgtgagatgagtcgtgaggctgggagcaacggcaggggcccccggcctgagagctgctctgagggcagtgaagacctggacacgctgcagacagccctggcccttgcaaggcatggcatgaaaccacccaactgcacctgcgatggcccagagtgccccgacttcctcgagtggctggagggcaagatcaagtctatggccatggagggagggcaggggcggcctaggctcccaggcgctctgcctcccagtgaggctggcctcccagcccctagcaccagaccgccactccttagctctgaggtcccccaggtacctcccctggagggcctgcctctgtcccagagcgcgctgagcattgccaaggaaaaaaacatcagcctgcagacagccatcgccatcgaggccctcacacagctctcctccgccctccctcagccttctcattcc

SEQ ID NO: 31450 - DNA, 1229 bp, Mus musculus
acctgcagacccttccagcttccactttgaaagatgcaagcaggtctaatggtcatcagagcactgccttcatctctttgttttatttattcactgtttgggacagtctcactgtgaagctgggctatcttgcagcacgctgtgtagcccagcctgttgtccatctttccatagttctgctctcctcttgacctcccagttgcagagcttgtaggcatagccacaatgccttgccttttcatagtacttgaattagtttccaggacctggcaagatggctcagtgggtaaaggcatttgctgccaaacccaaggacgtgaatttgtccccagagattcaatggtgtaaggagagacaccacttctacaagttgtcctctgtcctctgtgtcatggcacacggagtaaataaatactattttaactgcttaaataactttttaccctaagcataagaactgtctctcagacttactgaacctaacctctaggtattagcctcccaggccatatattttaagctggggtatactcagcacaagcaggtttgagagttggtaattcaccaatgcagtaggaattaggagctaactagagaagtcactgacacgtaaggtgagatgtcggatttgggaaaggaaggactaagccactggcctggagctttgacggaagggaagacatttactctcctctgtgtgggaagcgcagaggcagagcaagatgaacaagcacaaagttggtggaggtgggacagaaaagcgtgactgtgcataactgtcctcctgtgctctgagaagtggggtgctgtatgatgaaggacacagattgctgtgtgggctcctggctgggacgtggggctcctgagctctcacgctctttcttggttccatttgcttccccgcagagggtagaactcactcgagaaggaacacttctgataaagaagatggagctttagagctcctccgaaggcattttctttctctctttgaacgagagggtcttagtacatagccttggctggcccagaactcagtagaccaggtaacctccaactcagatgcctgactctgccttcctctcccaggtgctggggtcagaggcacgaaccaccacgttcagactggtctctttttggagggaactgaaatgaatgttttgtttgttactgggtttggttttctgtcctagcaaagccccatcctcgacatagagaaacagttgtca

SEQ ID NO: 31451 - DNA, 1168 bp, Mus musculus
agtgagttcagtttccatgagtttataagctctctgtcaatatccagatatccacggtggtaagataggttgcaaggtgttatttatttatttatttatttatttatatttgttgaggttttctttggtcagttttggagacagttccatgagatgctcagaagaaggtaatttaggtctgcatggagccgcagttgcaggtctctgttccgcaggatggggttcatgaaagttgtcaagaataaggcctactttaaaagacaccaagtgagattttgaaggcggcgagagggtaaaactgactactatgctcggaaacgattggtgatccaggacaagaataagttcaacacacccaaatataggatggtagttcgtgtaactaacagatatatcatctgccagattgcatatgcccgtatagaaggggatatgatcatctgtgcagcatatgcacatgaacttccaaaatatggtctgaaagttggcctgacaaattatgctgcaacctattgcactggcctgctgctggtccccaggcttctgaataggtttggcatggacaagatctatggaggccaagtggaggtgaatggaggtgaatacaatgtggaaagcattgatggtcagcctggtgccttcacttgctatctggatgcaggtcttgcccgaactacaactggcaataaagttttgggggcccttaagggaactgtggatggagacttgtctatccctcatagtaccaaatgatcccctggttatgactctgaaagcaaggagttcaatgcagaggtacatgctcggaagcacaccatgggtcaggatgtggcagactacatgcgctacctaatggaggaagatgaagatgtgtataagaaacagttctctcagtacatcaggaacaacgtaactccagacatgatggaggagatgtataagaaagctcatgctgctatctgagagaatccagtctatgagaagaagcccaagagagaagtgaaaaagaagaggtggaatcgtcccaaaatgtctcttgtgcagaaaaaaagatcgggttgctcaaaagaaggcaagcttcctcagagctcaggaaagggctgctgaaagctaaaacagttttctatgaagattttttcataaagacaataaacatattgatcaagca

SEQ ID NO: 31452 - DNA, 1188 bp, Mus musculus
ctttcttgagcaggtagtcaatgcaggggaggatgtccgatttgttgtttttatggatgaccaagtgcaggggcgtctggcctttgttggtgggcagatccacgggatatttgtactcctctattaagaccttaaggcaggaaagctggcatttctgggctgcgaagtggatggctgtgaagccctgagaagtggagagcgcaggatgggggcggggtccacaacccccgccttcaggcttggggttttcctcggtccctgtgtcccttggaggtgttcacaaccctttatccccctacctctctgcttccaaatgggccttctatgagtggatttaggaccacaacatagaaaaggtcactttggcgctccccagcggcagttcatcaggtggcctttctacgggtagtactaggttgagtgttgggaaatttcagtctctgccaccatgctgcacgctttaccttgtcgtcgactatgatctccttgcgctccggattcacacagaaccgaagccagtccacattgcccactgaggctgcgaaaagctcggagtagttcgcgatcactttatggctccacaactcggaggtactaggatcggccagagcagggtgagccggaaggccgagaacaactccgggcttctacaccgcccaccagccggcgcacccgcccacctgtactgcgaggattcggagttggggctggaaaccttcaagtcatgttccgcttgccgcgtgcctccttgtacagatgggcggggctgctcttttgtccctgggcgccttctggaatccgagggcccagtcctgcgcggagtggtgtggctcctagggggtgtactggctttggaacgacgccgcgaggggcgtcgcatgccacccgcccacgcctttggccccagccaggactcaagggagggacgaagtttgcaaccctggtttagcctctattggaatcacagagatgtcacggaaagtgcaatcgggaaatggattgtctccatctctgctcatagaaagcagggcccaagtgtacaggcagcgcgtttgtatatgaagttgtattaactagctccctctgcaattccacatactaaattatgacgtcctccacggagcagcagcataatggagaacaggtacgtcacacaggttgcccaaagcagagcaactccactctgct

SEQ ID NO: 31453 - DNA, 2788 bp, Mus musculus
tgcctgtgtttccacagatgacgtggtctccaattacttcaccaaaggcaagcgaggcaagcgcttaggcatcctggttgtcttctccttcatcaaagaggccatcctacccagtcggcagaagatatactgaccctttggggagggcatgtggggggcaagaccaagagagccaggcccctgggactctgggctaatcgtgcctgggagcctggaaggtgtcttctgccagcccaggtctccctcccctctgttctgaagcctcgttccccaccctcctcaggaggcttgaatgctgccaggggcaccagagagggtagcagagcctgctatgctaggaggctatgtccccagccctcccttccccagagttgggtctggttggatggggcaggcagggaagctggtatgaagctggggaactgacagcaagttctcaggcaggtgaccgtagggaggagctgagggttggcacttccaggaaaagtgcattttgctgttgaaatgtgggtcctgtccaatgctgattccctttcgaataaagattctaggtggcactgtttgccttaataccccaggagttcatcttcttctctgcctgctaaccttctgcctagactaggctagcctgctctagggactcttctggctcttgcccttctggagggattctcatggccctaagtgggaagggaacagggatgagaatgagtgggcaaaggcagtttttctgaggcttctcctcctctccgtgtctccttccccagactgtgatagtccagggtgggggaggggtagaaagtctgtagctgggttagagatgtagaccatctacaataccctatttatgtcttcctttgagaaaaaggagagatttcttggtaaattctatatcaggctcggtgaaaaaaaaaaaaaaaaaaaaacattggcttctaggcagcctaggctgctgctcagagcacacaggccacactcacctgcgcttccggctcctggagggatgtgagctctgtcttctaagaaggtgagcctcatcccgggcacagaccagcatctgttgaccttgcactccaactacatacagtgccttgcaggggctcagcagtatatggaatgaaggtcccctccctgtcgctgaatctcgtacctcacagtgagtctggcaggtgcccagatggacaaggcatggggaagactgcagttcctcagcatcttcttatgcatccttcatctcattggctcttgcatttctgttgcatcttggcccgctagtctctgaatttgttttgcagctacaggtgagattgccagacctgttttctgccactcgagtggatgaaggtataggacagggacggctgcctaccagtgggctcaggctggccccacttgctctgctctccacttctttatctttgttcatcctgcctactgctcagacaggggctttcccaagcgaacccaggtcaactcatcacaggtcaccggctgggtcttggggtcgctggcacagctgatggcctgcttcctggctcacgtttctgagcactggtgtggctgttgtcccttcacagtttctgttatagaggcttctttcttaccctgtgcacacaggggcttctttactgtcttgtggatctcctcaggaagcccagctgtgctggtagcttaagggatgctgtggaggaagtcagagccaatcttcagtcccagctacttcctagctcaagcacagttctgctgccttctgggcacagagaccatttgagcttagtgtctgctctgtttacctgctctttgcagtgcctcgtccctggtctcatgatggctcaggagccaggcagaatattgctttctctttctgcctaagtctatctgatctattcttggtatctctgtatttgagccaccctactgtcatctctcacctccttttgttttgacagtttcctatgtttctctatcctctcaccagctgggtttctttttgaaatgcatggttggccaaatcttttcaggcccccaactctccccagctctccactggcctcaggataaagtccagactccttagaatggtgtatgaggttcctgggtccctactggcttcaccacttgacatgggctctgggccccagcctcctatacacagagaccatggctctagctgctttgatactcttccttccactttggtaatttgccacttttcttcttagattttatttcttccaaggagctttgtcccctctcctctcctaaccccagctgccacacagatgtctaggctcactggcctgcggtatggtctgtctccccactagactggaagctccttgagggcagggaaagcccttgggtttttgtattatcaactacctgattttggcgcctggcccatggaaagcactcaataaatgttttgtttaaagagtgagctgtagtgtgtgaccagggcacatcggggtccagggcagcttcctgggcaggtttcacatcaaagtcacaggtcttcctctcttggcagacgtgctgcccagcctcctggaactgcagcttcacataccccgagtggggccatgagcaagaagcatgggcagagaagcctgctcagatatcagctgtccccactgccaggcaggggctgcagcagacaggaaggacacatggcagaatgcctaggagtttcctgtcctggaagcctcgtccctggctgtgctagggcaggttaaggtacccgagaaccagggcattactttacattgctgtgtcccaggacattacc

SEQ ID NO: 31454 - DNA, 3001 bp, Mus musculus
cttccagaaggacttgtcttgtccccgtacctggggccagcaatgcacaaaaagggcggagctgaaggggggtggcaagggtgtgcagccagggcgggttgggttgggaaggtggtttaactggatattgtgactctgagtaactaatgtgcgaggtacaactctccaagcctgagcatggctcttctgttgtgcagacttgctcagagcagtttccaatttattttatttttgatgagctctttggagttaaggaactgcgattgtttttcccttgtaaggaatgttgtctgcattttagcaaaataagctgaccaaggaaaacagtatttaagaataattttccctgctgtgtacctaccagcagcagggttcctggagaacttaaggagtttgcagctgggtgataagggggaaaacatgagatacaaaccagatataacatgcagctcccatcccctgatatttccatgatgaactgggataccagtggcccataaagctcttgtctcctgtcctgaactcagctcaagagaacacagatttgaaagttcttggatgactgtaactttggatggatgtgagttgtatatcagaaaagcagggcttgatggtgattgtcattagtgactgctatcctatcattagtatgtagctattgtcactcatcagggttgctttgccttcatgatcttcatgggggctgcttctggcttctttcccccctcagctctaaaagacactattagtcaaagtctgagatgggccttcagttgtgttagttacaccttgaaccttttctggacagttttgttttcctaagtcccttcaatatctgattcttaggatgtcttaattcccttatattttctgtgtttccagacactaacaagctgcttagtttgggtttttctcatgccttacagagtgatttccagaaactaaggtgctgaggggtcctgcccgagagcacaacaatcaggcttgctatgtacttgaagctgttagtaggtgttactgttcccacagaccagctttagtgtcctcatggtcctgcctaggtgcactcttagttctagctctaactcactagggtttttgttggtgttctgtggaactgaactgcaccagaagctgccgctgtgagtcgaggtgaaggtggtagtgtctgagggtgagagaacaagtgtcctgtcctgatcgtactccgaggacaagggtcttgggaggactgatagtgctgtggcttctgtgtggctatcactgtggtgaatgacaggtctggaaagatcatgctgcttccagcagtccatcagatcagtgtatagatatgggcagagactggaaggagaggactgaggtctggaaagttgaaagtttccctttttcatatgaactggtttgctgagtttccattttttcttggtgccatggatagaacccagagtctcacttgtgccaggttagtcctacccttgagctgttctcaaccctcccttgatttgaacacagccccagcagttaaagacagatgtccctctttttcctgtttgagtcatcacaaggatggcatcttgtggaagtggcctccctctcaggtcacatcctagtgagtagctcagggaacttgtatggccagacacacacatcaattcaaagcctctccatcaagagagaatgaaactaggaactccttctggaatgactttattcctgtttaagcttttagcttggcttgtcacctctaataaggagaggaggagggtatgtgtaggacatttaaaaagattctttctcttgtagtctccatgaggtcaggctgtatcaggattgcaggaagatccttcagaatctctgtttgcgtagtgcaccttcctctgagcacctatggaaagcttatgcaagcctgaggcagctttgttccatccttcagttttgctctttggaagccaagctgctaggaatggtccaagaggcctgcctccctcccgctgtgctggctcattttatttggatgtcattctttatcctgctttcaggggtgtatgctgttgggtatacctggaatccaagagctagtgtgttgagtcaacctcagaggcagggtgctgactgtaggcttgggatgcagccagtgaactggcccttagtaatgtatggaatgacttattcctgtgacccaactcttttactatccagtgttgtgaggaagcacaattgtacccgagactacagacttagccccaattacaaaaaagttttgggttgttttttttccttggaattcttagattgctgtgtaaattcttatacagcaatagaaagcattctaaatagctgctagtctgcctggtctcagtattcatttattagagactgagttctgtgattatttgaccctattaactttggggggtggggaggaaggaattattcatgaattttggactacatcagaaatctgagatatccaaagccttggtactgtagctcagggtcaggggccagtttctatctgtagtgtacctgacttatggttatcatataaacaagccaggagatattctaaggagaagattgggtcctttttattgaacccaggacctcacatgtgttatgcaagcactacaccaagctgtactccaggcccgtgaaaggttgagactgggttagcactatttccaaagtcacaagacctatgattgcttcattaagattgtaaggttaaccatggcttaaaaataaatggttttggtgaactactaaatgttttccaggttattgttatgtcaagttttttttttttgttttgttttgtttttttttttgctatagagagatgaaggtgcaggcaaacagccctgagcttgcactagcaccctcaaggagccaggaaagaggggaagccagagtagacctcttgattgggactatggcaatgagcatgtgacggcctgaccttctaagtttgtcccctactgccagagggacaggcgtcttc

SEQ ID NO: 31455 - DNA, 1148 bp, Mus musculus
ttgctcctggtctttataatcagcataacagattggggctcatctaactaaagaattcctcatggattaatggacaatgttagcatgtgaatgtggatttagatgtacaagttgcttcttgtttccatgatatattttattgccttgtgtgtgtatgtatttgtgacattagaaatatatagccagtaattgtgaatttctaatttcaggcttttccctaccaagtaaattctacaatatctttgcttctgatatataatttgaaaatgcaatagtagcatgtagaatgcattttctcacaaactggagttcaggttttaaaggagtttgccttgatttcttataaccttctgattgaaataacttgattcaagaaaatccccctatttatatacttatttatatattttgtatgtatgtcagtgtggccacatgcgtccatagtgagtttgtggaggtcacaatattgtgagagtctggctgtctcctttcgtcatatgggtccaggttgggattgaactctggcaacatcggaaacaactttttttttttaagctagtcagaggagggtaaagaacaagctctggtagaagtcagtgttgtcatagtttgatttggagccagcccaagttcttggaccatccttgtttctcaggtcattatttttcctatagaaacagtgctgcttttgagcaggtatctgggtactgtcatcatgaagcctagaaattggggttacatagttatatttactgagctttgggttatcaagaaggatgcctgttgaaagtcagtgtgcatgtgtgaattgaattagagaaagcagggcagtgaccaccttcagcttacacaggtatcacaaagaagcatatttgttatcatttctttgtatgtgtttcaagcgaagctcaaaatcagatttgggggtgtaatctggattttaaaatgttggcaactattcaaataaaacattttatggtacaaataaatcatgcctaatttcctgcctgccagtgtgtctacttggtaaaaaaacgatacctcatttatatcaaagacatgggttgggcactgctgtggactcttgattgctggtttcttttagctttctgtttgtagcactaatgagggtagcagacattttgttt

SEQ ID NO: 31456 - DNA, 1140 bp, Mus musculus
taagttctgatgtgttaaataaaatacacataagaaaaaataagctctgggaccctgagattgttaagagaccctgaggctaaaattttgaggacaaaaggaacgacgaacaaaggaactactgcatataaagttggaagatgagaggttatagactgagaactgtgttcgtgtgtgcctgtgtgcatgcttacatgcagtatgtgagctgcttactaagcctgagaatggctctgtaatcttactcatgttactcttagtgttttgaaatggtcttttaagttgttttttaaaatttttctagattgtatggttttgtgaacattgtcttgtaaactagtctctcatcaaataaatatgtgcttaataaaataaatatgttcttgaataaataatgaatatactcttgggaataaaatcaacccccagcccccccccaaaaactccagaagatattagggctgtgttgtcataaaaatgctacatgccatttagttctttttaatttgtacatatgaatatatgtattttttttctaatcagataggaaaaaggcattagaagatggaggacaacgttctgtgcatgggacagaagttactaaacagaaacatactgaaacagttgataaagggctctcaccagcacaaaagccaaaacttgccagtggaacaaagccatcagcgaaatctctaagctctgtaaagagtgattcacatttaggagcatattctgctcacaagtctgagaatctggaagatgacactttaccagaaggtaaacaggagtctggtaaaagtgctttggcccagcggaaggtcagtaattcttttgtggattagttcaagtatacctacatctgttactatgacaaatagaaaataaattgggtctttggagtcacattttctgtaaattcaaatcggtttttgttaaattactgggatgggagacagatttttttcttatgaataacaaaagcctaataatttactattgtagattaggaatgccagatggttaatgtttgtgctcaaaaatgttgtagtcagggcagttcatgttcctgtagtgtagttaggcaggctaaggcaggagacttcttacaaacactatctcagaacaaaagcttatgctgtg

SEQ ID NO: 31457 - DNA, 1146 bp, Mus musculus
tggagaaagctaattttttttttgtaaatgtattttcttctaagaacaaagaaatgaagaagaaaccttcagatattaagaaatcatctgcatctgctttaaagtaggtgaattcatattttcatatgaaaaattaatatgtccatgttagatttaagttttaagactatatctttaaataccacaattatcaaattatacataaatttaaatattcataaacactttagttttagacatatatagaacttttaactagtttttagtgttttctaattttctttcttttaaatagaaaagagacagatgcttcaaaaaccatggaaactgtcagttcaagctcttctggtaagttgtaatcttggtgtgtagcagtcagtggacatcctcagatgtcagtccttgcttttcacttattttgaggcagaatctcttattgttcactgtgagtttcagagtagccagcccttgagcttctcagggttcttctgtgtatttctaccagtttgcctgaggcatgctgggattacagattagtgctgctatatttacctttgcatggatcttgggatctgaactctgatccttatgtttgtaaaggcaaacactttatccactaagtcaactccctagactgtaactttaaaactcactcaaatgaatgtattttgtcagtttactagaaacttcttgcaaaatggtgttaggaagatatttactgagtctttaacagtggtatctcaaacactgttcattttactgttgttggctttttgttgttgttgttgttgttgctgtttttttttttttttttttttttttttttttttttttgagacaggatctttctacatagccttggctactcaacaactcactttgtaaaccagtttgacctcaagccacagagatactcctgcctctgcttccctggtgctgagattaaaggtgtgagccactatacttggcttacaggagacttttaaacatgaacatttatatacctctccataattaaagaaaaagtgaaccacagagttctactcagagtgaaagatgggatctttgctaccagaatagcctgatgacttggtaatactttgctagtgtggaaatagaggccactcaactttcaattaatattaa

SEQ ID NO: 31458 - DNA, 1099 bp, Mus musculus
ttacaagtgtaaaataataatttgaaaatgtttaaatagaaaagtaactatttgatactttgcaaacaatgtcttataagatttcttctcgttaactagtttgttataaaatgagactattttgggttgttgaaatgactatgagcatctgaaactacaatggtaactcatgagccccgcttctaggttgtggtgtgtgtgacaccacattcttgaagtccacagaaagctcagtaaattacaataccatacaaggtcatacagacaggcttacagtttgctctgttggtaacaagaaatagattttccccaaaattcatttttgtgtattctgttttgtaatttttttaatctgcaaaaacttgtttttatcagaaacagtgagttgtctgtttttattggttttgtttccctttaaaaactcaaaatattgatatgtttagaaatagtttctaatcttaatttgatttaaaaaaattcttccaatgtaatttttttctgccatgtaatacagagagaaaaatatgtgtataaaaaatgtgggagggctggagagatggctcatcagttaagagcagtgactgctcttctaggggtcctgagttctattttcagaaactacttggtggctcacaaccatctgtaaagggatacaataccctcttctgatgtgtctgaagacagtgacagtgtattcatatatataaaataaataaattgttaaaaaaaatgtaggatatggccacagtatttaacattacttttggagtaagcttataccctccctcccaaaaaaaagtgctgttgttatttgctttaaatgttgagtcttttaaaagtaaatgtggttgccagattaccttaaagtataattcttttgtttctcattaatgtaaattctaatcacagattgcttaggggaaatttcgcatttatagcttagtaataacttacattatccttcattaatcctccccatacatatcctatttatgtgtcatttgattatgactttaaataagaatgctgggaaatacctggtgaagctctcaaattaatttttttctgttaaatcttatcctaaaatgtcttgggatgt

SEQ ID NO: 31459 - DNA, 1098 bp, Mus musculus
tttcctttcattccttaaaagcaaaaacaagcaaacaaaactgtctttttaactctggtcttaataatgtaatttatttgacatctcactggcattccaaactaaattgatcatcagcattgaaactctccttcattatagctaatgaacagatacttacttttgttaaaataatatctgtgaagaaaacactataattcttaaagacttccacagtctttaagtgctggagagatggctccacagttgagcacctgttcttttggagaacccaagttcaacttctcacacccacatggaggctcacaacttcgtgcagttacagctccaaaggcagtgccttcctctggcctccatggcttcctgcacatacatacatacatacatacatacatacatacatacatacacatacatacatatacatacatacatatgcataactttaaaatgactgtcatagaagcaaaatatgtaattgaaccatctttacaaacagacctgtgtttcaaatgtggaactgtgtagttgctccttgtatagatgatactaactttttatatactttaaatgtggtaattgagaaagccatgttacatttttcagatgatattttttaaaaatcttcatgtttgttcagacttgaatgtttctatatagttttctatatagttcaatttataaattgttaggatcaatatatagctcactaatgaggcaggaatttgagtttattctttattatagatatgaatcttgtaactgtgaatgtcacagttgtttcttctaatatttgtgcttggccacagactctattctagttccaggagttttgaactaatatcagctgttggtatctccagtgttagtgatatcaaaaatttaagatgggagcatttgaatatgctaaatagcttataaagaaattactatatattgttataatgatctatgatccctagttgttcatcttaaacctctcatgcttcacagggaacagtgtgtttatttataaacttacagctgttcttctgcgagaaccaatttatttgatgaaatgactagaccctggtcgtggcaaatagcacctttttgaaa

SEQ ID NO: 31460 - DNA, 2156 bp, Mus musculus
acagatgatctgcatattagttaactatgacttagccagtggtcatagttcacagtactgattcttaactctccaacaggaaccattatttacatttaatttggatgaatttgttactgtggatgaagtcatagaagaagtaaatccttctcaagccaagcagaatccattaaaaggaaaaagaaaggaagccctcaaaatttctccttcccctgaacttaacttaaaaaagaaaaaggggaaaacttctgtccctcacagtgttgagggagaattgtcctttgtaacattagatgaaataggggaggaagaagatgcaactgtgcaagctctagtcactgtggatgaagtcattgatgaagaagagctcaatatggaagaaatggtaaaaaattccaactcccttcttaccttagatgaactaattgaccaagatgattgcattccccacagtggacctaaagatgttactgtcctgtcgatggctgaagaacaagatctacaacaggaacgcttggtaactgtggatgaaattggagaagtagaagagtcagcagacataacttttgctactttgaatgctaaaagagataaaagggattctattgggttcatttcttcccagatgcctgaagacccttccactttagttactgtagatgaaatacaggatgacagcagtgattttcacttaatgactttggatgaagtaactgaagaggatgaaaactctctggctgattttaacaaccttaaagaagagctgaattttgttactgtggatgaagttggagatgaggaagatggagacaatgattcaaaagttgagttagcacgaggcaaaattgagcaccatacagataaaaaaggaaatagaaagaggagagctgtggacccaaagaagtcaaagcttgattctttctcccaagtaggtccaggaagtgaaactgttacacaaaaagatctgaaaaccatgcctgaaagacatttggcaggtagatacttgaaagtattcattttttctgtttcatgagattacatttaaaactatgaacacagtgccacagtaggaataatgtcattctgttgaaattctgtaaggtggcagttacaaccactccacagaactttgttttccacagaaacaaggtgttggttgcacacatttagtttacagaacacaggttgtcccaagttgttaaacctcaagaaaggatgtcaaaactgggagacaaagtgaaccagccagtgtagagcttcagtgaacacattgtgttatggatggaggaacaagcttttaaagaggagaatactgttcacattacagtgcctctcacttttagcttaaacttaggtttaggacaagcaggaggacaaattatttttttgtttgtttgtttgtttgtttgttttttaagataaggtctcactgtgtgaaccttttagacctggaatgtagaccaggcagctttgaactcacaaaaatcagcctatctctgcttctgctttctgggtactggaattaaatgtgtgaataaccatacctggaagattttggtcttttgagatgaggtctgactctgtagttcatgttggcctagaactcagaatatagacttgaactcaggatattcttccttcccatgtgccaggattacaggtgagagttaccacacttggcatagcataatattttgatggtatggcataatggagcagcttgcttgcttataggacatgagagagaccaaattaatttccatttagaaaactttgaactcagtcgccataatatgttacaaaataagtcaccctgatgagaaggaattcaaatagtagtttattttgtttccttagatgttataaatgaagctatttaatgtgttaataaatgtctactttgtaaaagttaaaaaaagcaagccaggtagtggtagtgtgggcctgtaagctcagcactcagggggctactcaggcagtcctctgagttcaaggcctgcttggtctatagagtcagtttctggacagccagggctgtttgttatacagagaaaccctgatttaagaaaaaagaaaggaaaggagaaggagaaagaaggagaaggaaggaaggaagggagagggggggggagggtgagagagagagaataccttga

SEQ ID NO: 31461 - DNA, 1214 bp, Mus musculus
ctagaacagaattactctttgcttgtgcctatttccattaatctcatgcattgcctccttataaattaacattgactctgtcaggtctacagaacttgactcttaaaaggaggactgtgagggagaacaagagacagggatgggagttgacgaaaggattgtgtttatttcatgcagaatctagatttaagtagatcatgagaacaggactgtatttgagagaaagaagggcagatacaattgaaatacagcgatgtgcagatcacaaagatattatgaaactcgctattttctactaaaaataataataattatgtcacccttctcctttctagagctataccaataaaattttacataggctttagccgtatatctcctacacccattgaatatatctatatttactcatttgcttcttggatcaaggaatcattaactaaggcatagtttaatgagttttaagaatagttttggaatatggagaatatccaatgttaatttgacaaatatatctattttaaataacttcatgtttttcctttaacttttaatgactttagttgatgacgctgaactaaaggattcagaacctgatgaaaaacgcaggaagactcaagactcttctgtaggcaaatcaatgacatctgatgtccctggaggtaaagtaaaaaaatgacatgtttttcttatacccatgaagtcagaagtgagcaggttaaccttgcttggtgttcctgaatacaacttctctaggactttttttttttattttaaatcctggcatggatgtttttatttcattcttgaaggctgggatatgcttcttgttttgttgttatactataattgctgttatggtgaaaactgagttatacttccccaagcaaaaactccagttattaataggaaactttgcttacagccaactactatgctgagttgaagggcttttacttgtttagcagcccaacattgtgctgcttctccattttgtaacttaacagggtgtttctgagatgtttgttttctactctctcactcttcgacgtatattcaaagccgttagcattctggcttctcttgagacgctcaatatatatattacatattgttaaagatacatgtcttaaactgctaggggatagagctaagtagtagagtgccctaggttcaagatcctcaaaataaatctgtgttttgtgacttcattg

SEQ ID NO: 31462 - DNA, 1221 bp, Mus musculus
ccaccagtctcctcaactcaggctccaacactggtgggtggccacgcccctccacctggtctgagcgtcagagacattgattatccctcttctctgttctggaccaacagactcttttcttcaacgtatttgactctcccttggagctgtttgatgagcccatcttcatcacggtaggtctcagatgttctccgtgggtggtggtgggtaacacaacagtaggatgtgatcgccagagacatgtctgtcattgtgcctgaaagcctgtgtctgtgtctgggagagagaggtgggttgaagcttgagtctgggtgattgaaggactcacaaaagctctgccagtggcaggggaaatgcccaggtgcctcaggccagaagcctgaagtgcctggttttaggtcgctttctctgtctatgctgtggcttcagattccgctctgctgctgaggatgggtgtgcactagatgtgtgggtcccacctctgctgtgtgcccacatgattctgcacatgctgtgtgatttccctgtgccgttgtccccttacttgtgaggtgggggccatgttagtgtctattcacagggttctgcgaagtgaaacattgcttagtaccatctctggaatggagacggtgccagctgttggctgttgtcggctgggagggacctggccagagccgcactctcacgggaagatgatctttcctttcaggtggtggactcacgctcccttaggacagatgccctccttggcgagttccgggtaattgtttgtctacttggaagtagttagttcgcacttccccttcaggggcaggctgtgctggaaaacctagtttcagaccacctccctaaaaactccgtaaaatctcccaactcaggaaacctctcaccaaaggtagaactataaagcacttactatctaccggagacagaattcttatcttacagttcaggctgacctcaaatttacgatggtcctgctgcctcagccccctgcatgctggaagtaccatgggctgggctcatgtctgcgctcacttttacgattgagtttgccaggaggggatgtgtgtcataggcaatctctgggactagacagacagaaggaagccaaagtgggtggggcacacatttcctatcacatgcctatagttagggcagaggctggagagcaagcaagcttcccaacccgcaacccccaaccccagcacagagtctctc

SEQ ID NO: 31463 - DNA, 1147 bp, Mus musculus
gtctgtttagttttgaaggtctctgtctgtcttttgtttcctggagagtcctttggttcacatgttatttctgacacttctgctttctgttctcacgggtctgcttctgcagttggttcatcctcgctggctctcgcttgtggtgtctgttcctcatgtgttcactattttttgattgtgaactcatgctctttggaactttatctgagaattctttgaggcctggatggaagtcacattcttccagagacgatgtgtgtttacttttaccagaagtctggagacactacaaacccagattcacttaaaactaaatgttcagccgtggcttttggggtcccatagtcagtctgcatttggctcctcgtctctccagatttttcctttcttgttcgctgtggaagattttccttatgccctcatcatctccagagtgaagcaaagttttaaagatgtctgttggtgtgatggccttgctgggaagatcttgctggttgtctagtttgtcctttagttggaaattgaaatctgtttcaattttgagtctgacagccctgttttccatcaggcaggttatatctccttcaggaccctgcactctgatttcctgtctgtggcatcttctccaatcttcctacgaacatgaacaaagccattggttttcttctggtttagcctcaggtctttggctgggggaaacatttttttttctccctcatattgtttccccctttgttttgacccccaaggccatcttcctgtcatttgcttagccttacagggggccattcttgcttggcaagcactggaagacagaacctaaggaaaattctgcctgtgaatgcacagacctttttttttttttccttttttaacaaaagccatttcagatcaaagaaagatggaaatggtttagagttgctagacttctactttgccagctgggaatctaacagactgggagaaatgaggaggaacccagaaccacaagcacctaccatgggcttttctgtgagccgaagaccactgtgttcactgcggcagccagcagtagctggcaaagtcagagccacaggtccttgctcatgcatccccatggaagagtttcctaagcgaagcaggattgaccttctacactaggccatct

SEQ ID NO: 31464 - DNA, 1193 bp, Mus musculus
ttttaaatgcttggcatatagtgcttaatgcaattaattatgtatatgtatttggtttttaacttaaatacattaaaatgttcggggggcaaaagtaagtagttaactgtttgagaccactctcttccagtgacagatgaacatattcatcttagcctatgcttcttaatctcattgcaaacacttccataaagcatatccttgtttgtctttctggagtcctcattgtccatgcttggagtgttcatggtcttggtagtctacttgcattcataaaccatttctataagctactgtccaagactttgcagggatctgagagtgagtttgttggtatgtgctttttaaaatcaagctatttacatacttgtcttcagattctagtcatttctttgtcattcctccctttactatcctagttattctatccacttgtttatctctcctcccctgataaaaaactattaccaaacattcactaaatgctgagttgctagactgaagttgggaagatatttttgccccttcattttctctcatcgatgtatcttaaatatactgttaactttgatatagccggtagtggtggcgcacgccggtaggatttgctgaaggaggcagaggcaggaggatcacaagttcgaggccagcctgggctacactctgaactttctatctttaagcaaagacagaaagccttggttcctaactcagaccgcaaagactgccatgtcagtgacaatatcctaaaactttaaaaggaggacatcagagctttgagacattgcgttaagaagatttcttcggttacagacacacaaagtacaaaaagacaaaagctggaatcatgcaaaatgtaaagtcttgctgtttggaaagcattctaaggcactcagaggacgagctatagcagacgtcctgctaggccacagaagggactctcctaatgaggcaaaggctgcatgaaaatggatacattgtttgagtaaacacttaaacaattgcattattggtgaagatgggtgtgtagagttgctcaaataatcagatatcaggaatatgcaaattaaagccacaacgagatattactatactcatgccagaacagttaagattaaaaggaagtgtagctaggggaagccgagaacatggactgtgtggggcccccaccctggtcatgggcatgtatcaga

SEQ ID NO: 31465 - DNA, 2436 bp, Mus musculus
ctggcagacatgactatgtagtatgccaaagccagcctcagtttaggatatctatctgccttgctggttgaattattggctcatgagagtgtggcatgtggcaagatgacagtttcactctggtcccatagcttgcagtttcattagtttaggtctggctgagccttgtggggagaagggtagttagctgaaaaggaagttgccccactaggtgagttgtttttctgaatcttaaaaagccaagttgggtcaggactccagtccccatgccattcatctctgtctcttcttttatgaccataactcttggttcagaacataaatcagcaattcttaaggtccctgagagtctcacactcaattccagcagcatctctaaatgcccagattccctgaagtctgaaagtagcctgggtgccctcaccatgggtagagcctcatgatgtgtgagattgcatattcctgtcttgatgacagccttacagctaccatctttcaagaaaacgtcccaagctctacacccttgggcacaaccaccataggactagatgtttctgagaatggatctatcaccatgatgtagacagggtcaactgtagctaatggattattgcctctggcccagctgtcatcaacaaaataacatcacagagacaaggcttgtcttgttcaagcccaaggctcccatcttctgagctgtcccttagcctcacctaagagtgctttctcgaagtcacatctctgttttctggagtgtgggctaactatagactcctgagatcctgtgaaggcgttcctgtgaagttggccagagggactttgcactgagacacttgtagaagctgttagcctgactgctgctgagagtttaattgcattgtggaacactgaccaagatgccacaaaagtgtttccagctccagtgaggagcagagagactggtcaagcaatcacttattacgtttgtcagctattgtgtcattctggaacagctgtacttccatatctcttagcccaccacagcctacgtcatcttgaacacgcctcacccttgccatagcaatctcaaacaccagcaagaaaagtacaccacacagaggtacagctttctacaactggagagaacaagctacccaggtgttctgcataagccttcaagtctcatcatcaggctacataatggcccagaggttcaggaagagtcacagaagaatacacaaaacttactagccagcagagagcccaggcctgtggaagagaagacaaggagatctctcgaagccctcagtctgtgaccagtgagaagtgactccacaaacctgactgactgagaaggaaggaaaggccctttcttcaccagggcttgtcagccttcagtgtagagagtgggctgtcacaacatttgtcctttggggacacttttaatcactccatcttgctgcctgtctagttgccacctctgtcccaaaggaactgacatggatggaatgaaaaccatgtgtaggaccagggccactctaccttcctcaccagagtcctgctgacggggactctcattcagtcacagagtgtgaggatggccgcttgcctttgcccagctctgcgtctgctgtgctgttctctgacaaagcagcttgctgcctctgagccgggaaagcggggtccacagtgtgagggggctatgaattgatgaggtgggactttgttttttcattttgtccttaggcctaaagctgagctggccttgaagacttgagcacagaatgtgtgctggtaggcctcagactctgaccttacctcagatgcctacagaccatattccttcagtttcaggtggggtgagacgctgctgcctggaagtctgtggccttctaaccagatccatagccctgtagacagtatggtttgtgagccttggttaagcaggggctcacttatttttttatcattcatgagggaaaaacataacaaaacaaaacaaaactctcagtaccaggtaacactggtatgggtggagaagagcaggacctgcatacaggagcccagaatcccagttaacaaaagcagtatctcccagtgactctatcatgcatcaggcctgacagtccgtccagctctatggcacccagctcagcaggtcccaagcccaagggtggcagtggccagttttctccttagacctctgagtgcaggcttgggtggcttcaccacgcctccttcagcctgcttttgctgtgcccctccctccacccctctgttccttctctcctattcacttgcatttgcgtcactcctccctgacatgttggaaattgccttttcgttttgcgcagttccacatttgtgggagaaaagcagtgagatccatctgaacctccaaaaggaaccttctcctctcatgctctgctgcaggctgctgcagaagggggctcctct

SEQ ID NO: 31466 - DNA, 1132 bp, Mus musculus
ggctgaagggagagagacatgactccttagaagctcaggcctcctctcccccagcttctcttgtcttccctgtcatccgtctgccaatctccctgtccatggttagttaaaggcgctttttatcctcttttctttcccacagagtttgccagatccggcccggtgcctgggttccaggaggacacgctgcagttggccttcatcgacttgagacaagtaagtctttgtgtttttgttttttgtttttcttttaagatgtgtgactgaagaccatcaggtcttaaggaaaaggggaggggagggggtttggcattggtgattcacactggagacctaagggcttttccctgtgtttgaggccacctcttttatttagctatctgagatccttagcaatggtggagtaaagatttcgtgggtagaagggtaggcagggggtgggaggagggatccatagagtagagggactcaagtgaccctcaagtgatgcgatccattgtgtggccattgacttctgcagacacagcaaaaagatgactcgtcaaacccatgctaagcaggtgcactgatgcagagactgcctgcctagagaactttgtctgtggataatgcggccaatagtgttgaaggaaaatgaaatgctttgctttctggattgttagtgtggtttgttgacttttccttgctgcctcctaccttctgttgcctcctttgtagaatgcagtcagtcatcagcaatggagtggagtggggtgcttacagatggtctgcaaaggttctgaccagtcatgctagcctgatgggaaatcctgttacagtgtcatgatgaaggctgatatttaggtctacctgagctttggcaagcccgtaaaatggaaaggccacccatagggctgtttttgcaaactagaaagggagggttggtaggtaggccctggtgtttggggtataggaagaaaaggtaggtgggggccaagcgggagagccgtaactatgctctgtcatctcttcactctgaagatggatggggttggatagaaagtgtgaatgaagtaagcatcaatgactgatgtttctctcctattaaaacaatctttttttgtctgtttgagaagggggctggctttgtttc

SEQ ID NO: 31467 - DNA, 1202 bp, Mus musculus
cactcccactttctggccctggtattcccctgtactggagcatataaagtttgcaatatcaaggggcctctcttcccaatgatggccgactaggccatcttctgatacatatgcagctagagctctgggggtactggttagttgatattgttgttcctcctatcgggttgcaaaccccttcagctccttgggtactttctctagctcctccattggggggccctgtgttccatctaataggtgactgtgagcatccacttctgtatttgccaggcactgcatagcctcacaagagacagctatatcagtgtcctttcaggaaagtcttgcaggcatatgctatagtgtctgggtttggtggctgattatgggatggacccccgggtggggcagtctctggatggtccatccttttatctcagctccaaactttgtctctgtaactccttccatggatattttgttcactattctaaggaggaatgaagtatccacacattggtcttccttcttcttgattttcttgtgtttttgcaaattgtatgttgggtattctacatttctgggctaatatctacttatcattaagtacatatcaaatgagttcttttgtgattgggtgacttcactcagaataatatcctccagatacatccttttgccaaagaatttcataaattcattgtttttaatagctgagtagtactccattgtgtaaatgtaccacattttctgtatccattcctctcttgagtagcctaaaggtttaagagaagaagaatattagtaagtcaccgagaggccattcttgtgatattttggcaaagagtattgctgcattttaccctatcccaaaatgatgatgatgccaccaccaaaggctaaattgaagtattttggattaaagtgtttggtggaatcaccatgcctgacctaaaagctttactacagagcaattgtgataaaaactgcatggtactggtatagagacagacaagtagaccaatggaatagaattgaatacccagaaatgaacccacacacctatggtcacttgatcttcgacaagggagctaaaaccatccagtggaagaaaaacagcattttcaacaaatggtgctggcacaactggttgttatcgtgtagaagaatgcgaatcgatccatacctatctccttgtactaaggtcaaatctaagtgga

SEQ ID NO: 31468 - DNA, 1194 bp, Mus musculus
acacaaatgatcatggttgaacgtactcagaacatttgtatagaaaggttactgaagtccacttggactgggttttgactgaatagccaatgtgtggtttgtagatgtgtggttgatctgtgagagaactgtgcaggtgcatctcaacgcgcttctacctacaccacagttaaaaaagcatacttaaaggtacaatgaatgagttaattctttactagtatttatgtgtgctgttgtttcaaattcattcctcttttttttccccagaaaatattccagcctatgtagagtgtaaactcaagaaaatgttttctgcataacagtttgacaaaagatggggaagagaagatagagtttaattgttattggctgtgggtgggatgtaacttggggcagccattatgggaagtagaatggagggtcctcatgtgattccagtactctccacttctagatattttattaaaactatgattctgtgtcctgtgatctgcaattctacctctgggtatatatttcgaggaaatgagtgatttatgtcagaaagacagctgtataatcatgttaactgtggcattagtcaagagagccaagatatggactcaacctaagtgaacagtaagggatgaatcactaaagaaaatatgatacactaagtcatgtcccctcccaacacacacacacacacacacacacacacacacacacacacacacacacctctattatattgtggaatatttttttacatcagttgtccttccttccttctttccttccttccttcctccctccctccctccctccctccctccctccctccctcccttccttccttccttccttccttttttccttccttcctttctttctctttctttctttctttctttctttctttctttctttctttctttctttctttctttctttctttctttctctctctctttcttgaagaaaagtcccttttatttcaacatttattctcatagctctttgcagataggacttgttcatgtggaaaacttacaaaaactctacagtaagtctagtgagatcacatttgttgagcagttttaatgcctcttacaaaacattatatagagctaaacaaagtattcaaagtgattatgttgttttattagatattttcttcatttatgctatcctcaatgccccctataccctccc

SEQ ID NO: 31469 - DNA, 1161 bp, Mus musculus
gtctataaacagtagaagggcatggtttgttttaggaaggcttgattgtaagctgtgtatagcctgattaaatttgagcaccctagccagtatatcactgtagaatttcaggggagaggcaatatagtccactgtacttattgccaagctacttaaacccaataaagtatatattttgtaatgtcccttttgtaatcctgaaataaagtccaccagtcattcataacagttaaaaaataatctaactccctaactgtagtatagagagaaataaaagaaagtaattataacacaatatttttctgtgtgttttagctaaaatagaggtgtgtttgggcttgctgcactgtgacctaaccataacaccattactaagaagcatcaatattaaatttccgagtcagcatgcaactctttgtaaagttctgaaccaactacaaagtaaaattttcttttagctcctatggttactacttttctgaaagttcactttacagtttcctgttagtcacagctttgctgatctataatcagctggcattggcgtggcttgatggtcttcctgacatgtcctcaggtcagcagtactcgaactctgtgtcattgccctccgttgtctcccatcatcccaaggaaaagaaatgtgggcgtggtaggatacagtgttttaagagtgaggggaaagaagaacatctacctcatttttactatagtacattgttatgagtttacttattgttataacttattgttataagttactaccttttaaactaattgttgtggctaatttttcagttggtctttattatcttcacttcccctctatacacctccctatctctatatatgaaaagtgtgtatagtcattattgcagaaagacataggtcaacagtggactgcattttgatagtggtcataatattactgcttagtgacatggcagcagtctgtgtaagtctgtgctaggatgtttatacaatgacaggattaccataaggtgtttgttagtgtgcattgccatagatatattgcgtgactttgtaaagtactgtacagtctggtttcagacatctccaatggtcctgggatgtattttccattttgaagctgtgcaaaagttatttgtatattaataatagtattgaagatagatggat

SEQ ID NO: 31470 - DNA, 1174 bp, Mus musculus
tcctccagatgtctgtacatgacaggctgtggacctttaggaccaggagtcttaggggtcattagaccaatggagccatactcttaaaagattcttgagaccctatccctttcctttatctcccctgcttcttgggtattgagatggtgtactttctctgctccatgctcccaccattgccatctgggtccaaaacaccaggtctacctgatcttggatctgaactgccacacttttcttggttaggattttattgctgtgatgaaacaccatgactatggcaactcttatgtaggaaatcatttaatcgaggctagcttacagttcagaattttagtctgttataatggtgagaagcataatggcatacaggcagacatgggagttctacatctggattggcaggctacaggaagagcatgtgagccagtggacctggtttgagcttttgaaacctcaaagtccaccccagtgacaactctcttccaacaaggccacactcgctccaacaaacttacatctcctaatagtaccactccctgtgagcctatgggggctattttcattcaaactgtcataacatctgtgagctagaagtacctttttattctcttcaataagtgatatctcaggcatttcatcttggtgatatacagaaggactaaccgggagaaaccgagagggggcagctcagacttcccagtgaaactcacatgaaggaattatagccacataaagacaaatggatggctggagaaactgtgcatgattaagggaactagagtttggtacccagcgctatcacctgtaccacctatatcactagctccagggtatccagatatgccttctcctggcctccacaggcatctatacttatacatctaacatacattcgtatctaaaataaagtcttaaaaaataaatggaaaaggcacctttaaagtcacaggctttgtcctttctgccaaagcaaaaatctcctctgtattatttctaatgaatgcaagttgtgttaaaaaaagcctatttgttcccttgtaaacactttgttatctaccacacatcagaaattgtgctattaggaccagtgatatagctcaatagacaaagaccacttccatacaaatctgatgacttgaatttaatccctggatccacataaagctgtgag

SEQ ID NO: 31471 - DNA, 1167 bp, Mus musculus
tgtattcttctggaccctaaagccagaaacacttatgttgccaattactgctgtatatttgggatggaatatggccacctccttgaatttcattttcataacctttgatctcttgatgctttcctttgttgaataagctttcctttgtttttggagtagattccctagggattttcttttcacaagttgaatgattagctaggtggggtcttgcttgagagtaccatattcttcattccatttctccttatttcttttagcataaatctaggttcagacattacattccctggtgttctcttttttccctcctcaaattgtgcattttgtatttcttcttgccttgcttgtactttttcattctagatctccatgaagagtgatcactaataactacatgacacagtcaatactaggttctcttgaaatctctgcctatgtatggtattataggtccaaaacttttcaatttagcctcaggcagattcttaggaccagggcccaaagcagtctcattctttgccaaaacatcaaaagaatcatctctagcccagttgcctaatattatttccctctgaaacctcttgagctggatctccatagttcatattgctctcagtgttagtgtcttccaagctcttacagtattcttacagccccacttaaacattcatccacttcgctaatgcagagttcccgagtcagctttactctaacaagcagcatgaccaggtctgtcacagcaatacctcactcccagtaccaactttacaactttgctattgtaaagagacgccatgatgaagacaacttgtttacagttcagagtatgagtccatgaccattatgacatgggacatgcatcaggcaggcaggcatgtctgtggagaatagctaagagttaacatttgcaagtttgtaggggcgaggagggagggaggtagggaggaagggagagagagagtgagagagacagagacagagagagagacagagacagagagacagggagatacagaaagatgcacacacacatttgagagcgcatgcacacacacacacacacacacacacacaggaggggggctgtcctgggtttctgaaatcttagttcactatgggttttgcttttttaagcccttgaaatatgtgactcagggccatttt

SEQ ID NO: 31472 - DNA, 1288 bp, Mus musculus
ttgattttacacaatgcttaatagacttagctttgaacccaaagctcagtcataacgtggtatggcagtcctcacctgcagtccaagcactggaggactaaagtaggagggtccccaagttcaagaatacagagagaaaacataactgaaaaaaagaaagacgtttaacaggcaacgtggtagagccttggccagtcctgactcggctctaccattcacacacagcagggacctacaacctctgctcctgtcttgtgccttccacccaccaggtcccctggacaatgacatgcagcagttggctcgggaaacctccaaggacccagagttaaggagcaaactgcagaagttgaagtcggatggggcgctggtggactgtgggacttcagcccagaaactgctgggcttgctgcaaaaggacaccttccagtctggagcccatgtggacttctatgactgttaagctcatgtcctgtcacagtggcccccttctccccccccccccaagccctgcctaacacacatataagcccttcaacccagccagcagcgagcggtgggcactgccagtcctcggaaggcttctgcagaggcttgggagcgagctgatgtgcactggagttctctgtcccctggaagagtgctttagaggtgggaagagcaggagaagcagaaacactggacggatgaggttgaggctcttgtttgtggtcagtctgtggggtgaggagggtgggctctgatgcacagagaggacggagggcatcacgtctggatggatgctccttgaacttcatttgtttgttgtactgcctgcatcctgtggtgttcactggtcttcccttgactctggtccaaatacatagttatgaggcagatgcaatagagtgtgcgttgtccttcatgaatacctgctaacctcttctaacaggcccaggaatgaccctggttcttcagacaagaactttactgctcttatttttcagagcgaaggcagagagctgtctgccttctttcatccaggtccacatagtggtaggcacaggtccaaagtcatcaagatggatgtcccggaagacctgtgcccttctcacgcttctgtccacactgacccacctgggctgacatttccctgagggtcctagaacccagtcagtgacaatcgatcctcagtgcccagcacacagcagacagtgctgaccagtgagggctgctttgatagccacttcacaccctgcccacatggcggtactatgaaaaggtcccagctcccatgacaagccctctt

SEQ ID NO: 31473 - DNA, 1099 bp, Mus musculus
aaagcccaggagagtggggcacggctgggggatccagtttcctgtttatgtctctgcaccttagctccctggttcaaatatgtaaactatccactgggcctggctgcaggtgtgtgtgtatgtgtgtgtgtgctcccaggctggaaggcagaggtgcccccagtgcattcctgactcctggcccccaccccaacacagtgtgtctggctacaaaggcaaataactcaaggttaacccttcgcaggccatgaagggaagctgtagggaactgggggtcgtggagctgctaactgggccttgaggtatttaagaggagacactagatatgttgctctgcataagggggtgtctcctgagaggggcttcatggcttgagcttggtcttcaggatggagatgagattgggtaaatcagttccagaggggtggtagtgcttatttcagagcaggctggacatgttcatgctatcagcagttctggagcaagtggtaccgtccagcaggctctgaccaataccttcagcatcctctgtggtcactgccgctccagctctcttcttccagattcctttgatggaccgtgccttcctgccctcatcttggacagatgaggtgacctgcaataggtttacttggtacggataagaggaagaaatggtggccccgttgacacaggcatcactcaggtccttgtcctggcctctcccagttgagcccaatagtgagggccctcagtgatctcctcacacaggagacctgaggatcacagatcattggccccacgaggggttctcacaggtggctaaccgccatgcctcagcatgaagaggttgcactcaaggtcagcactgagttgagtctgggaagtttgggttctccacaagctagctgccaggagcagctaaagctctcgtcgggaccaccatgagacatcacttggtacccagagctttgagatgtctggtaccctatgtcaatgttcagctgctcctgctggctgccttcgtgggctcattcccttccccgcccctcgaatgtgcctgttcccctccatctgctcttccgggcaagctcccccactctggaggcgctggctgtgc

SEQ ID NO: 31474 - DNA, 1197 bp, Mus musculus
aaaattaaacactcattatacaaaattaattgacattaattagcaaaaattaaaactttaaacacagcaaggcgctttggggggaggagtggagcaggcaggctctgcatttgtcaccccccccaccacatttcccaccacccacctaccacccccaagtctccccatttccatcatgaagcagggctggaggacttcaggccagatctatatcagtacagcggcatgggcctggcctgcacgtccctgtgaaggggatcagggcaactgtaccagccaccttcatctagtgcttctctaaggatccaggaacctcctatcggccttaggtccctaagatctcagctgagactagggaggggtgtggccaagtggagcaggtgaagctcaggaagactctgcgtgctccccccagatcccgtcttgggtacctgaggttcaggcgctgaaacctttccactctgttccactttgctgtgtgacttcagttaagtcacgcttgctctctgagcttgtgtcctgtgcatatgatgggtgcagggcgggtaggcaccgaggtctgctctgtctgtcacctgctgttgtggatgcctgtctcttggttggctttcgagagacatgcaggactgaatttggggagtggcatttaaaagcattttatgtagctaagggacagagttgctggtggtagaacatcaggccccagggggatgcatcttagggccagagagctctctctctctctgtctgtctacacatctgcttcccctgcctggagactggccccagaagaggcgagcagcgccctctataggtggcaactcccaaagccttcgccatatttccacctgctactttttttggtctatgcttccagggtctcaaagggccttaggatcttttgccccggctgaaagcaaaatagaggactctacctttctggattcacagagctcttgggggttggggaaccatgtctggaggtggagccaggtgggaagccatccgtgcctcactacccctctctgtattcctctctccagccagtgccaatatctgcaacgtggtcctgatgcgatatggggagttagaggaaggaattgatgtcctggatgctgatggcaacctcgtgggctcctcaaagattgcagccagacacgtgggtttcccaggggctaagccctgcacaaatggatc

SEQ ID NO: 31475 - DNA, 1134 bp, Mus musculus
tatgaggaaagacacccacgcagcctcatccttgccctgtcctggagtgatggaaaggaggagagacaaggaaacctgagagaggcagataaacttcagtatatctgcacacaacagaccttggttcagtccccggcacttagagagagaaggagggaaccggaatgtcaatttacaatgtctaccatgtgggactcaggaaatgccactctagagcaagtcctgccatgcaacagtcaacacctgaaattggatctccaacacctgtgtaaaaaagccagatgtgacagtgtacacctgcgaccccagtgatgtgagggacagagactagtaacggccaaccaccataccacagcttcagcgagaggccctttctcaaaaaataaatgtggtgagcagttgaggaaagacaccatctgtcttccacacactactactgcacacatatatgtacctgcacacacacacacacacacacacacacactaacaagtgcatacaatggacacataatcacacagaatacatctaatatcttaagtttaggagttgcagaaccttaaaaaaaaaaaaacagtatagctgaatatgatggctcactcttccaatcccagaggcaggaggattaccttgagttcaaggctagccagctccatagtaagaccctgtctcaatagcaaaaaaaaacaaaaaaacaaaaaaacaacaataacatataaaaatgtttgccaggactgctaagaagtttcagatttaaggaagtcaccatgatgatgtttaaaagactttggataggctgggcatacacatgcctgtaatcccagtatgcaagaagctgaggcacaacgaccaccatgcagctaggctgggctaaagattgagatgttgtctaaaaaagaaaaagtaaaagaaaaaggagggaggagcctataatccaagctctaagcacttttgaaatggagagaatttgaaatcaacaatatcaagagtttaaggtcaggctggagagatggctcagcagttaagagcactgactgctcttccagaggtcctaagttcaattcccagcaaccacatggtggctcacaaccatctgtaatgagatctgatgcccaattctggtgtgtctgaaga

SEQ ID NO: 31476 - DNA, 5725 bp, Mus musculus
cctcccgaggagtcagcttcacccctcggtccccctgagctctcccccactgggggctcccctacatcatatggggaagaccatgctgcagccaccccagcctccccgcttgtgcttctgcccctggagacacgaccagctgaggagccccagcccagcggcaggtgagcgtccacccagaacccttcccagtaggaaagtgggcggggaaatgacccgggagtagaagtatttcactgtccagcttcatgtttgctgagggcacgtggtaagggtctcctctatttggaggcaggtggtcaaggctttgaagccatgcacttctgtaggaccagcgctgactttgattatacataggacatctgtgtggccctataagctgggggtttgggaaacagcacctgataagggtaggggttgaggagtgaggttggagagagtcagtgtgccctggcaggagatgggaatgagagctgtatcagttgtacaaagatgctgtggttggggggatgggagttccacaaagtgatgatacttcttcaggtaacaggttgtagtgggacccacagcatttttctgtccaggtaggatgagttagcagagagctggtagaaggtctgggacttagagaggaagctgaaggcaggctcagaggagaggagaggagaggaagtggtcttcaagtgctttccatacccaaagctcctagaaaaggcttttcagctgcagcaggcacctcactggcttgctttgtcattggttttctgggctagactcccatctgttgagggcagctgagtggacagctgatgcctctgtggctgtggtcatggagacttgggatgagggctcagtgagagtgacccagtaggggcagcagttcaggatggcagtggctcaggatctagccctggtctctgaggcccccggcctgctcaggcatatgtgcagggctctgagcaagcacctgtttttgtgccagaactaaggcatgcctagtccaggtggatggccagggagcattcagtgagggaggcagtagggcctgctggtgacacctagtggtgggtggggctgtaggagctggtggctatggtttcctcatttcctggtgacagtgtcctcatctggcccacatcttgtagtataaccttgatttatactcacacttgcagggtttcttttcagaattggtttcacttcatatgtatatgtgaagtgatagtcatataggactgtccctatttctcagatgagtgtgggggtggttcaggctgagagcctagcactgtagctgcttgctgagagggtacctccatgcactgagggtggctgttgagacaggtggccttggagttgctttcagaccgtctccagtgcagactccagatgagaggacaggtgaaggcccagtgaggtgaagctccctgtgtgggcacttgatatgctttcttgtctgtgagactagacaccagccctgtcctgaggagcacgggtcatcctgagcctgtgccaggggtgctggggggctaagactaagtggctttactttctattctttgcccgaaggcttggagtctctatagggtgagtggatctgtgaggttcccccaggacaggttagctgatttatgggcccgatgcttccagcttatataactactgcaaatgtcaggtgctaaggcatcccaggagagggttagcttagcttagggaatcactaggtttcctggaggaggtgagcttgcatagctttgacacggcagtaggaactaggttagtaggaagaagggtagaggaatatcttggggggtggtgatgaggcacagtttcatgtagcagaggctggccttgagttcctagtgcttctgcctctgctgtgctgttattacaggcgtgtacttctatgtctagctagtttttgtaaaggtcggatggtcgttggtgtttatgactgaggagagggtagttatgggccaggatgcacaggcagagcctcgttgttctagaatctgttatcttacctagaaaggagccactaaaggaattaatggaaagccactaattgtctcttagattagggagtgggtggccagagggcaggtgcagctaggagaggaagacgggtgaggctgaagtggatgagttggagggcctcctagaggtgtgaggggaactaggtatgtccaggaggactccagggaagcagctggactgtagctggcgagatacagggtgtccaggagaaggagaagctggggaactagcagtttagacggagaggcggctggtagaggtcaggacactagctgcaggtctttgaagaaggggagagatgggtggctgtcggctcagaagtcaaggaggggacccagcagatttacttggcctggggtatcagcatggaggtcttggcctgagtactcaaggaaagggagaggttagaaaaggaaggcagttccccacgctccggacagggttgtgggaggaggcagggtccaggtcaagaggttttgcagtcctgtcccaaagctcatggtaagccattagcagagagaggtaaagatgagggaacaccatagtctgtagggctttcttgctcttcaccctgaagttctcacacccacaggcttgactgggacactagctgtgtagaagacaaggcacgggaaatggctgcctaagcctgatcacaaggtagaagagtttgtaggccagttttccatgctggtgcattgaggagggcaggatgctgtcctgagatatcatagagacggtggtataacctttgtgcggccttcggtccctgcagctcacctcctgtttgtctttgcagtccccaccctgtgaaaccccttactgctgcccctgtggaggctagccccgacaggaaacagccccgtaccagcctgagcacagccctgagtagcggactggagaggctcaaaactgtcacatctggtggcatccagtctgtgcttccagcgtcccagcttggctcaagtgtggacaccaagaggccaaaggtgaggtgcagcaaggtgttagggggcaactgagagaacaggccgtaagatgaacagaggccaagtgatgctgggggcagagcaggtaactggtaattccccgtgccacagctcttaagtggagaggacatcttcagccatagagatgggctgctgccaggtctggggttctacagtagggaaacaggtttgggtgggctagctgggggaaggtctagccctcccctgcttagttgcattctattttgctataggattctgctgtgctggaccagtcggccaagtactatcacctgactcatgatgagctcattggcctgctcctgcagcgtgagcgtgagctgagccagagagacgagcatgtgcaagaactggagagctacattgaccggctgctggtgcggatcatggagacctcgcccacactgctgcaaatctcccctggcccccccaagtagcccttcacgccatccctggagggatggtgaggacctgtgtagtgcccgccactgactgctctcacctgagtagggcaagcctgctctcatggtgactctctgcacccctccccatcctgcctctgctctggctgctggaaggggctctttgaactcccactggagccttgggtcttccctacctgaccattctcacacgcgaggttatggggctccccagagaattgcaacaaggttgttagctgtcaagatggagcaggagtgagctctgggttctggggtgagctgaattatctaaggcaacactgttgacagcacagctcaccccatgaggctggtcatttgtttctcctcttgaccaactcttcatctccattgccttctggcacctggagggtctcctaggccactgggacagggatgggaactaagctgcttgcttttctgtgcactgtagacaaccagggcacctacacttcagccttgtgcctataccctaagagcaaggagcctgtgtgttttcgtcttgtctctctgtctagagcatgtacacagggtggtggtggtggtggggggtggtggtggtggtggtggtggtatgtgcctattcctcagctgccccctgcccctcttcagaccctcccactccatgtcccagtagtggtgggaggtggggtgggcacagagggaatgacttctttctcctgcagtcctccctacctccctaacatgaaaccctccaggttggggtttggggctgctcatgttttgtggaccaggcctccattcatgtctgttaacactcgtcagatgccaaaactgtgctgctgtgggctcagaacatttggaaaccaattaaacgtgccttttgtgggtgaggacaagagcctctggatgtagatgtctctctggccatggtgtcccctccctcctgttgagcacgtgaaaacggctgtgagggtcctgaaagggggctgtggaccacgctgtttactaccccgagaagtacctcagctaaggctctggccaacctgctttggaggtgtcctaagccgccttcccacttcctggtcctcccttgacccttatttggagcatcctggtaaaaaaatctagtgcacagtaggtctggggctatcctgcaccttactgtgtctgaccttgggtcccagttatgctggaccagtgggtttgtctggaagcaggaggcttcattctgctttaggagacacctgagcttaggaaaatgcccgtggctctccagctgttctgtccttgttgtacagtccctcctgctcaccaatccctcctgtcttgcctggcttggctgaagtgcattcaagtgaagtcaggtatctgctctgtggtccagcttctagcttgcttgtgaatactgccagtctccctggcatcctcgggggtccttggtggctgtgcattacaaaaggtatgagtgaaggaggtgagatgctgacaaaagattctttgggcccagtggagaagcagtaacgtctttccagctgtctcttaaagacagggtcatgggttcactcagaacacctcaggagaatattctctgtggatgacgtcagtcttctgccagcatagagcagatgaaccacaatggggtccaccactgtgcagttaccaactataggtcaactcagagatgagaaaatagccaccagttcccagagtttgggggtagggtcagtccttgggtgttggaggtgtcttttgaggaactgagtccctcttctaggtcttcctctgggctttaattagtcccagcccttctctcatctttcatccatccttgctgtttggcttctctacatggccagggcaggggtgtcctgcagagaggtcctgaactgaggccagggttttgttcattgtctgatccttaccacatactgcagagtgcagccagacaggcagcaagcaggcacagctctgctctgccctttgtcctcctagttgaaactcctgtctataaagagcttgttcttcatgttttgagcactttatgaagaataaaaagatcacgtaccgcagccagcttgtgtgtttgttttgaaatgagcggacaaaggagaccgcctgtgggagagggcagtgtggttctcaggtgacagagctaccgctctgaaatcacaggcaacactgcctcatggcccgtgtgcctaggatgcctgtgctcacgggcactgatcacaggcatatttactgagtgttggg

SEQ ID NO: 31477 - DNA, 5725 bp, Mus musculus; identical to SEQ ID NO: 31476

SEQ ID NO: 31478 - DNA, 1178 bp, Mus musculus
tgttgctggcaggaccactgtggctctgggagggatggtgctggaatgtgtactgtgtgcctgcagtgaaaaggcgtctgttcacgtctttcctaagaacagtcagttagacagggccaatggttggagaacccactgctgagactgggcttccccgagttcatgcaggaagcctgcacccacacagagaggactcatgccaagaagtctagtgttgggatggaggagtataatggatggtaacccagggaaatctacttccagggccatagataggcgttccagctcttctactagatgatgtatggaacagagagaactggagaagttgggagaggagacggcagccaatagccatgaagagatttttggctgggggacgttgtcacagagctgtggaagtgtgaggatggcaccaggcctgttttcacatagcacctgaatctgaacatagctccagaatattctggaatatttagatgctcttgacccatccactctctcttttgtttcactagggacctatggtggggttaccttagacccttgaagaagttgggggttagcctcttgttttatgaatggccccaactcctgagccttgtgctcacctctgaacacctcagtcccacccactcatcaacccagcagatgtgcagcttggtgagccagtggggtgttaggcttactatgggagtatggtatgagcacagtaaggggttatatacaggagtgtgggtgaccccagaatagctgcatcccctcaaccagcatgagtaaaagctgtacagatggagtctcctattcaacttactgcttagatattctagtgccttctaaggccaaaagcagctggacagtattctttgcagctaggggtatgagagagatgatggaggtctgaaatctattcctttagtattatatatctctagctgtcttggaactatgtagaccaggctgatttcaagctcagagagatccacctgcctctgccagagtgctgaggaagtgcaccaccatgtccagtaaagctagtggactagctagcactatctttactgctgatcaggactaggacgcagaaatgtgtgctattggtcacatgatcaataacttctgttccctaggaacctttccctggttctcctgtctccagccccaccttcactggcatt

SEQ ID NO: 31479 - DNA, 1194 bp, Mus musculus
gcggggaggcggcggcccgcttggcccaggccagcccgcagctgcggcggtcggtgcgctgcaggcggcgcgggggagccggctcctgacagcatcccgcggctgccacgtctgtcactctgtcccagggtccgccatggctctggtgcgggaccctgagccggcggccggatcctcccgctggctgcccacgcatgtccaggtgaccgtgctgcgggccagcgggttgaggggcaagagctcgggcgccggcagcaccagcgacgcgtacacggtgatccaggtgggccgagagaagtacagcacctcggtagtggagaagacgcaaggctgcccggaatggtgcgaagagtgttcgttcgagctaccgcctggagccctggacggcctgctgcgggcacaggaggcagatgcgggccctgcgccctgggcctccggccccaacgccgcctgcgagctcgtgctcaccaccatgcatcgctcactcatcggcgtggacaagtttctgggccgggcaaccgtagctctggacgaggtcttccgcgcaggccgcgcccagcacacgcagtgagtctggggcgctgggagcagggacaaaaacggttgaaggcctaaccgggcggggctggttgggacgtctggacccggtcctcccactcaaggacacaaacccgtatactgtttgttacttctcattcagccttctgccctccccaattccccctgactgtctccccagcagcctggtgggcctggaaggcctgatggagttggtgtagtgaccaagcgttggcagtacatggccaaggaaagttcggaatgggattctgaggctgtgggaattcaagaagggaaatttaaagacttcagggtctgccttcttttcctcaaagaggtgactagcctgtaggtagtggagaggaagtctcaccttgtagaagcaggaaggtgaggtgttatcttccaaggcaagattgaagggagacaccccagccttcccaggggttacacaggacacttggcctttgaacgttcagggatacacctcaccgtatagacgtactctgtgactctgtcttagggtaccaggactgagagcattggcccacctcggagtaaagaagggtacatttgaatcagcttgggtcagtgggacagtggttataatgccctcagttctccggattattttct

SEQ ID NO: 31480 - DNA, 1099 bp, Mus musculus
cgaagaggccagatccttcacagttaaggaactctccggttgctgtaagaaagtattgtgcagatacagtggaaagggaaattaaactcatgagaagacatcagctctgctctcctgccacccctccaactgagacactcaggttctaccattttgtctaaatgtgcttctccaagaagtcttgctcttctgtctgtaccactacctatttatctggcactctccctccccccaccatggagtctctggatgggtctcaggacctcttctcaccttcaagtcctgtggatagttctgaggtttcccatgggcacagagaaattcccttcccctcataagcttagagctccctggcaagaacacacccactatctgaccagggaagctccgagggtagggaagccacagtcccatctcacccacctgcctcgatgtccttgtacagctggtcaatgaaggtgtctagttgttcccggtcctgaggcgtcagctccagggcatcacaggcgtgcacccattggctgagggaactaaacagcccatggatggaagcaacccaggtcacagggctctctatgtctaggcaggttaagcccaggcagaagggttccccatcccagatctaaaactgttcttttcttttagagtaaggaccccaccctcccaaaagagcaagattcccagcagcagattcccctgcctcattcctcgaacccaggtcatgacaacacccaatcctaccatcttcaaagaatctgtggctaccttcctccattaatcttctatcgaacctggaggattacttagtaggtctagaacattctctcctaacctggttccgattccttgaccattggtcccaacaagggcaaagagagaccggaatccttctggtgtgaaccactgtagggaaagaaaggtgagtctggtgcttgcttttcctaaccccactgcacttcaactccaggcctggagcaccaggaagaaaggcttcgtgctcctgccttcccacactcaccagactgagagcctcttcataaagggcctctttgaagagcccaagcagaagttccagctggtcctggtttaggggaaacag

SEQ ID NO: 31481 - DNA, 1348 bp, Mus musculus
tgttatctcacctggaaggccctgcccagaccctgctggaaaaagggggcctgtcctccacaaaagtggttggaaggaacaacccctcccctttgcacccattgcctgctttctcccttctagcatactgctggagggtaggatagaggctggacccgagcccaccccttcccagacctcatgccctgagcactgctgctgagctgcatcggccctgtgccatcacaagccttccagaactggccttcccctgccatgctccactgcagctgtgagacgggaatcaagtttcaggtctcatagtgttcttcctctgggccccttagcccatattcagctcatgcatccacgagaggcttggctcctattgactggctattaatttcagggtggcaacataatggccaatcagagagcagaccggctttcttgagagaaagaggtgatgtgaagccttacctcttccttattgttcacctgccacagctgcagctgaagtactggcctgccactttccagcaacaggcaggaacaagggactaggcctttagaacaacactgcaaaaagactctgccaggggtgctgggctgttcccactgtacactggggaggtagagattgacctgttcgccaaaccccagaattgctgtgcttacatcttgcctcttaggctcagacaagggggctagcttgataaggtgtggaagaggcctctatcaggatgaagactaccaccctctctcagaccaacagtagagcagatgacagattgtgctctataatttaggatgcccaatcttccccgagaccagctgcagtggcccagcaaagggtctctgggtcaccgacaccctcctttaggatctccagaggaacaccagtcttccagaagtctgaaggagctgggcagtacacacgaagatgagccaggacttgttccctcattgccacagatgaccatccctcacttgggatgggcactgcggaattacagctaccattccccatttgttccctgagaggcctgcacatggctctgctaggagctttcagggaggaccagtgcctatgctataggcccttttcaaggtggagccagatggaacatgcctgactggccccctgacctattgggcacactccttcacaacagccagcagcccctctccctctggtctgcccactggtctcaataaaatgtgagtggtgataggcctttgcaacaatgccttgtggggcgtgggctgggtgaaccactctgggtctacagtagtcaagatgggtgcaaagggcacaagttagaccagtgggtggcagcagaatgctccgggtcctgagcaggcccca

SEQ ID NO: 31482 - DNA, 1122 bp, Mus musculus
tggctggccatgctgcactgggtgttgtgacttggtgggggtcaaaaacaatcaccagtaccctctcacaagccctatcttgaatatcccagtcagagggcaaaaaagttctgagtttctggaactcccagcataactggggcagagggcagtgttgggtgctgagaaagtgaccaacgctatactgctcttcatgccctcccagctacatgatccgccgttctctggaacagcacgggctaccatgggccatcatctctatcccagtcaatgtcaccagtatccccacctttgagctactgcaacctccgtggactttctggtagaaaagctgactccaggttccagtgacaagtgactcatgggaagaggaaacccaagattctgctatttggagtttggagatagattctgaggacaagtggaaccagagaggacagggaacccctcctcctggctttcccttccccagggcctcaaggacatctcatgattcaggaagaggcttctgactagaatttgaaacaaaaggtgctgaaggcagatggccctgatacacaccacctgtttcagctcccagcagccaagccctcctcacagtgagccttgtagctgctgctcaagtggtttaaagaagtgatatttggggactaataagcccatactttcagcaataaagccaaacaaagctcaccaggtttgtgcctgtgtcctaaactaagaaagcatgctgtagggagctcatctgcttagtcccatgtcattcggctgattgtagggacggcttagagacgctcaaggccctctaggataagtacatcagactgccagttttagcccagccctctgggaagaaggctcttatggcccagagtcagcaactgaaaccaaacctctgagacccttggtctggctttagggacatttacacaccagtgtggggcctgctcaggacccggagcattctgctgccacccactggtctaacttgtgccctttgcacccatcttgactactgtagacccagagtggttcacccagcccacgccccacaaggcattgttgcaaaggcctatcaccactcacattttattgagaccagtgggcagaccagagggagag

SEQ ID NO: 31483 - DNA, 1085 bp, Mus musculus
gtgaagaagcaagataaagtgtaagtttccagggggctgtgtcagaaccttgatatcttgaggccaaatagggtattttggccaaataagcatgttgcagactttgtataagcgggtgggtggccttttggttcttgacagaccctttgatgtaaaacatgaaagaggctgtagactgtcattaagagccaccgtgggggtgggggtggggtgactgtatctgctgtcggtcactgatgatctatcgtaacagtggagaaggtgaaaggtggtaaattttggttcgaggaagagtaatgggttgatgtgtatagctgctaaggtagatttttatttaaataacgggttgatgctgcttgcctcaaatgtgaattgtctgccgcacagtgtaatggttactgtgtaaggtgttggatggaatgcaccactcccacactgcggtagattctggtaagaagctcaatgccagttttcctgtgctgcagagagcagaggaagatgctggagaagtgtgcgatgacagccctgagctccaagctgatctcccagcagaaggtcttcttcgccaagatggtggttgatgccgtgatgatgcttgacgagctgctgcagcttaaaatgattggcatcaagaaggtgcaggggggagccctggaggtgagtgagcctgtcgtggcctccctagacactaggcagcttcatgaggcagatgtgaaagcagatgtgaccgctctgccatgctgcccgtgttctttgcatctgtttgcttatcgtcaggatgggaaagtggacccaggccaattcggaatcttctttctttatgtcagtgtcagggtctatagaaggattatttgagataaattacttgtgaattcttcaaagatatatagtggaggtatttggcagttcactctccaaggtgtaatgtcaaactattagtttcctttggatagatgataaatagttcagactataaagagagcatagagtgaattgtcgcataaccacttctgtcccttacacagccactattaacagtttacgtagtgtaaccgagagtttgtatacacagtgcgtgtgtgtgc

SEQ ID NO: 31484 - DNA, 1173 bp, Mus musculus
cagtcctgagtatctgggataacaagcttacttagtcttctagtggactctgttcctatcattgtggttctcaaggcagcctctaggtagcagtatctcccagcacagaatggcttttgtaatagaagaggtcttactgggaaatccctaggcacagctttcagaagaggttaaactgttattctccatacctcagcagtgccaaaaattctggcaaagctccttccttgaggttactttgtatgtttgtgtttgaaagtgctaagtggttgctgttaaaggtccttgtgttttgggactgttggcccattcccagataaatcagcatgtttttgtttgagggaggggttggtttagcccatcatatatacccacctccattccaaccaccctcttctttttggggctctgtaggattaccaggcaattgttgatgccgagtggaatattctctatgacaagttagagaagatccatcagtctggagccaaagtcatcttgtctaaactccctattggggatgtggccacccagtactttgctgatagggacatgttctgtgctggccgagtgcctgaggaggatctgaagaggacgatgatggtaagaaacccttggactgctgcttatccttcatggccctgaactttttcctctgacccgatgtaatggaatagactatcaagttgtccctatgttaacactgtcaagaaatgttccaacccagtgtatatgcctagtaatagaaactcctttgaattcactgaccaagacaggtcaggaagtggatagtgcccagccaccaacactgtggtcagcagataagcctcgatgagtattgctaccagccagggctttccttctgggtttgagcctgtagtctaaagaactgctcctgagtagagttgctgcacccagagcactagacatcaggtccctatctcctttgaacgagaccctttgccttgtgtttgttctgttttgattttcatctttttgaggggcagtagggattatttagaggttagggtaaaggtgggctatcctatgcagagggctcaggctctgtggcaacacggcttagtgagtgcctggtgggaggctaattgtcctcattgatgttttccttgctcttcaggcttgtggaggctcaatccagaccagtgtgaatgc

SEQ ID NO: 31485 - DNA, 1332 bp, Mus musculus
ccaaatacctgcgggattactcgaggaccattcctgggaagcagcagctgttgattggggcatatgccaaggccctggagattattccacgacagctatgtgacaacgctggctttgatgccacaaacatcctcaacaagctgcgggctcgacacgcacaggtggttatgctctctggagtcagggatattgggtgggtgaggtaggctattaggtatgtgctgtgcccactggaaatacagtcactagatacaatggggagctgcctcctgtcgtagtgccagagttggaagtaggtgttggctggggtcaagtagggaaaggtctggtgccatttctcttcacaaagtgctttgtcaagtcaggttcctggagtcctttggaaggtgcaggaataaatgtgccatggtgactctcctctctttcagggaggtatgtggtatggggtggacatcaacaatgagaacatcgccgacaacttccaggcatttgtgtgggagccagccatggtgcgcatcaacgctctgacagcagcttctgaggctgcatgccttattgtgtccgtggatgagactatcaagaacccccgctccactgtggatcctccagctccatcagctggccgtggcagaggccaagcccgcttccactgagaggcgaggcggtctgcacctccttgtgaggtgagggggtggatgagaagatggttgctggtctgctgggttctcactgaggttatttaaataaagcttaaggttatttgcttggtgtgtttttcataaacattttcctgccttagaattggagtcatgtatacttggaaatagaagtaaagaattgtgttagcctgctgcttgctctgctgtgatggcccttgtctagacacctcagtggctaggtggtagcagtatcaccgtcacacaacactgctgtgatcgtagttggagtgcattccctgtctgctctgaccgcacttcatgttctctgagctcagtgtttcctcttgcaatattttaagagaaggcacagaaaagtgtcaggttgtcatataatctctggacttgagctttctaaggccttgtaagaaaacagcttgtttcttgttcagagtccctttttgtttacgctgataactgtggactgaacccaggcctgggaggtttgctcggcagccacttgaccgcagctccattccctgccctgtttttactttgggttgaccagtctttctgcacctagaggttcactaaattgcccatgctggccttgacctaactttgtctcctgagtaaactgggacaactggcttatgcctaccaccatcccagctcc

SEQ ID NO: 31486 - DNA, 1121 bp, Mus musculus
acatatgcagctagagacacgagctgcggggggtactggttagtccataatgttgttccacctatagggttgcagatccctttagctccttgggtactttctctagctcctccattgggggccctgtgatccatccaatagctgactgtgagcatccacttctgtgtttgctaggcccgtgcccactcttgaaaagtatctcttcgcctttgatatccaggccaggcagtgcttgcgttttggtaccagatctttcccattagcctactaaaagaaatgccccagttctccatgccctgtacttcgtcaaagcatgcagacacaactgcatcccttccataaagacggaagaggtaccataaacctgctttctctcgaccttctacctctgtgctcctgctttcttgaaggccttgcttgtctttctagatctttcttgaacctacccactagggtcaggttgccacttccaccatcagccactgtgtcatcagcaaacttcgtgttcctcatcctcctggatccatctacagccctccccccctccccccgacacagactccctccctctgtagcccaggctgccttcgaactcgtgatcctccggcctctgctggtattactgccaggcaccgccaccgttagctttcctttatctttgtccctttacagctatctttcctgccttcccctttgtttctctagtctcaatgggagccttaggagctgtataggatcagaccttgtgcttgttcccactgttacataagctcagcccagtcagggatttccttttttttttttaaagagaaaagggtttatttttgtttatacttcatactccatcataaagagaagtcggagcagcaactcaaggtaggaactggaacagagacaaagcacacctttctacctttcaagttgctttcaaaactcggaggaggagcatttacagtagctgctcaatttgcttttttctatgcaacccagcaccacaggccgagggacagctccatccacgggatttccttttttgttgtttagcaatgctttccctgtgtcccagactgtgcttggcagccggaataggtgttgaatggatgcgagaacagctgaatgca

SEQ ID NO: 31487 - DNA, 1130 bp, Mus musculus
aatctgattttttttccctttctttctaaaattagcctatgttgcatgtgtcagctctttaattttcattgttaaataatattctttaagggttttttgagtaaacatgactttctgttgagtaaatacctaggagtagatcagctaaattatttaatggtatatttaactttataagaatatgctaaattattttctgaagtacctgttcccattttgcccaaggaatattgttgataggtttggaaatactcagttttttgtcatgtaccaaatgtattgatttgacaatgagaacttaaatatagtgttaagtgtcagtgactgcctggtactaggagatgggagtgatcagaagagaacgaggaggttaatagggcaagaaggaacatagaaggaacaactttttttcaactctggtgagaatattgttaaatatgctatgagtagacagtagtattaatgtgttgactcagttaacgaccaacatcttttcctttaaaattttcctttcagagaacagagtcttggcattgtcttcctcaagaaagggattcttcccaaaccttggctatgtcccagactgagatcggcagagtagaaggaacagaagtaccagacctaccctctcaggagggaggtttaccagctcagtcacagtgtccaggaaagaagccaaagctgaatgtcttgtgttctccattgctaggtaatgcctttctctctctctattttaacattttattttactcgatatgggtgttttacctgcatgttatgtctgtgcattgttttcgtgcttggtgccaatggaggccagacgagaacacctaagtcctggaacaggaattatgggtgctgagaatcaaactcagattctcttgaagggcagctagtgttcttacctgtcaagctctctcctcagccttaaatggcctctgtgtctttacccagaagtaatagcttatatttcctttctttccttttcctctcttttttttctcctttttttctttctttctttccttctttccttcttttctttctttccttcttttcttcctttctttctttctttctttccttccttctttctttccttctttccttctttctttccttctttcttt

SEQ ID NO: 31488 - DNA, 1895 bp, Mus musculus
taggacatacagggctacacagattaaccctgtctcaaaaaaacaaacaaacaacccccccctccaaaaaaaaaacaacccaaaaaagcaaacctttttaagtttaaaaggcaagcttttaaactttttttataatgttgaaattgattctgttttaggagaatgcagcagtagtatcaggtggtagtttacttattggttgcaaaattttctttgtttaatctttagctaaagattgaagattagaacttttaaaaatgcactttcaagtaagcctgattttagtgacaccaggtttgtatttttattagtgtttaataataataataatcagattatgatgtcctatattcatatgtcatggccaccagaaaaggacactcagcagccagaaggcaacttggctgataaagaccacgttttcaccttagctttatctgatattagtgattattttaattattaattaatagttaatactcaggagctaattatttctttctgactttgtattttcagaggaattcctgataagtctgaagattctgaatggcttgctcgaccatcagaagttagtgaagctttaatccaagccacctcagaaacatcttcagacttagctaacagttgctttagtatatctcagcatccacttacaggtagcacaacttttgggtctcagcactctcttttcatgtttgaacaagagaataatggagaaactgtaccatctaatgcccctgatgaactgaaaagcccgaaggactcagatcatgatgtcctgtgttcatatatgtcatggccatcagaaaaggacactcagcagccagaaggcaacttggctgataaagaccaagtttccacctcaactttatctgatattagtgatgaaagtatagctgctaaaagaaacaacagttttggtgtttcttgttcatgtaatcagtattggaaccagaaagccttacaacaaactgaagcatgtctagccagtaaggaccatgcttctttcccatgtaaaattactcctcttcctaataaagtgccatactcttttctacaacgcatgttaaaaagaggaaaagaggctcctttgatcgctgataatcatcttgagaatgtttgtttaaggactccagcagaagatgagatgagtctaaagaatgagtctttggagggttttgaaggaaatgaagatctgcagaaagaattatctcaattctttaagcaaaaggagactagaaatacttgggcatcttctcaggtgcataccagatatccagagataaagtatattgggactgttgccgtccctgatagtaaaaaacaagttgcagaaccatatattctctacagaggacttgatatctctgattgtcctcttccgacagtcaaatccaacttggatgagacatcagaacaactctattttcaagaggaaagaaaccaaaaggcagcttctacttttgatgagaaaaatgttgatgctactgaaaatgtagcctttgaggcaattattgcctcaattgagtcttccaatcaagagagtcttataagtgagactcaaacggataacactgaactgttagcagatgacagcgaagagaaagaacccctaaaaccagatctttccccattaaattgtaagaatgaaatctctttcatcgataagcttaagtacctgaaataccagtctactcctggggtgtttgaaccagcagattcaaaatcattgttgtataaagaagatgatgctagttccctatatctgtatccagatttaaaatcctccattaatgctcctcagaacatgctcaataagccggtttctgtcactctagagcttaagtcatctttaagtgaaaaagcttgcaatcaggctgttggtcttgaaa

SEQ ID NO: 31489 - DNA, 1150 bp, Mus musculus
aaatggtggttaggaattaaactcaggaagagtaaccagtaatcttacctgctgcaaatctctccattcccaacttgttcttagagaagacctgggttctatttctagtgtttacatggtgggtcataatcatctgtaactctagttccaggggatccaacagctttctctaaactctgtaccaggtgtacataacatatatgcaggcaaaacactcatacatttaaaatgaaattaaataaaaaaaattattaaacctcttgtgttcatttttatgatgaggtttggtttttagccaaccaagtgtcaaattaatagaatttttttcccccttcatttctcatttcataggtaggttgttctaatctgggcattagccaggcttctccatcttcattgccttcatttgttcctcaagaaccaaccagtgagccggaataccattcctccaatctcagaatgttgagggtatctcccgacactctgctaacaacgcatacacattcagcaggtatgtagaaaacggaggcattaactaccctttgtatctagggtgtgattattgtcttaccatgccgttctagcagttggatggattaaaggatgcccagatgtcttattttgtgtttttattactgtgataataccatggccaaaatcaacctagggagaaaagggcttatttaatctaaataactttataactgagggaagtcagggcaggaactcagtgaaactggaggcaggaactgaagcgggaaccttggaggaatgctgcttattgtcttgctcctcctggcttgctggttttttcttacatcccaggaccacttggccaggcgatagcaccatccacagcgggtgggtcctttcttcccacatcaatccttagtcaagaaaatgccccacagcttgactttatggaggcattttcttaatggaggtttccttctttcatatgaatgtagcttgtgtttagttgacaaaaaaaattagccaacacaccagataattggtaaagcagcatctacacatacctgaaaggctatctgaggaagagatttgaataagtggactgaatatggaagatctgtctcaccattgtgagtttgtccagttggttgagacctggattgaacaaaaaggtccc

SEQ ID NO: 31490 - DNA, 1107 bp, Mus musculus
tcctcttcgcatgcagagaagcctgtttccccctaccagttaaccttgccaggtagtcatctacctgaagatgttttcaaagcttcttctgtttgtaagtcatctgatgagctatctggaataacagctctaacctctgcttcctactcatataaagggagacccaatagttcttatcagcagaagtttccagacagccacctaaatgaagaggcccagaaaatcttgggtacaactggaacagtagaccagaagacagtgacaccaacaatgtcttcttcctttttacaaaaagaaaagcctagtattttctaccaacaaaccctgccagatggtggtctgtctgaagaggatctgcaggtttcagctgttccttggccagctgaccagaacattgctataccaacagtaacttctgctgctttctcacaaagagaaaagcctcggattttctaccaacagactctgtcagttgatcgtttgcctggagagcctctgaatgttttagggacttctggaccacctgaccagaacactggggcaccaacagtaactcctagttcctacttccctggagaagagtccattattttttaccaagctggctttccaggtaacactctgtctgcaatgtcttttaaagttccaaggatttctggatcaactgaacagactaacgtaacaacaggatcatcaagttcctactcagttggagagaagtccattattttctaccatcaggccttgccagatggtcgtcttcctcaagaagcttctcctgcaccagctgacctaaacactggggagccaccaatgtatttggcttcctgttctgttggagtaaagcccattattttctaccagcagcctatgtcagatagtcagcgaactaaaggtcacaaagaatcagatgttcctggaccaactgaccagaagactggcatagcaacagtgcattctacttcccaatcatatatagggaggcgcactgtttcttaccagaaagagtttccagatcttagtgaaaaggctttgaaagttctaggtgatgttggatccactgaacagaaaactcaaataccagtagtgtcttctgctctcttacac

SEQ ID NO: 31491 - DNA, 1271 bp, Mus musculus
ctgcttacacaaagagaaacacgagatttcagcttcagctttgctgaattgccagacagccgagttgctaacagttactcagaggtcctgtttacatagagaggatcctgcaatttcaactgtgatcaaaccagatgaccaaaagattccattaccaacaacttttcatggctccagtgatcaaaaagtaaaacctgttatttttgttcaaaaacagttacgagatagagatcaaagtgaagatattccgaagatttcaactgtctctgagccaactgttgtaaatacagttctaccagtacttctgcctggttcttactcacacagagagaagtcagattcattttacccacaggaactgccagatggacatctaactgaagttgatctgaaggtttcaagcggtcttggtcaagctgaccagatttctgggttacctacaggtattcctggtacttattcacacagtgaaaagcaccagcttatctcagaacatgtccaagagctgatggataacttgaattcttccgagtcgtcttgtctcagtgtggatagtatgcctctaaattcacaaatcgatgatggagttatcatatgtaagccagaatctttaggttttgccaatgctggctgtgaggaaatgcagaatatagatcgtggttcgaaaactcttaaggaaattcagactctcttgatggaagcagaaaatatggcactgaaacgatgcaatttctctgttcccttagtccctttcagagatgttaacgatgtttcatttatacgatcaaagaaggtggtttgcttcaaagaatcctccacaactgatgtttgtacccagagggaatcatttgtagaagaagttccacacattgaatatgtacagaaggacattggcacacagacgaaccttaagtaccagaggggtgttggaaattgggaatttatcagttcagctacctttagaagtcctctacaggaagcagaaggcacagctagaatggcatatgatgaaacttttaggcaatataaagctgccaggtctgtaatgaggtctgaacctgaaggctgcagtacaggcattgggaataaaatgattatccctatgatgacaatcataaagagtgactcgagtagtgatgtaagtgatggttgctgctcatgggacaacaatttaccagagtctttggaatctgtttctgatgtttttctaaacttctttccatatacttcacccaagacaagtataacagatagccgagaagaggagtggt

SEQ ID NO: 31492 - DNA, 1182 bp, Mus musculus
acttcatctctgaatgaacacagacctggaagtcctctactgtatgtgtgttaggggcctcatatcagctggtgtatgctgtctgtttggtggtccagtgtttgggagatctggggggcgggaggtccagattaattgagactgctggtcctcctacagaattgcccttctcagcttctttcagcgttccctaattcaacagcaggggtcagctgcttctgtccattggttgagtgtgtacaaataactgcatctgactttcaactgcttgttgggtctttcggagggcagtcatgatagatccctttttgtgagcattccatagcctcagtaatagtgtcaagctttggaacctccccttgagctgaatcccactttgggcctgtcgctggaccttcctttcctcaggcctctctccattccatccctgtaattctttcagacagaagcaattatgggtcacaggtgtgactgtggaaggttcgacaagctttttttgaatcacagaagcattctgaccacagaagcaaatatactatgaagctgtaccattagaaataggagatgctcacaagggcacttcagcttgttgagccttttgaatcctgtggactgtatcttgtatatcaatcccacttgggagagagaagaaagcaatcacaagtgtgtgtgtgtgtatgggggtagtggggacttgggatgggatggcaaacagagcaggcctcttcctctacacaaaaataaaattcaaaattaagatctcggcataaggcttaagcctttaaaactcctgtaggaacgtatagaggaagtacttcaagacatgggcacacatagggtttgacttcctgtggcttaggaggttacagcaagagttgatagactacatttcaagttaaaaagcttctgcagagaaaggaaatattaatcagaatgaaaagatagcatatagaatgcaagaaaatctttccatctattcatctgactggaactactatctgggaaatagtaggaactcaaaaaagtatgcatcaaaactcttatctcccaatcaataaatggaaagaatgagcaattctctaaagagtaagtacaagtgctctataagtatatggaaaaatatttggtatctttacccatcaggaaatgcaaatcagaactaggctgagattccatttcact

SEQ ID NO: 31493 - DNA, 1165 bp, Mus musculus
cagcctggtctacagagtgagttccaggcagccagggctacacagagaaaccctgtcttgaaaattaaacaaaaagaacttctggttctaccattatgattcctttatgagaagactttgtttcatgtttatctttgtgtcctctgggcatttaatatagcttctattaattgtcaaattaaacaaataaatgagtctattaattttaactaagaagtactgtttcttcagttaaattacataaaggtattagaaattaaaatgattttagaataaataataaacatatgcttgatccctttttactatatattttacaaaatgaagaatactatggaaataggttgttaacatgcgagatcactatacttacaattgcatggttacttaaatattccttgccaaagatatgagttgttttgtctttttttgttgttgttagttcacaagaacagagtaaggtttcctttactacgtcctttggaaagttatcatctgatgccatcactcagataacaacagaaagtccagaaaagaccacattttcatctgaaatttttattcatgcggatgatcgtggacagggcattctagaccccatggcccaaaagccatccaggtttgcctcatcatcctcagtgcagcaaatcccagcttctcatggcaaagacggtaagaggatataactgaattttacatcattaaaccaacctatgtgtaattatctttaaaatgttaattgtctttctcatcattaaacctaattttaatatcagcattatgctataatattactgtatccagtttttgtttgcatacctgtgaaaagaataggattttcatctttattttaaatagagttaataagagtatatgaaattcatgctgctatggctggctgactttgtccagtgatttttgtaaaaatatacttagcatgtaagaactgttggcatttggttcatagtaatatggctttaactgtgtatagtaatagcgtatttcttgcttatgaaataaccatctgagccaggtggtggtggcgcaagcctttaatcccagcacttgggaggcagaggcaggcggatttctgagttcgaggacagcctggtctataagtgagttccaggacagcgagggctacacagagaaaccctgtcttgaa

SEQ ID NO: 31494 - DNA, 1176 bp, Mus musculus
gtcaaagcttattaattactttatgattaaaaaatactcttcactgatgttatattccatatacagtaaaatttatggtattagattaggatttcatatgttgctgttatgattaagtattcttattaatgtatcctgttgtctagcctgactacagtgtgtgttatttctatacatgccttgtgtgtgtttgtatagtgccatctgacatgcctttttgccttcatggtcatatcagaagacatcccccaatccttttcccttttagtagctttcctggatagcagttatccccttaactatcactgttccactttttgtgtcatgtcttacgtcatttgcttccttgcctggtaattttaccatttattctactgtctctgattttcagtttgatttataccttctaattggcctgcaacatttcttgtcatggtgttctttccatggaagtgatctaagggaagaaaaagtctttcttgactaaaatagttcaagcctattttagtgttaattgtaatgctttctcatttttacgtaggctcaaatgatgctattgccccagactttccacctcaaatgctaggcacaagagacgatgacctctccaacactgtaaacattaagcacaaagaagggatttatagcaagagggctgcaacaaaggggaaaaacccctctcagaaaggtgatgcaggtaatgagtgaccttgcgtgttttcaaatttgtttcttgaacctttgcatttgaagtgagaatagtgttgtatttatccatattctggtttgtcagaaaatgagaccctgagtttaatccctacaacggaaaaaaaaaaaaaaaaaagatgaaaagagaaataaaaaaaaaacaaaacgttaaaaactgaaaggaataatttacctgacaaagatcctaaagaattaaactttaagtgtatttcaacattcgtgtgtgtgtgtgtgtgtgtgtgtatacacacacacacacacacacacacacacacacaacaacacacacatactgacaagagaaactgatatgcgtgtcacatctgataggtaaacctccttactgctacattaagtaacacaggaaagtgaaattttagaatatttaaaatacttcagagaggttggaaaactgcaaacttcattctcaacataaataaaatgtat

SEQ ID NO: 31495 - DNA, 1206 bp, Mus musculus
aattaagagcctcagcatcaacttgaatttgggagagcatgagaaaatacatactatcaagaatcaggccagagacccaaaaggcaaaagacaagcaaatgagcaaaagaaggatcagaaggtcaccccagagctaacaactgagtgccccgtgagtttgaatgaactctggaacagataccaggagcgacagaagcagcagaatccatctggtgcttgtgatacgaaagagctctccttggtggaacgacttgatcgcttggctaaactgcttcagaatcccatcacacattcactccgggcctcagaaagtgcacaggatgatagcagagggggacatagagccagggagtggactgggaggaggcaacaaaaacagaaaggcaagcaacacaggaagtggagtaagagcctagagaggggccagagtacaggggactttaggaaaagcaaagtgttttctcctcatcaaggtgggaaatccagtcagttcaagattgagcagattaaactagataagtacatcctgaggaaagagccaggttttaataatgtcagcaatacctccttggattctagaccctcagaggaaagcgtgtctctcacagatagtcccaacattttttctagcacggattctcctgtggactcagatgtattgaccccaactgatagggacatgcctttaaatgagaggagcagctccatatccaccattgacacagtccggttgatccaggcttttggccaagatagactgtctttgtcgcccaggcgaattaaattatacagtactgtcactagtcaacggaggagatatctggagcagccatgcaagcacaacaggaaggcattgaacacagcctgtccccaaatgacttctgagcacagcagaaggaggcacatccaggtacacggctacaaattccaactggcaatgtgactgcctttttttgaggacgttttagttaatctcttcacaacaggtggaagaaaacagccatttgccctttcctcactacctctaacgtttctccgagctggaaaagagtgagaaagtgtagtccagtgctatcgtttgttgtcattctttccaccaacacacccctgccagccacgctttgcactatatgttttcagggtctgtgaagtaaaaggaagcccctgacatggggagctgggagctaagcatggcttctgtttggc

SEQ ID NO: 31496 - DNA, 1176 bp, Mus musculus
gggagatgctctgtccattgaagtagggaaaatggattttatatttattcaagttttcaaattttctatttttgtattacataaaaatggtaagtaaaataatttataaataaatatctattttggcaatttgttctcaaaaatattttgtcagtaggactgcatggagatcacaatactagagggaaggagataggagatgaagtttctcatgatcaatatttcccacaattgagattttggtagatatgaattgacagggattatgtgtgttaatagtggtttttaagtaataaaaaactggaaacaatgctggaaagaggggaaaggatcctgcttaaagatttatgtatggccaaataatgcaaagttcatacttcgagatgagcatcatggtacagatctgtactcaaagtactcagaagctgagacctagctccagaggtcagatggttttctccccccccccccaattaaacaattaagtaacatttggggcttatactaatcatccatactctgcccttcccctatcctctgggagtcaataatttgcttctgtctctggggacttgtctgttctggttatttcatataaacacaatcgtataatatatgattcttgtcaggctcccctgtccccagggattgaacataggacaactccttttgaggcagttctaccattaagctgcagttctaccctctttacattttttttcaaggctcacctatgccaaagcacaaacagtacttgagtttttcctgttgtatatatatgacacactttttaaaaatctattcacaaatccaatgatagacacttgggcacttgcaatgcttcagctattgtgaatggggctgatcctggaatccctgtatgcagttctttgaggtacacccaagaatggaaataacaaatcatgtggtaattgtgtcttactgagaaactgaccaactggtgagaccgcagtgcctgtccttttatgctttggccagcagtgattcctgagggcccctgcgggcctcactgctcttttgtggctgcttatttatcttgttgttgttggttgttttggtttttgttttgtttttgaatgttatctactagctatactattgagtataaggtggtttctcgctgtggtttatttacatgcctaccggacatcctgt

SEQ ID NO: 31497 - DNA, 1231 bp, Mus musculus
aataggggctcaccatctgtcttgattaagcctgccagccttgcttccggtctgctccatgatacatctgtctttctcctcaggtaacttggagattgtggctggtgtcaaaaaatacactcaggatgttggggtgactttcccaactcccagttctagtgaggccagattggaagaggacagtgatgtgacttcttcgtcagaagaaaaagccaaagagaaaaagtttctttccaattatctgcagaccaaaaacttaaggaagaacaagccaaatccctgtgcaggtcggtttctaactccaggtagccggaaactagtaaaagacgtgtctgagtctgtggaaagctctttgtactccaccagctgccagctaccacattcgaaaagtttgaaagtaactagaactttatgtagagtcttctgtagttgagaccagtttatgggcaccctaaagattgtcacccccaaccgatgagtcccatgcaagtcagtattacatacatttctttgatgtaattgggtgcagttattaaaatgtttgttcttgaaaatatttcctgtaggagtctcatggtttgttcctgtggaaagtggacaatcaggatctaagaaggaaaacctgcccaagatttacagacctgttatctcctggtttgaaccagtaaccaaaaccaaaccctggagggagccactgagggaacaaaactggcaggcccaatgcatgaacagtcgtgggtccctgggaggcccaggcagggatagtggccaggtttctcttcggccatttgtgagagcaactctgcaggtaggcacagtgacatgaggttgactttagccatatgtgtttgtggggtgtgtggctggcatgctggggtctagtcattccaccgtcctcagcatctgtggactgggaggagaggaagggctctgttgctgtgtgcaggctccccgtgtacagatcaggccgagtgtttgggtcactgtgcagagtaaaccaagcgctcatccctgagctctgcccccttggtggttaaaggaaatatttaatgaggaatttgtttgaagtgaatgaattgacctcttgtctcatcaacatttggaagagttgcaggtgaccccactttggttctcagcttttcctaaaggtgtttctgggcttcctttgatctccctgggtgtgccctcccctcaggctccctagacctgtggtataggtgctggttttttt

SEQ ID NO: 31498 - DNA, 1155 bp, Mus musculus
acctatgccaaagcacaaacagtacttgagtttttcctgttgtatatatatgacacactttttaaaaatctatttagaaatccaatgatagacacttgggcacttgcaatgcttcagctattgtgaatggggctgatcctggaatccccgtatgcagttctttgaggtgcacccaagaatggaaataacaaatcatgtggtaattgtgtcttactgagaaactgaccaactggcgagaccgcagtgcctgtccttttatgctttggccagcagtgattcctgagggctcctgcgggcctcactgctcttttctggctgttatttatcttgttgttgttggttgttttggtttttgttttgtttttgaatgttatctactagctatactattgagtataaggtggtttctcgctgtggtttatttacatgcctactggacattctgtgtgcattttaaccatttgtataacttgtttttaagtcctttgacctttagaaatttagctgcttgactttttgttttgtagttgttggacttttctatatggtagtcccttactaaatgtatatataatctgaaaatacatcttgccactctgtaggctgcctctcacacaatcactttgttgattgtgtcttttgacatatagcagatttaatagttcagcattgctttctgttacccatgtcttggggagatcataaccaggaaattgttgtcagatctaatgtcataagattcttgtctttttaatctagcttttatatttaggaattcagtctactaatggcatatagaaaaggtctactttcattcttcggcatgtttgtgtatagttctggcaagatcatttctttagacttttctccatttgttccttggcactgtcgttagaaatcttgatcgtgtgtgtgtatgtgtgtccacattggggcactcagttctgtcctattggtttcttttccttatcatgccagcaccatagtttggattcagttatcttcatcgtaagttttgacagcacgaaccgccgtgttttcaagattgttttgaccagagtccctttagaggacttgtaaatatctacttgtaaatatcttatttgttctaatgattttgtaactataaaatttaacttcatttttggattattt

SEQ ID NO: 31499 - DNA, 1412 bp, Mus musculus
gaatataaaagaaaaaaggggaggagaggccgcgaccgggcagagaccgccggagtcgccgccggagaggagtcgactcgccagccgccgccagcgaggcccgcccacccgtttgtctggccctctgccccgttcaccatgcagcctgcttctgcaaagtggtacgatcgaagggactatgtattcattgaattttgtgttgaagacagtaaagatgttaatgtaaactttgaaaaatccaaacttactttcagttgtcttggaggaagcgataattttaagcatttaaatgaaattgatctttttcattgtatcgatccaaatgattccaagcataaaagaacagacagatcgattttatgttgtttgcgaaaaggagaatccggccagtcatggcctaggttaacaaaggaaagggcaaagcttaattggctcagtgtggacttcaataattggaaagactgggaggatgactcagatgaagacatgtcgaattttgaccgtttctctgagatgatggatcacatgggtggtgatgaggatgtagatttaccagaagtagatggagcagatgatgattcacaagacagtgatgatgaaaagatgccagatctggagtaagggctgttgtcatcgcctggattttgagaaaggaaaataacttctgcaagatttcacaattgagaaaacccctgagtcgatagctctaaaggcagatatgctgtacttgcctcctctaacccagttgtcaacctttttttttctttttctttttttttcttttttttttttttttgaaaggcttcactaagggttgattatgtaccattgtgtggggcgatttaagtcagctaaggcagtatccttatgcatgaacatttcccaggattccatgaggcagctgatcctaggcaactgctccagcagctcggacaaataattgcatttcatctaagtctttcatcataacacaattacttacacattaggaaagctctcagcttagggaaagatgaaagttttagatcctagaccatggatttaaaggaggcggaaacaaattggctaataccttaaactgataccctgccattctttcaggatacctttcaaaattattccactaaagtttatttttcaaaaaaaaaaaatgtactttacatcattgtatgtgatcacttgtcagtgttcaggtgtattttagcaaaaactagtggatgccctaacttagatggtttttgaagcctatacatttggtattgtttggcccttaagcttttacatctcttagcatggaggacaaagaaagctgtacattgttgcttgagagtatgtacattttagaccagatttgtatttgcacagtcagtatggcaaatgagtggacaatgttaaatacactattggatttt

SEQ ID NO: 31500 - DNA, 1873 bp, Mus musculus
ctgagtttgaggccagcctggtctacagagtgagttccaggacagccagggctacacggagaaaccctgtctcgaaaaaccaaaaaaaaaaaaaaattaactctaagccaggtgtggtgactcattacagtccactgctcaggaggctgaggcaggagaaagctgcaagtttgaggtcagcttgggatatgccacaaattccagatcagcctaaagtactatgtcaaatcctatctcaataaatagcaattcatttaactctcttagctgctttttaggtagatatgtctttgtgcccactttatacaagaggcagctaaaagagtatagcagtattaactgactagcccagggtcatgtaactagtataaaaccatgtttgatggttccttttccccctcactttatcttgtattggattgtatccatcaagataggcttggtcaagggttagcaaagctctgtgaagagccagataagtactttgctcctcaaaggccgcctcatctggttcctgctacaattactcaatatgacctttgcagtctgaaagcagccacagaggacaggtacagagtgagtggcctctgtccagtgagccttgacttgaacaagcagtgggcagccctggagttgagactgtagactccagagttggctaggacatagtgacagtcaaaccctaaagctcactggcttagtacagcagaaggaaacattttgttatcttgaaggcagaagggatcagagggaaacccacagcagggctttagagccctctgcgggggcttctcagcctgggcttctaggttactgtgcagcttgtcagaagctctggggagggcagagaaacctaaaagcatccacatggaagtggcaggtattgctcacctcttttcattcacacaagttcaaaaatggtgaccccttgttcttcccacaagcacagtcagttctgcccctccagtcccctctaaagcgccaagtctgcaaagccaggtgctctcatagtgcagttctggggttgttctctgggtaccttatggtggtttgaatatgtttggcccagggagtggcactatttagagatgaggcctttttggagttggtaagaccttggcagaaatgtgtcattgtgggcatgggctttaagagaccctccctccttctagccgtgtgggagccagttttctcttagcggccttcagatgaagatgtagaactctcagatcctcctgcaccatgcctgcctggacactgccatgctcctgtcttgatgataacagactgaacctctgaacctgtaagccagcccgattaaatgttgttcttataagagttgccttggttattatgtctgtttgcagcagtcaaaccctaactaagacataccccacaccccaaattcctttctgagtcacacctcttgaatgttcagacaagcctgctccatggaggtgaggcagaggatgatacagaacaaagaataagtgactcttgcacacttgcccaagattgtccaaaatgaaagaaatcttgatgcctcttctcactattgtgtgtgtgtgtgtgtgtgtgtgtgtgtgtgtgtgtgtgtgtgtgtgtgtttgtgtgtgtgtgcaagttctcagtgtccctgcctcatatggactgttacagggaccccacattgagtgtgcagctgggatgttagctcaagggatgcagatttctaggatggatactgctgggcttagtgtggagaagatctcacagaagccagagaaggctgaccttggtgatgacagacagaaacatattacggtgaccatcaaagccagccagggtcaaggagagccacatggcaagaaagggtgagggatatagtcctagt

SEQ ID NO: 31501 - DNA, 1855 bp, Mus musculus
tgtactttgtgtacactgtgctaaaatactacttcaggttctgtgccaccatgtcaagtagcacagtatgacagtacctttttgcagggaaggatacaccctgtcttatctttgcaaatgtgtctttaaaatcccaaactaaatctttaatctcagcacttgggaggccgaggcagacagatctccagacctgcttggtctacagagggagatccaggacggccagagctacctagagaaaacttagcatgaaaatgcaaaaaaaacattcccagccaagtgggacgcattgactggtcacacgtggtacctctggcctttcttttatttatttatttatttatatatgaaaccccactttcaactaaagggggatgggacacactaggccatggcatcaggctccttgagctgcttgccagagagtgaggtggataatctactccccctgcagaggacaggaggcgcctagcaagcagacgacgttcttcctgttctgctgtagatcacttgtacagtttcattaatgagcttccagagaaagtccagactgagactgtcatgccagggagcctggcgtgttcttggcttactgaagcagggcagcatattgtatcacgtggctttgctgtttcctgcttaagacctttcctcaccattctgtatgtatgtgtacgtcaaagaaaacaccagtgacttagttcttaatcctcgcctcaagacctgcttcctggaggacctcaagtgtcttatggatctggcagccatgcactcttaatggtttgaccttacacatgaatgatatacctggtctcttcctgacttgacataccacaaaaacttggagcatttgaaaataccattatcagttatttcgacataacaatttatcaataattaaggtttcatttgaggttatatttgcatgacatgggggtaaattttagaatctggattaagattatattcactttaacagtgaggacagctatgactgtttatgcaagtcccatgtctcagcataacaccctgtcatgcattctgaactaacttccatatgctatatagtggtctcccttaattctggaggaaggagggtcattagctctgaaataacttttttttaaaagaaaagaaactacaacaaattcctctctaggataggcttttgtgcaccctgaccaaggaatttaccgcagccccagactccacccttccagctttctctgggtcacagcccctcccatcagcccagcccctggcagctactgatacagttttcctcttaccatctctaaaatgctgtgcaggtgaaattaggatgtgggcttctgagtggggtttcttgtttggctactggctttaaggtctgtgttacaaaatggatcgacaggtctcgcttccctctgttgctgagttgctcttgtatatggttgtctcacactttgcttaatcatcaaccagttaaaagatatttaggttttctgtaggggttttttaatttaaattttaaatataaattttttatatagcattttatgtaaacatctttccttccccctccccttggagtggaatgctgccgtgtatgtttaactttataataaattatcaaactttgccaaacaggtgtactatcttgtattctaccaacaagaaatagcaattaattgtgtgtgtgtgtgtgtgtctgtgtgtgtgtgtgtgtgtgtgtgtgtgtgtgtgtgtgtgtgtgtgtgtgtaaggtattctcagaagtcactgtctactttgggactttttttgttttaattggttgattgggttgggtttttgttgttggtattttgtttgtttgtttatggttggttggttt

SEQ ID NO: 31502 - DNA, 2587 bp, Mus musculus
tgtagattttaaaggttgaacagacatccttggatatctgggaaagctgagggttatactgactccgaggacctcaattcaggatctctgtccactggcctcccacactagaatggtgctctttctctaggacacacttcaggctacatggaggtgctaattacttgtccttagaactcactcaggaagttgctcctcataacacatcaagtccacagcaagtttttgctatgcacagtagttttctctctcatgtatgaacatgtggagggaacttttccctaatgaagtcccggcagatcatgtattccagcttgcagctaattttgcccaaactttagtcaagttgctctgcactccagtgatggctttttctctacccatcacattaacagattcaaagtgcttcttgttgtgagacccccccactccacccccgaggaattcttccccagaatatactgggtcagtgtattgtccagtgtaagaaactggaacagacagttaggaaccaaaagaggacaaagctgggacaggtacagaatgcacccagtctggacggtgcaaagaacacattgacaagcagcctctggaggacactgccaggtagggtcactgcgtgagttctgccacggttaggagttgttcctgccacctgccctgttcctctaccaggaattggattgccaacacctagtgaaaaccacctttatcattggataactcataactaactttcattcttacacactcgtctggcttctgtccatgtcacacaatacaaaggcctagtggaaggacacttcttttttaaagtttctagtggtctatttagtattcttaagttatattttactttagaaacatacatgaatattttctcaggtagctttcctgaaattcccatggaaaggcaccctgcatgtttcttgattgtcagtctcagaggtagcccgcctaaggatttcttatgctatgtattttcctcctttttttttttttaaatactcttacagatcaccattgcttcattttccaatttatgataacatgcgttgatgaattcttcctttggcaaatgaggatttagctctcagcctacccactcactccacagccctttgcagcctttgatgaagttactagataagtgtggtcatcacgcgcgtcgtgttcatggctgtgggttctttctggccttcctctttccttaacgtttttgcctcattcatttggccattttctgttgattatgtcacaaattcatcttctccatctgatagcattataaaccgtctcagtgaatgatgcgccctttgatttgactccttttctggagcttctttaaatgccccagtcaggtgccaggtctcgttggtagggctgccatgctagagtaccacagactgagggagaacatctataggaactttttgtgtctcatagttttagaagctgggaaggatagagtcagcaagaatttcttcttgtagatgactggtacttcactgtcttcttgcggtcttctgtgtcttaacatctcctccactcgtccctccccccctttccttttttcccttatgatacgctgagatgcatcgccagctctgtcttctcaaagatgccaggtcattagactcagactcactgtggagacctcatttgcctcttgaaagactccccaaatgcggtgatatttcagatactggggcttagaactttaccagcaatttgaggaaacacaactgtccataggaggcaaactggctgttccttacacgtggggcaaagctcccatctgagctctcttccctcttgtcatttatttcttagaacctgggtcccagggttctacttccatgactataatttcccatttgctcattatgtccttcagcagcctctcagggctgggagggtgtaacagccgagccacagaagtggatctgtttgcttctctgctcctgtcctttgatgagcagtaggtaggcacttttcagagtcctagttcatggtgttcagacggttgctgttggctgttgaaaccctgtctcctaatctcagatctttgggacctgtaattcttctcttgaagtcttagggtctttatctcacatgtcatagtgtattttctatccaccatgacatataccagctgagtcctttcaatatggcaaattgtaagaagtttttatttaatgctattatattagcattaatccctaaccctagtgcagcttctagtaggatgttggacttctttcctgaaattacatctgatttaattatctgtttttatttttatttaaccttttcgtgttactatctagcacttttcttctgatacattggggttgtagatgctgggattgaccagggccttgagcatgccaggcatgtactctgtaattgagctgtgcctccagccttcttcagacctatatatgtcatttgtataaacataataaaaatacaaaagataaagcattttctgatatttaagtatgttacatgattttttaaaaacagacacagggcttcagtatattccgcaggctagctttgaactccagggctccagcagtca

SEQ ID NO: 31503 - DNA, 1223 bp, Mus musculus
gctagatcctggaacactcagtggaaggaaaaagccaactcctgagagctgtcctctgatagaaggtggactctgctggccaggaagagagccttaccaacacagaggcctccagcacttgaactcaaacttgttgcctctagaagaaagagaaagtgaatttctcttgtgtaagccaggaaatcaacagttttctttgagcagcctaagctaagatactgcctcatgtagaacttgttagaaaaaagaaaagatgagaaaatactgttagctttatttcattcaaaacatttatgtggatctttcaaagaaaaggccctttgaattatttaattttataaaatcaagtaaacagatccccgccagatcgccgccatcatggacacgagtcgcgtgcagcccatcaagctggctagggtaaccaaagtgctgggcaggaccggttcgcagggacagtgcacgcaggtgcgagtggaattcatggatgacaccagccgctctatcatccgaaatgtcaaaggccccgttcgagagggtgacgtgctcaccctattggagtcagaaagagaagctcgaaggttgcgttaatcttgcagctgggttctggatatccactacttagcccacggaatgatctgcaactgttaaataaagcatttatattaaaaaaaaatcaagtaaatacacgttacttaacatctaacatcgtgtgtcagccatgctatgctgagctctgagggtgtggacataagcaagatggccttgggagctgataccacaacctagtgagagaatgaaaatatttttgcttcactatattttatatagtgaataaaatggcaaatagtgagagaacccatgtataaaaatgagaaccctgtagctaagacggactggaaggcctgggaagatagaagaagacattcaaggagctgagtaagcagaggtcttctgggtcgcagaccatagactcttgtgttgagtagagatgttcagtttttctccctagagctatctcctgggacaaagacatgtggagctgcagtcgcaaatggttcatattcaagagactgtgtgctagctccattctgttgctgtgataaaatattcagacaaaaagcaatttagggaagaaagggctgttcagattacaattccagcttgcagtccatcattgagaatttaagataaaactcaagtggccagtcatataacgacagtca

SEQ ID NO: 31504 - DNA, 1593 bp, Mus musculus
tcagtgcttagtctgagccttcccagtggcaccttctgtttgaaccaagagagtgttagacttagtactggcagagacgatctgtatcgagcctgtagcccaaggcctggcatgggaccaatactcagacaacagaagccagcctctcagccttctctctcttctcatcacaggaccgcctggcccgctgcaccatgcattgcaatgacaaagccaaagactcaatggatgcaggaactaaggagcttcaggtgaagcgacagctagacagctgtgtgaccaagtgtgtggatgaccacatgcacctcatcccaacaatgaccaagaagatgaaggagtctctgtcatccatagggaaataaaattgtttgccagtgaccatcgggactgcgggcaggctatttaaaaggaagaatggaagtttaatatgttaagcaacgtttacgaatgaggaaaacttagacacagcaagttccaggcaaatgctgctcactgctggacactagtccctttacattcggatcttagaaggtgaagtaggaagaagctggtgctaagatttggatcacagatagctcagaggagaagtctagatcctaaatattcatatgcaagtgtctgtactgtagtagagatcaaccttgtaccaagagctgagcttcttactacaaacatccaggctggcagctctcttcaacctgctggtaaaatctgaggatcggtgcatctcctcagagaagcttgacaaatcctgttgaccagaagtatcatcacaccaccttgcatatgctgggaaacaaaacccagtaggctaggaattcagaggaaaggatttccttttcaaatctatattttgcttagttttgtcttatatgcagggcacactggatttatgatacaggagggaaagtggtttgagtcacttctaaaggttcctagtattatgtaccgtcaagatgggaatgtccatttcttcaaattctgttactctagaagcccctgaagaatccggacagtgtcacacagtgaacatgggaaacagccttctttactgacttgtgcagcaaagtgacacatccttatgaaaagcaagggggtaggctgtcactcacatgccagtcgctaagaataagcagtaactaggaattattgagaagtgcaaacccagtattaatcagctctgaatctacagagccttatagcaacaagaaagccagaaactgagcaacttgggccacagatgggtaggaccactgtagaacaagagaggcacacactttcttgccaaatgccatttttgcctgggtggtttttattttttattttctttgcagtgcagtgttgctggcccaacatagcaccttatcttttggataagtactatgttgtatttataccaattaattacttgaaacagtgatacatctgtctttttgctgtgtcaagcctgcaatatattttccaagtggtttggtttttaaataaagtttcattgtctccacctttttcttatgggtagtgatatatcagtaaatgggaaacaccaagaggaaggcagagagcatcataacttgaaagctgttaatgttgaaa

SEQ ID NO: 31505 - DNA, 1588 bp, Mus musculus
tgaggccccgtgcatgctgggcaagtgttcccctcttgagctgagctatatccctagccctcctttgtggtttttcttttgagactgggtctcactaagttgtccaggtggaatcctcctgcctcagtctccggagagcctgggatttgattccaggccctccacatgaggcgtggctggataactggggaaacattggattttcccaggcttgtctggttttaagagtcacctggaacttcataaacatctgggttaggtcattgggctggtgtgggcctgggtttgtttagattgtaatcttttcttgtctctcttttcttctttgggggatgttacaactagggtcttagtctgcaccccaggctggaactcattatgcagcccaggctggtcttgaaatcacagcaatcctcctgtctcagcctcctatgtgctggaatacagatgtttcccagttcctggcagtttatactcttttgatgagaatgttctcaaagcctgaagtcctgactttaagaatgtgacttttgattgcttctgcctcggctttatcagggatagattcagagatagaagcagagatagcctgtgatttggaaccaaatatataaactattaacttgagaaactatttaatatataaactattaacttgaggaggtctgtttttctatactgtggggattgaacccaggaccccgagtatcccagacaaatgctctaccactgagctacattgccagcctcaagagcttcaggatcgacatccagagaatggaatttcctaggttgaagatggggtcttggctctaaagctttgtcaagatcaagttcctcgcatgcagccaagggtgagcaggtcctgggtgtcagatagagagctttgagtgccttaaaagtgctaagcaacacaaatcaaaaccacagcagaccggtgccagaggtgactggctgctcgatggttaatcagctgtggtctccaagggaacgaacactagagcagaggcggcctgagtgagcccagagcagttggccttagaaccaggtcttcatggctgcgtgagttcagagggacgcgtatcagatgctgggcatgcgcagtgaggggccgttgctgaaatcttaatacagtggcgctcagttgtagctgcacatgggagtcagatttctcttacgtagacaagctcaagaaatctggtgtttagtccactgctcataggtctccagtgactatcatagccactagtattaagagggaaaaaaagtaattttgcctgctttggtggtacttgcctgtcatccatacctttgtgacaaagcgagaggatcaaaagttcagagccagcctgggctgtggcaacaccctatctcaaggaataaaaatcaaaactcttcaccaggttatagcgttgcttcaataaagcggtcttaaaaagcctgattcttaaaaattatttttccctactctagctgtaggaattaataatgtgtggagaaagcagcggtgatatatttgatatggtgacagaaattaaattcatagtttaatcagaaggttggcttttttctaattcatttagagaca

SEQ ID NO: 31506 - DNA, 2161 bp, Mus musculus
tttgtcctgccttatgaaatatctgtaaaatattcttaaatgaaaaaaaatgatgttcacttagattgaaaacttttctcagatggaccgataattgcattcatcttgtttttataagagaaggtgcctcaaggattccctgttggatttgtttaaaaggactttttatcttctgtgataacctttgccatgtaccaggaactaggaaaacaagaaacttgttctaaagagatctgcaatgtgataagtcctcgccgcatcagtctcgtgcgtcagcatttatgtttacacgcattgttgtctaagatacttcagcaagtcatgttgtgcagttagcaaactttgtatgtcatttcctcctacaggtgtcatgaagagttgacgtaagacagattttacatttgcatgtgaatatcacatacatactttggtagtctttgatacaaactcatctgctcttctttttcaagcattttgagacacaaagttgtatgtaaaggaatatattaattagattttttttagttagatttactttaaaaagtaaatccactttaatgtgtacaaatgatagctgtgaaactgtagagtttttctctgtcaggcttgggattcactaagaactccaaaactagcctgaaggaccagccgggcaaaacattttttaaatattcagaggccaaaatatgagcaaacaaataaaaaaactcttaaaagtcctacctccttaaacagccttcaaggcaaagcccctgcgcacaggcatggctttggtcttggtccctggtctcttggagcccccatagtactattgaggtttactcttcactggcgttgttctagccttggggttcctaatatatttcagagtctcttggtttggtgtggttttagtgatgaccacaccttctcctcacagtagagaggaaggagccctgtgcactgtgggtttgaggcctgcagagagctcccagcattttacttgggcctatggaattggaagcatttcctggcctgtatctttcaggtaggagcacacaactctaacctgttttctaagccagtccccttgtacaacagagcccaggaagacagtctcaaatgtgtgcttctctggagctcaattctatgcagttgtgctaatgtttcattaagtcactgtgtatttttaagtactaaaacattgaaatttgctttatggaagatgaataaattttttaaatacttggaattttatttctttgtaaacttctacagatcaggacagacaataaaagcagcttaaataaaatactaaaaacaaaaagacaaaacccacacaccaggatgctatctttaagtttttctggatttgtctctattttagcatccttagtatatgtctttgtttaagaattttacttcctttgtaactttaggctgcaggatcttttgggcacaagtaatttattgtgtgcaaaagtgtagtttctctcttcttttgactctttcaagtactaaggacttttattagtagcatattcttattgcacagatcttaaaattcatgttgatttgctgttaagaaggtggtggtgctgtgttcctgatgaaagactgacatatcaggaacatagctgttgttagtttaaataaatcatttaagtcatttctcaacctaaaaaacttcatcctggtataagtatcaggtaaggaaatgaaggtttttaaagtgaacttccttgcaatatgcattcaggttttattctctggtactgtaaagaacctgagtgactctcagtgggtcatggagccagtattctttatcctgactgtttggatattaaaattcctttatgttttatatgacctgtggggtcttcttgcagtgattattgtgtgtgagatttttcccccggcgctggcgtattcatattatattgttaacactcaggttcaccttatcccagaagccatggtctgcatgggttccagaggatctgcactctgcagacttagccaactgtgaagtcagagtttggtcttcctggtgtaaaggagactccccgtctagattgtccttctcttgcttttccctgtgctcatcttccttttagatttgtgctagaggtccctttcattgtcaggggactagattacatctacagaaggagtagacaga

SEQ ID NO: 31507 - DNA, 1853 bp, Mus musculus
taacgagcccaactcccgaacgccgcccgccgctcgccatggacgccggtgtgactgaaagcggactcaacgtgactctcaccattcggctgctgatgcacggaaaggaagtaggcagcatcatcgggaagaaaggggagtcggtgaagaggatccgcgaggagagcggcgcgcggatcaacatctcggaggggaactgcccggagaggatcatcacgctgactgggcctaccaatgccatctttaaggccttcgccatgatcatcgacaagctggaggaagatatcaacagctccatgaccaacagtacggcggccagcaggcccccggtcacacttcggctggtcgtgcccgccacccagtgtggctccctgatcggcaagggcggctgcaagatcaaggagatccgcgagagcaccggggcccaggtccaggtggcgggggatatgctgcccaactcgaccgagcgggctatcactatcgccggcgtgccgcagtccgtcaccgagtgtgtgaagcagatctgcctggtcatgctggagacgctctcccagtctccacaggggagagtcatgaccatcccgtaccagcccatgccggccagctcgccagtcatctgcgcgggcggccaagatcgctgcagcgacgcggcgggctacccccacgccacccacgacctggagggaccacctctagacgcctactcgattcaaggacaacacaccatttctccgctggatctggccaagctgaaccaggtggcaagacaacagtctcactttgccatgatgcacggcgggacgggattcgccggaattgactccagctctccagaggtgaaaggctattgggcaagtttggatgcatctactcaaaccacccatgaactcaccattccaaataacttaatcggctgcataatcgggcgccaaggcgccaacatcaatgagatccgccagatgtccggggcccagatcaaaattgccaacccggtggaaggctcttctggaaggcaggtcactattactggctcggctgccagtattagcctggcccagtatctaatcaatgccaggctttcctctgagaaggggatggggtgcagctagaacagcgtaggttcgctcgtaacccccttcctgctgtttcccatgatccaactgtgtaatttctggtcggtaattccaggttttaaataatttgtaagtgttcagtttctacactttatcatccgctaagaatttaaagaaaaatcacattctctgttcagccgttaatgctgggatccatatttagttttataagcttttccctgtttttagtttcgtttgggtttttttggctcatggattttattttctgtttgtcgataagaaatgtaagagtggaatgttaataaatttcagtttagttctgtaatgtcaagaatttaagaattaaacaaatggattggttaaaaatgcttcgtatttgaaagctgggaattcctatcttaaattcttcggttgctgctttctttcccttccctgttttaagtatggggtgcttggcggccagggggagaagggtggcccgcccttgttccttgcaagcttttcttgccttatcgctgagattcccctccctctgccccaacaaaggaacggcaggttgggcctgctttgggatgtttacaaaagatgggtctcttcctgggagtgacatatccaacctagttccagagaggcctctgcctttttctctggtggaagatacaggtttttctcgggtggaaaaactgcccgttcagcaggacagggtggatggagagcgtctagcccgttgtccgctacccccatcccgcggggcaaact

SEQ ID NO: 31508 - DNA, 1134 bp, Mus musculus
tagaaaagtatcaaactcaggacctcccagctaatctattttttgtctcaggacatttatttgaattaccttagacccttgactttgttgggttaagagacttttgtccccacttattcttaaatgtttgcatctatgggtttgagaagggatgggatgattcttcactcaattccctgagatttgggtgggagctgagtgggtagggaccacaattttctctctctgatccagcaagtatagtacagctatttaaatttgctaacatgtagtgttctgttttgttctaaaaacagtttcaactttttcttttcacccttcagttttatccaccttttcttttgttattgttattttcttttattgttgttttgaaataaggtctcacgatatctggcttaaaattgtagtcttcatacctttgtctctctctgaagtgctgtaatctcactaaactgcttctttatttatttcttacttatttttgagatggacaaggtctcattatgtagttctggctggcctggaacttgctatgtagatctgactggccttgaactcacagatattcatctgcttttgcctccaggatgctgggattaaaatcctgtgctaatatgtcacattcacttttatttgtttgaagatttatttgtagctgggcagtgatcgtatctggcctctaatcctatcacttggaaggcagaggcaagtggatctcttagtttgaggccagcctggtctacagagtgagttccaggaccacaagagctacacagagaaaccctgtcttaactaccccccccccccccaaaaaaaaacccagcacatctttatttgtatatgtacatgtttgtgtgtgtgtgaatgtatgctcacatatgttccagtgtttgcagaggccaaaacaggctgttagatctcctgtagctggagttactgattttttttttttttgggttattccagacaaggtttctctgtgtagccctggtctgaactcactctgtagaccaggctggcctcgaactcagaaatccacctgcctttgcctcccaagtgctgggattaaatagttacagatttttatgagcctctcacagtggatactggatccaaactcttgtcctctga

SEQ ID NO: 31509 - DNA, 1932 bp, Mus musculus
gaggagctggctctgccagctttagtccttagtgccaccctgtgacccaggagctaaacattgaggaagatagaagtaacaagcgcatgcaggcagctaatgggctggctggatgggtgcagctgtggcgagtgcttcatcctgtgctgcttcctcatgcttattttatccaacagctcaacttactaatgttataagatggggctatctagttgtcatcaaactcactaatgtatttgtcttgtaggagcaagtggtgatgaacttggacagcagacttctgatcttccctctgtacatctgctgtaacttcttgtatatatcaccagaaaaaagaactgagagtaatcgtcacccagaaaacccaggacactgaggcactcatcagtggccagttttaacttaatgacctactgcgttcacgtccaaggtgactaacagtgaccggccttatgaactgtgggaccctggagatgtcctcaccctcattacatttctatgcacatatgaaaaagttttttaaaactgagaaagcatctgtcaaaccatgttaaaaggatatcaactcttgctttaatttagtagcagtaaaaattgctgtaggtaaatttctcatttctttgcaacaagatatagatttaattttgagcttgaatttcgatcctatctaatgttagtgagtttactcatctgtaaatgtgttcctgttttgttaagagaatgctaaggacggagtttaagtggccaatcataaatgctctttcaattggtgcctttaaagctgtcctttcatttgttcagccacctggtgaagtcttgtgttcagttgagatcctttccagaatcttcttcgttttagccatcagatcccttgtcatggtttgggagattaagcttaagagttggttttgtttcgtttttcttttttctttttttattctaaatataagcattttcatatttttttaaactttaactttcctacagttttaaatgacaacaagaatcagcttgaggacttgaaataaacttgaataagggaaatcagtttgattctgaggatattccttcgccttacgtgcatggtcttgtctggcattctgtgtactcttatgttatgaattatttatgtacagatacatcgtcacacattttcatattctctgatagttggaatttatgtcaaattttagttgggaatcttgtttcctattaagctcaggactttataccctctgaactgagtgcctttgagtcacatacataagtagatttcatggtgaatgtacagggggagctgggaacaaaacagtcgtgttagaacaacttaccttgtcaagaataagatgtatgctcatcccgatctgtatgtgttggtcccttgtgtttattgctattgaaaatagcctggatcattgtcctccagtcagagtaagtgtttttgtggttgatgtatgtttttagtatttttttaaattggaatcatttttatgtatctgttcaaataataaatgctcatttggaaaaggaatatgctcctgtttaaagtgaacttaaaaagcttattgaaactagtttttttagttttggggttttttcaagatagggtttcaagatagccttggctgtcctggaactcactctgtagaccaggctggctttgagatccacctgcctctgcctctcgagtgctggaattaaaggggtgtgccactatcacctggctgaaactaggattctttttttttccaagtaattgatcctttgtgtttgttttcttttaaagcagaattctgttacgactaggagaaaagacagccgggctggaaaactgagtcagcggcttctggggaggagctagaaaagggagagaaagcttgctctgagttaggtcccaaggcaggcagcctcagctgtggaaggctgcaggac

SEQ ID NO: 31510 - DNA, 1175 bp, Mus musculus
gatgatgtaaattcagttcccagtgcccatatcaggcagctcaaaactgcatgtagtctccatcactgatgtaagttagaaggctgaatagctgtccctgtcctggtcaacatgtgaagaccctgacatagcctctgggttccttgggaagggattctagagacagagtctcatacaagtcacttcctcaagtatacctctcttaccatgctgtcccgtaagagcaatcacaaaaataaaaggacagctgaagtcccaacctaaggacataattattactaaaattaatttgagagatctatcaaagttcctgtaagtttcctcaaatcttagattcattctaagagtgttgaaatccttggaaatggcttacttacattctagcaaactgtgtctatgactatccatagaagcatttagtaaaacagcacatttgacaagaatgctgtttaattaaaactttcttaatagactttgaagggacgactttccttgaaactgagcagggaaaaccatttgcgcccgtgttcagacatttaaggctacagtacattatcagtgatctggcttctgcaaggatcattgagcaggattctctggtaccttcaggtaagaaaacctgatgtgttttgtgatttaaagtcatgtttttctgattgtagcatttcatacttgcatagggaagaaaagtaaagaaaccaggaagtcctctttgatcccttaaggtaagtgtctttatgcccaagagatgggcatgtgaatactcttcctgtgctcacctctcatcctgatttatctcccttatcatatttcagtgttaaagtgcttgccaccatagttaagtggctaagaagcattttgcaataggatatttgtttttcttttctgtatgaatcaaactgcctcagctgcatgctaggccctgctggtaagctgtagtcagccccagcttgaagcagttcatctgctacttctccttcccaagtgccgccgtcagggtgtgcaaccacacacttggctctgggtattgtcaggttggttaaccagtgagctgctttggataacagcctgacaagtgagttttgatatttttttaaaattacagctatagctttttctgttagttttctttaaatttgcttagtttctggtttttcttattctgaattcttaaa

SEQ ID NO: 31511 - DNA, 1177 bp, Mus musculus
tcttgctctctctttttattagcttttgtgtttaatagtatttgttagtttcagctgtcagcctgacaacccaatgttattagtgagggaatctgaattgaaacacagactttataagattggaagaacgcatgcgggtcattttcttgattgctaattgatattgaaaggctgttattagttgtcagttcaactatgtctggaattaactaaaatccaagggtctgggtatgtgtgtgtacctatgagggagtaagccataaaatgggaagacctacttttaacctggatctttttgagacaagaagatacacccttaatctagatcttttgaggtgggaagatacacctttaatctgggccatgttctctggacagcccatggactgaacagctaactactgtattcttagaccttttgttggcagacagccattgttggactggctggacccacaaccagtaccctattctaataaattctgccccctctgagtgtgtgtgtgtgtgtgtgtgtgtgtgtgtatttcaccccatgtttggagtccgtggtttattgtcagggttttctagagcatctgtgggcatgtgtctgtgttctggagaacctgagtagtaaaacactggttccagacacaagatgaaacagtaactgataaggtctcatttagcccaggttggtctctcattttctgtttagccaaggctgaccttgaaatcttgatcttccttcctgtttaagagcactgaggttataggtatgcaccatcataaccattttctttctttcttttgctgcagtaaagcaccaggacaaagttcattttagctcacagctccagctgacagtccatcgttgcagagaagtcagggtggcaggaactcacagctagcacattgtatgaagtcaagagcagagagcagtgaattaacacatgcagactgcttgcttcctccatgctcacagtttagaaaccctttttagggaatggtactacccataatgggcaggtcttcccaccttaatttaacataatcaaggtaactcactgacaaacccacaggccagcccacttcagacaataaatgtctacttgaaattttactttcaggtgaatctagattatgtcaaacaaacaaacacaaacagaagagtagatgggcagtgataaagggt

SEQ ID NO: 31512 - DNA, 1102 bp, Mus musculus
cagtgagctggttaacctgcccacacacatacagaaaaataatgtaatttaaaaaattgttttaaaaaccctggggtttcatgtgaggtcagatatggttgaatcagcttgagctgtattttactccttaggttgaattaacgttggcagacagacaatggatggcagtgccaaccggagcgttacttatgacttgtgaaaagctgagaggttatcgctgatggcatccctgtgttgttgagagggcagagcactacattgatgccagattatcaactgggattacagagatccaaaatatcgacgaaagcagttcacagctgtgccagttgcttaatgtctgtgtacagggtcattcagaactgttgccctgggactgttgggtgaaggaagatgactatgtttttggtactggtgtgaataggaggtttagtacctatgggaacagggaagagatggactcgggtctgtgggctgtgtggggagggtggctgctctctggctcttgctgactcagccttttctgattggctcatctggccagggcccgaagtgttgcttctatcacacgttttaaaacttgcttagttttccccagatgtaacccagtcctattcctcaggcctttggcctttttttcctttaacattttggaaactttgattggggtgaagtggggacaggttggtgggggctgtgctggaagagatgattctgttagggcatttgactatggaaaactctaggcttggccagagagtgtatgtcgctcagcagtgattgggaaagttgattaatactctgtctgcccctgcctgccctgcagaagtagagggggtgcctctgtgttttcctttgcacctttggctagcatagtggggactgaggtcacaaacatagacgacagaggtaggcagctctttgcttgaatcctagcttgtccctgtgatgttgactgactcctaagatctactgttctcttaaaattcaaaacctgggtggtttttgtaagattagctgaaagaatttatctagagaacttagataaattggcatgttcttggttagcagtctctgagtaggtaatttttcgtatttgatt

SEQ ID NO: 31513 - DNA, 1100 bp, Mus musculus
gaggtggctggagagatggctcagtggttaaaagcactgactgctcttcctgaggtcgtgatttcaattcccagcaaccacatggtggctcacaaccatctgtaatgggatctgatgccctcttctggtgtgtctgaatagagcaatggtgtactcatgtacataatataaataagtctttaaaaaaaagaaagaaagaagaggatgtgtttctattcatttcctgttgagtattggcctgcagtaagttataactgtggtgctcagtctgcatttgtgatagtggtcataggggcaggaagtagctattagaagtgtatagatttgctgaaggtatagccaggaagggagggggagcctcagagagagtggggtttagttgtggagacagaagggactaacaccgaagagcagctgagtataaagttagagaggtagcatctgaactcagcgaatgcgccaccagagcatggcacacattgctctgttcctgcagggctaggagagggaaagagagatcagcagcggacctgggctagtggcttgcctggtgagcgtcatctctgtaggacctctgaccagttgtggtgattcacttgtaaaaaggtgttttgtttgtttgtttggttgtttttttttttttttttttttttttttggtaatggagatttttctcaaaaggtgatgtagtctttctgctttgaagttttgaacgcatagctcagagcaaatatcaatgcattatttaagtggctgtgttcttacttaggaattacagtgtgatttctaacatgatggaatgtttcaagtcttagggttggttcatagactacgaacagataactgtatgaggccaggaactgggtagttggctcattctagcagactagggcatattctcctcctctctgagtttgtggatggtcctaaaggcttcttctaactcagttgtttttaagttctaggatttctgttgaggcaacttgggagagagagagtgggatggggttgattgaattgaagggacagatctgtgtagctaggattaaaacaatattcctgatttgattattatgattatcattattattattattact

SEQ ID NO: 31514 - DNA, 1118 bp, Mus musculus
taattttcatgcaaaccgggaatttttttattatgtgtattgtctgcatgtctgttcactgtgtgtgtgcttggtgccttactgagagctcctaactacagaaccacctctcctgcctgtgcccattgttttggaggtctctgcactgtcctaagggtttctctaagtcttggtccttataatctctactaagttaaaactcttaacttacttagtgcctgaagattgcctttatttaaaagtttttaaaaaatcaaaccctcaaataagattctaatggagaaactgctcactcatcaccagacaattgtcacttcgaaaagtaactaatgtaaaaaacatcagttctgagagttgtaacctaatgtaataaagtcattactatacccacttaccagttcagtaatttatagcatggaaaatgaaacaccaaagggaaatggggaaatgatatttttctgagttgctcctagagaggcttccaaaaagaaggtgacatttatactgacgactaaaaggcacgtgattgtttgctctttggataagaggcggggatcttggagagctgctatcctgagagtagggcaagggtttgaaagtatggtcagtgccactacagaggtgagagatgcgctggctgtaactggctggccatgaaaatggggccctgcctttccagcagtgcagttccctgtctgactctctgaccgtgttttaccctgttccttcaagtgtctttttcttcaattggggtgagtcctgttaagatacatgctaaagaataacttctctgtgcacaccagtaagactgtaaaaatgaaaccttttattatgtgactgtgaaactagcttttcccattactaagtggcatcttggattgggtggtttgggaatgtttttcaggttgaaaatatcctcttgcatgaccgaggccactatgtcttgtgtgactttggaagtgccaccaacaaattccagaatccacaggccgagggagtcaatgcagtagaagatgagattaagaagtaagccttttctcctttcctggagttttctcctttgtcagataagcaccttttcttttagtttataggtgaaacagagtgggaagaaaagg

SEQ ID NO: 31515 - DNA, 6083 bp, Mus musculus
atttttcttttttttctgcccagaaacctttttaatccaggaatattttacccctagttaacaggggctatattataccatgactttgaattcctacagctcctgttggagtcacttgtattgaagaattaagattgatccctccaggactcatcaatactcttggaacagagaagtttctagaaagaagagcaatacaaacctactgcacatctgaagaagttaatcttttagctactcatcattcattcctatggagccagcacctcgcaaagcactctgggatctgtcaccaagtctgtaggagccaagctggccctgtgcacaagtgtctgggtgcatactgtgggtcagactctgtgtcgagtaaaggaacacacagatgggagcagcattctgcctcccacggtctacatttagactagtgtggacgcttgtatgctcatgcatatgagaaactcttgtcctttgagtgaaaccaccatgcctacctccattagcgaatcactcgtttttcttgcatttgcctgttgacctgacttgaaccttggctttattagattttttttttttcttctcatggtagaattgaagttgttggacaatttggggcaatcctgctggaactgactgaggtgtcagagtgaattttttaaattccatttacctggttttgaaaaaatcaatttcctaaaactggacatggtagatacctaatgaatgtaatcctagcacttgggaagctgaggcaggaggattgccacaagttaagagattagtctgggcttaatactgaattccaggtctctatatctcaacaccttctccttccagccaaaaaagtcatcagtctttgtgtttccctggcaacaggggaagagaatcttcagaggtccagccacggggactcctgcctgggtaccattgttgtgaaattcattaatcaggagcccaagccacaagctaagtttgcctgttatttctcccaaacccttcccatacacctctactgcctcttaagtgggtacagacctgagacccggaagtaaactgagaatggaaaagagttggtcagttgtccttgcaaatctttaaatgatctgtgcctttcagatgttccagtagagcagacaggtgactggctgcgtgttcaggagtgtgtttttatatctggacggctctgaccattcctagtggttttcatgtcctttatttttactgccttagaataaaccctgactccatgaggcatccactgaggaaagagttgcagcaaacccaggtgtgcactcatggcttctcacagacactgcttccacttgcctgcggaagtgtggagagctgtgtgttgcgctggattagtgatggaagaaaggctagaagctaggcacagtagcgtaccgctgcaaacagggcactcgggtggtacagaaagaaggaattccagggcagcctagactgcacgacacactgtcccaaaagagaaaatccatccagggctaaagcctgaatgccaggctgcacttgcaatcacttagttgtgatagccttaaaatttgaaagtcagggtttgggtgcacaaggcagcagcagaagatatgcttagcttgcacaatgccctggggtctgtcgtcagtacacaaaaacaatacagttaaatctagaagtcttgacggtaatataagaatgactatttttttatgatatcaggtacttttaaccccagaacttgcgaggcaaggacaggtggatctctgtgagtttgaagccagcctgtctacataacaagttccagtccagccagtgagtgaaaccctgtctttagaggggggtagggggctatttttccctcttttcttcatagcattctccacctgtttcaataacaggcactgcgtcggggcccatagcagcgccatttgaggactccaccccaccagaaacctgcctttcacttcagtaaaggttaaacattttctttaggaattttctttctcacaattattattttttaatttcctgtataatagtggatacaaaattgtctttctattaaataagtagtttgactaacgcacatggaactttgcaaccaaacttcccaagcttgccgtcagatgaaggcctccaaggcacttgcagaaaggatggtgatgttcagggagcccttgcttaatgtcatagctcctcccaggttgcagcacatacctgtagtcccagctgcttaggaggctggggcagaaagactgcttgagcctgggatctcatggccagccttggcaacacagaaggacccatctcttgatgagaaacttcaaaatgcaaggtcaacaccacctcggtaatagctctgcaaactattcttcctttgattactggattgctccatctaatcagtcatttttttctcacaaggtccaaattagaataaaatggattctttatcttatatagtttaatcatttgtgaagtgtgggcttagggcctctttttgtactgagtggaaagtctatctaccatcttagaatagacagtgaaaatgaccacatgcagactgtttttcttacatagtgattcgtgaaggaaagctgacacatgataacccgtgatgagttctgaaggaggcgctgggatgatcctggattacaggatcagtgtgtaatgtaaagattaggtatctttgtgggatgccatcctgaatggaaatccagagatgtttgtcttacagggaattatgagtgcttaacgtctgtggatcaggagcaggttccctgggaccatactgtcacaacttaataataaggaagaggagaacattgtcaacaatgtactgcactctctttgttttagtgtctgctgtgtgtttgtcactttgtatatttcataggaaacaccagagattctggacttttgactcagtagacagaaatgagccagagtttccttaggcaacgccttatgctgtatcatatactaatgaactcctaaatgatgtgctaggctgggagcatggctcagagatggagccggtggtgcacaagagaggccctaggttcagccctattaactgactaatgagcactgtttacagagttaacttaagtgtgaccaatttcttaggcttacagtacagttctttagcaccaaaaccttggttggagtcaaaacaaatgaaatgaaataatgaagtgagcctctgtggcatgccaaggcaaacggattgcgaattcaaatttattctagcacaggcagcttagcaagctcttactatcgaactttaaagcagcttggtttatagtcaggtgggagagcacttagttagcacgtgtgaccactgggttttataaaactgaagtcccgggaaacagtgcaagatgcttccatcatgtgatggtgatcagtctcaccagagaaagtgagcagaagttggtgctcaaaaggaaatttcagttaatacagcctgttttgtcctggcttatttgtggagttgaagacctatgtactggcacatgccctagtgtgtgtgcatatgtgtgcgtgtgtgtgcgtgtgcgtgtgtgtgtgtgtgtgtgtgtgtgtgtaacagtcttctactcactaacccatggtatgtctcagtttcatctggcaactgagttcttctaaatggttaagaaaatgctgccttagagcctgttgtatatttatgtgttggagtctgtgcttatcagtattttcagctagtcttcattgtgcgtgaaatattagagtggtctgatgataagaaattctgtatttttattctgtaaattagaataatcaaaaaatgtatcaaattgtatgatatatgcattacttcaaataggaaatgtaaagtggaaaaccagggaccaggagctgcagtgccctccccagcagtgagtggacaacttccagtggagtccatttgggtccctcagatgtagagatggtgccctctgtggtgtctttggcattcaaactttagaacacatcccagtcaactccaaaatggctgctagtcacagcatttctctcagcatcgaagtcgttatggtgaaaggtagtctgcaggagtgcagtggtagaggcaggagcacctggcacttctcatggctgccatttcccaggcctccaggaaacactagggttataagtagaatcatgtcattttgagtttttagtttttgaaccatagcctttgtcaatatttgttttgttttaaccaccagaacacttgaaaactcagtaaaaatttcattaaagaaaagctttcaaaatgtttaagaataaaaagtagtgtccagttatagatggttctgccctgtacctgagagatctccgtgctccctagccctgtttctgctctcccttaattattcccccagcattcccctgaccattctgaccagaccaatcagtgggtgctcaacagtcatactaactcatggctgtttcccttgctactgctgtaaaatgtctgtttaggactcaggccaaccttgacaatctaacagtgaaatggaatagaggacaggggagggttggtggaacccagccgtcctctggagatggggggcagctctttccctgatcctatgtggctctaaaacgagcacatatgtgaaagggccttagaatagcaaaaatagccaagttttggccatggggacacacatgcctgtatggggcgagaggttcactctcaattcaatgactgttgccgggcggtggtgtcttacacctttaatcccagcacttgggatgcagaggcaggcggatttctgagtttgaggccagcttggtctacagagtgagttccagaaaccctgtctcgaaaaaacgaaaaaaaaagaaattcaaggactgtgtctgggctgcataacaagaccttgtctcaacacacacacacacatacacacacacaggctaaatattaactacatgtgacgtaggccaaagtctctgtaagttgtaatttcataggtcttgtcaggtgtatttcagcagtctctggcttcagcaagtgcgccattaattctgacttgatagtgcccagtgagcatggcctgtgctgccttgtggtagaaccatgcgtatatacatcaaagggatcagattccttttgtcaattttggcatttcagaatggatttttaaacaccagtcaaggataggtcagtgttggctgataccacatgcttagactgtgtgagaacccttgtccagtctccagcaccttcactttgagagacagtaaaatcctttccttcagaagtggtgatcctgctgtgttctgcaagtctaccaaagattcttgtgaggagtttctcagcgcctgtgtgtgcagacatgtaccctcctgcttccttcacggtgttagctccagcccctccgcttagtcatctgcagagggctaagacaggaccgcaggcagctggcacaagcaactctgttccctttgccaaaacctccaaagttagaaatgaagttgtttgcgtctgtggtgagggaattgaccagccattgcttcagcctccttcccgagtaagcaccttcttggtgcctgggtagccctgggaggacagtggtgacctgcaccacaaaacctgcaagacattattttgaatggaacatttgatgtcatttttagggaacagaaaccaaataacagaggccaaggaccatgcgtatttcaaggagggaagatgagcgccctctgctggcagtatttgtagttgattgagtgaggagctctaagcagcctggaaggagtgctgaggtcagcaggcctcaggaatccttaacatgcaaacaatcttgaggggaaaccagaaggtcattcctagcagttactgtaatacctctcattgcaggctgttgggtttctgtcgttcactcggtgtgatttatcttatgtatctgatagtttttatggataattgtttgggttgtaaactcctatactctttattaaaatgaacctaattaagagacttagttgtgtgttttttcttaagtgggatcttctggggatgaaagggtccctaggtacctgtccccagcacagatcctgtgatggattcc

SEQ ID NO: 31516 - DNA, 1190 bp, Mus musculus
atagatcagaagacaacttacaagaggcagttagttctctctcctcccaccatgtgggcattgaacgtgggttgccagacttggtagcaagtgcttttacccacggagccatcttgcctgcccctgagttgtatttttactaattctttctgtgggctgatggatgaaaaaggaatcgagtaaacattatgaacaaattgcctgtgtgctctgtcagacgccacagtgcacatggtctctctgaaagggtatgtactagtcattcttttgacacatgtgcacatgtgatgagtttcagatacgtgtgtgtatttgcatagttcgcacacctctaatcccggcactcaggaggcaggagcacggatctctctctgccagttgaatggctagttgaatgtatgtagtgagttccaggcagtcagagctgcacgtgagaccctgtctcaaaatgaaaaaaaaaaaaaaaaggtgggaatctggatttgtcctgtacttggctggaaatgcaacatgcttcttcaatgtgattacaggagaatgaagagttagactggaatttactgaaaccagacatttatgccacaattatggacttctttgcatctggcttacccctagtgaccgaggagacgcctccgcctccgggagaagcaggtagcgctgtgttggtctgtccatgcttgtccagtctttattgacttcctacctcattcccattcacctggatgccaagtgacagaatacagacttttaaaatgtttttattagagctatgaacatattaattatacgacattatgggttcagttaaggccttttatacatgtatataatgtgtttcgatcgtaagcacgtctattgctcctccttgtctccctcacgcctgatgatcctctccctctttccaccaaccccacctccatctcctgctgcttcctctgtgagaggcttacatgaggcctgctagtgctgctgacagaagcactggcaccttaccagtggacacaccaccgtagctgatatccttcctccccagcactaactttgtgtaggtccctggtgagggtggggcctcatgagagcctccttccccattccagggtgtttcacttgcgtgtgcgtgtgcgtgcgtgtgtgtgtgtgtgtgtgtgtgtgtgtgtggtcccgctggaggccaggagagggcatca

SEQ ID NO: 31517 - DNA, 1210 bp, Mus musculus
agcagacagtgaccttgaactcttttttgtttgtttgtttttcgagacagggtttctctgtgtatccctggctgtcctggaactcactctgtagaccaggctggcctcaaactcagaaatctgcctgcctctgcctcccaagtgctgggattaaagacgtgcaccaccactgcctggcaccaccactgcctggcgaccttgaactcttgattctgtgattataggcatggcctatcctgataggattccattggcccagctgagatgctgctgccaagggcctcttttctgaaacaagaaaacacgtcccagttcttttatatgcatttaatttgctttattcccttaggtccccagttctgcctaaaccttgtgctttgggctattgaggtttattcgtgtgggcgtgctgtgcgttatcatagggtatttcaggcaggcaaggatgttcatgctaggaagataacattttctaacctttctcttaaatcttgagttctctttgttttctggctttaggtgatggatgatgacgaatcagatgaaaaagaagcaaattcatcttaaataatctgcattttctttggccacaaccattggacctatctttactgatcctgtaattatagtctctgctatggaagtttattaataaaaggtttccttcctccagaatgatataaatacatttgcttcctctcacgaattatttatgccaccctgagtcacccacatgcttgggttgttcacttgggttgttcgggtcttagtcttttactacatcctgtgtcacccctgtgtgtgggtcttattcaggggtatttttgtttttactcctaatctctgctggtcctttctttgcatgatgggaaaaacattttaaaatacatttcctgggagctggagatatggctcagtggttaagagcactgactgctcttccagaggtcctgagttcaattcccagaaaccacacaaggtggctcacaaccatctgtaatgggatctgatgacctcttctggtgtgtctaagacagctacagtgtacttatatgtaataaataaataaatcttttaaaaacaacaacagtaacaaagcactaaatagctgtggtttagaatggtagctgaggagtaggtgggtgagggagccaggaaggcagtgagaagcaggaaataccaccatggggaaggagagcaggcctgcctg

SEQ ID NO: 31518 - DNA, 1167 bp, Mus musculus
tcactagcctgggttggctttgaactcactctgtagctgggaataaccttgaactcctgatcctccttctgcccccaagggctgggatggcaggactctgccaccacacccagctagttaaactatgttggagtgatgagttatgtacctaggcaagtacctggcattctggttgcaggttatttcctcatcttgtaccaggaagaaaagtatttgtatactataaaacaaaaagaaaaaggaatcggatgtagttcatgaagctcagataagaaaggaggaactgttagtcagagtggctgctagtgcaaggcagctattacactgagtttcactgattatgaagaataagtaaatcaatatgctagcacacggtatttgaggcatttctgtttttatttgctgagacagggtttctctgtgttaggcttggttgtcctagaacccagtaacacttttttatattagttttatatatttcccagagaataggtatctattttcaattgtttttttttaaactagtgattcttgccttttttaaaattattttttattttttttgagatacttacctgaaggttattgagggatgctgggactggctgctagggtgacttgtaaatacatactgtttacgctctttagaagtcacactggaggcagccgggcgtggtggtgcaagcctttaatcccagcattggggaggcagaggcagatcggatttctgagttccaggccagcctggtctacaaagtgagttccaggccagccagggctacacagagaagccctgtcttgaaaaccaaaaaaaaaaaaaaaaaaaaaagaagtcacactggatatgaagaagctgtgagctgtgagggaacttgtttgatacacattttctggggaagggagagcttaataggtgtcagggttaatagaaatgagcaaaagaagatgggaagggttttgtaatacttgtttgtgatagtcttctcccagagatccagaattagcaagactaaaggttctagaaacctttaaacctagtaactttgttgggctcatatatatatatatatatatatatatatatatatatatatatatataaagcttttagttaggaggcctttacttatccttctttagcattgagcaatatttagtgttgtttcc

SEQ ID NO: 31519 - DNA, 1099 bp, Mus musculus
tcaactgtaactttccggtacctagaaagggtcagaaggtgatgaaggtgatgaagtgcttggtggcactttttgagagaagactcaagagagttgtctttgaggaaacaaaatgaatgcagatataatggctgcaggtgctgtcacagtactatctgaggcaatctgaaatccatcaggcacaggagagctttgtaactgctctctgttagacctggaatgctccaatgacgggaggattcttaccttgagatacagagactagtgacaagggaggcagtcacctttagtggtgttgttcatcttcagtcagtgtaagtagaagtaaatttgagaactgtgggtctttgtttttgtttttttgagataatgcttaaatggttacctggtaccacagaggtcgggagagggcattggagctcctgaaactgaacttagaatggttgtgaactacctaccatgtagatgttgggaacagaaccaaggtcccctgcaagagtaacatgctcttcacctctgagccatctctttagccctcaaaacattattcttttttaaaaagagatcttacatgtaaaatgtggctgcatagttataatatgaatatatttatgataaaggattagtgtgtataagtcttaaatgtagcattgcctttataaagaaacatcgcactagagatgtggtcatataagtatggtatgtctattacatattatgatgtggcaccataagaaggctcagacagttaatgagaaggaatgatttggggtaggaaatctgcttataactactcttcaatactgcagcaattacaaaagggcgactttaaacttttgtagttactttacgcaggactgcattttgggaagtttaaacaagacaaaagaccttaaattatgagctgaagtagtgacttctttctaggaggccaccatgtgagtatgagtgtctctgtggacttgccctgcctgcttgtcatctcttccccgctactcagatcgaagatgatatcataatcataactggtggattctcttcaccttccctcccttccttcctccctccctccctccctccctcccgcccaccctcccct

SEQ ID NO: 31520 - DNA, 1144 bp, Mus musculus
tgtatatgtgtaatgtaatagtatataggatatagcccacaagtttgctttttaaaaaataaattttacttgacaaaatggcagttaaggaaatagttagctttataagttttgttggaaacaactaaatacttattttgacatatttttgttaatcttttatgtttatataaacttcccttttgaaaaagttaaatggactctaaataatttatttctttttaaaaagtggagccaggcgtggtggcgcgcgcctttaatcccagcactcgggaggcagaggcaggcggatttctgagttcgaggccagcctggtctacaaagtgagttccaggacagccagggctacacagagaaaccctgtctcaaaaaaacaaaaaaacaaaacaaaacaaaataaaaagtggaatctagctttatatttttgcatagcctaaacataattgtgtaaggtttgattcatcaaagttgtccattaaatttttttgcaggtatatttgcttatttaaattaccatgttcctcgaacaagacgagaaatcttggagacactaatcaaaggccttcagagactggaatacagaggatatgattctgctggtatttcctttaaattatattatggggtttggattgattcttgaatctaaatagtatttttattaattttaggagacttaatttgtgtttgctttgttttgtaaatgcaagtcttaagaattttaaattttggtcatgtctaaagggtttgtgaatgtcatttcagcagtattatcatttatgtggatattgcttctcagtgatttcctttaggaataacgttactccagggcttggggaggcgattagtatacatgaagccttgggttcatccctagcaccatgcaagctgggtttggtggctcaggcctgtgatctcagcactgaggaggtaaagccaggaaggtgagttcaaggtcatccttagacaaagtcagccttagactaagtttgaggccagcctgggctgtaggagtctttatcttaaaaaccaaaacaaacattaactataaaaccataaattatgccaggcggtggtggcgcctttaattccagcatgtgggaggcagagacaggtggatctctgagtttgaggccagcctggt

SEQ ID NO: 31521 - DNA, 1145 bp, Mus musculus
agcacggtggctctttatgaatttggatatggaatatttttaaattttatacccaaagcattaaccttctccatattttttggaaatgcgtgtcagacagattccgaaggaattgtagaaccactggttttgctaggatgtttagaaatgatcatgaaattcttaggacagtaagaacatttaagatctggggggctggagagatagctcagaggttaatagcactggctgcccttccagaggtcctgagttcaaatcccagcaaccacacataggctcaaaaccatctataatgagatctggtgccctcttctggcctgcagtcatacatgcaagcagagcactatacataataaataaataaatcttaaaaaaaaaagaagaacctttatgatctgaaaacagaaggtcatctttaatcggaaacaggatgcctaaggatgtgttggtgtctgtgtacaatgaaaagttcttcacattaaaagaacagtttaaaatacagtgttagaagatatgagttagtggagtcggtcagacaggaaatatttgagtgtgttgggacacatggcctccctgccagcactcagagccactgtcaggcttgaatgaaagcagccgcagaggaagggcttcactgtctcagtgagattttaatgcaatagtaatttgccagttgaaaattgtttattagaagtaggcaggtgtggcctgggaactcagttttctaatatagttattttgtagttcaattcagaggggaaattaaatcatttgaagagcattaaatttcaaattaaaatgaattttgaattcatacttaaaatgtgtattgttagtgcattatttatggagaagggttgattctgactcgttgcatttcaggcgaggtagccctctcttgattggtgtgcggagtgaacataagctttctacagatcacattccgattctgtacagaacaggtaagttgctgcatcacgttgtaagtgtggtgcgggagctctgagacgctgctccatatgctgcagtgaatgttctccggtcggatctgtgtgtactgtgcagacaactacatagttctgtctggacagaaaaagcttgttgtgaacactgacgagagaatttttctctgttgtacatcctta

SEQ ID NO: 31522 - DNA, 4402 bp, Mus musculus
tagtaaatcttatttatatatcagttataattattccactcaactaatgatttttgtgcaattgtctcattttcaataatacatgggggaatttgattcatagaatttaagtctaaacctaaaatcagagagatctcagctgtattttgttcagagaactggataatggatttctgggccctccatttcatagaggaggcttggtgagtgtcaaggcgcttggtgtttgcttcagcataacgtgattcggtcagtcagactgagggaagaccagtgcattgaattggatactccaagtcagtgtgtgccagtgcctggacagccaccaaaggctttgctgcgctacttataaatagaagatgctgcagtttatgttgaagcttatttctgttttgtttttaaatcaaactgtacaccaaaaaacttggtgagatttttatcttagtttagttaaattagttcaaacatgtctgtcatctctgtagacagtgcgtttgggtcctccacacctgcagagaagaccttgtggagtttggaaaacttgtgctgttagacattgatatgtggctggacatttgaagataggacacagggatccactccttatttcttcatctcttaagagtagttggcattttctcgcaactgtagagcttaactgaaaagcaagtactgtttgttgagtgacgtactttgtagctgcctttggcatcatagcacagagttgctgtcaagcctcaaattggtgtcagggtgctcaattctctcttcagctttgtcccaagaagagtttcctgcagttacctttacttcctcccctgccttgttgcagaaagcatcccttggtgccagtgtagaagttctgcttggggggtggcaggccttgctgctcatttgaccctcagtgtatgtggcaggctcagctgagaacggcacatacttggcactgtggagtgacgtcagtttcagggttgttttctcgatgttttccttgggactgttttgactcctgttgaggagtgaatgcagtataaatacgtgagactgtcatgccttcagctgattgtgtcagaaatgcaggtcagcaagttggataaaatatttaaaatagaacattagtttgacaccccaaaaatgtgcagagtaatttcttcacagagctatttgggtcagattgtgtgggcagtgggcaggtgtgtgtgttcaagttaggtccattgttttcaaaagctttcacctgtacacggtgaaagcgcagtgcttcacggagtcatgctttgtgtttgaacttagtggtaagcagttaacacttgtgaaggtgagttgaagaaaaagttgatgtcactttaggcatttcagaaggcttcattcacactgatggaggctggaaacctgattttgataacccaagacagggccacagtttgtactccatgtcactgctttgggtacgtttctctgttgtatttgtccctaagacttcatgttagtggagcatgtgtgtaaggtcatttcttaggcctgatgtggtagcacagctgctcgtgtttgggtgtggcttttgtttggtgtgtggctctggagcacagggtgatgttggtgtgttgagacactgaaactgggagacgatcagctcagtgctgtctggtcactcactgtcagctcagtcactaccccggggtcctgttggagcagttttggattatacagctcagtcttgctaaccaccctccgtgcagcggaacgtcacaactctttttgtcttctgtctatgatattgaacccatttaccagtttctcatccatacacactccaagctagaataaatactaaaccagtcagaaacccagatgaggaccagggtagtactgtctaaacaaatattattgttttccatatcccattttgctttctacctaaattcttttattagttcttaatacccagatattttagcaaggcaaggcactaggtgagtaggtcccactaatttggtataatacaggacatagaaatctaatttttcaaaacaaaaataccctgtaaaagggaggctttctattaaaattctcccccccccctacccccagctccctgtttttcaagacagggtttctctgtgcagtcctggctgaactggaactcactctgtagattaggctggcctcgaactcacagagatctccctacctctgcctccagagtgctgtcattaaattctaatctatctatctatctttctttctttctaaaaagtaattattttatttgtttacatttcaaatgtcctccttcctggtttcccctccatgaacctcccaccccatccccctcctttttgcctctaagagggtgctccccaccccctccgcaccccctagcatctcccttctctggggcatcaggccgccacaggaccgagcacatttatagtgtgtttaagttcacacacacatctttacctgggagtccttgctaggcagggaggactgaggcacctgacacatggcccacttgatggttactactttctaaaaaagagaatctatgccgtaagatagaaaggttagaaggtgagccactcactcttagcctgtgactggctcggcggctgtgtatgagcggctgccatgctgggcagcagagctagaccctcagagcaattgtgactgtccctggtggacctggtccttgtgaggctcaggagggagggtggaaaggtggagctgtgctgaggtattaaatgctgggcctgggttcgtttgacatgttcataagcagctgccccggcctgtccgtggaacaggggactataaagaacagcagttagtaatatggcaagcagttgtgtgtccctgctcagcagagtgatgtcacagggtactgtgcagaaggctgttagttcagaacaccaacatcagctttttaatagcaggctgtttctgaagtgacaggtggtaaccctttcagtccaggcctcttgcctcagtggttctgaaggtgggaggaaaggaggctggacttggtcccatgtagagggaaactaacactttcacaacacaccttcagtctttggggttactcttttatctttttttataattaggatattctagagcaataaaagagactaaggttacctgtttattatatacattaactggtatgagttttctaaaaaaaaataataaagcacaatgtcattggaaaatgtttgtttaaaaaaagaattcataatttacaacttgggaaggccaaagacatggaagggaaaggtaaagacattttgatttatgacatccacattttgatttatgacaacccatagtgggttgtgtgtacagtaatactacgcagggttttaagcttggagacatttcacatggcttttatttagtttcacattcaaaagttttaacataaattggactttttcactgtacttaaagattgttaataagtatttcagtatcttcatagctagaatttatttaaacatatcctcagatctgggatgataacagataataaaactgacagcattggctttgaatagtaatgtccatagttttaagcaagactgctaagttgtgttgtgttgactgtaagtccgtacgctcagtagtgatgttctgaaggctgatgatggcatcagaggaaacgtcaccttatcttgtttctgcactagtttccagagagtgtagaaatggtcttgctaatttttgaatgttctttggttgaatgtgtttttccattaataacatttttatatttgtttaaattatacttctgtgggactgggggttagaataatcattgctctgttttgattttgtattcttttaaatgaatgtttagttttctgagccagatggttatttcatccttgtgtcctgttcaatccagtgactacaccggaactgtgaataaattacccaaaaccttgctgtgtgactttttctttttttggttgggcttgggacagcaccccgggccttacacattaggtcacaatcgtagcagttcattttgaaggatttactagcgtttgaaacacacatgtgcatgtagcattttaaagttggtgctggctaaagaatagagtcagtgttttgctttcattgttggtaaacattgccggcttctcagccctgttgctttaaagaatgaatggttgtgcgcatatccagagccagtaccccagcttcctagcagttttacgaagaatcattagataaaactctgatgttatgtatgctacactaagctccgatgtcacttgttctgcactttctcatagcactttacattaaaaatgatttgttatcaggtttctggaagggtgaccagaaagctgaaagtgcattgatagctaggagaaaggggagtgtgagtgggttg

SEQ ID NO: 31523 - DNA, 1199 bp, Mus musculus
aatgtgagctaaggaacactcggaactgctcaattactgagacacaccacatgccaaaacttagagtgcagccaaagtggccctcagagggaaattcctagtcttaagtgtttgcataagaaaaaaaagttataggtcacctcagcataaaacttgaaagatcaaacaacaaaatagtaaaaaacctaaaatactgttttttaaggggcagggctgggaggatactcagctgttgggagcacttgctctttagaggactagagttctattcccttcacccatatcagtcagttcataactactcataactccagcctcaggaaatctgccctcttctgtcctccatgggtaccccaaagcacacgaacacatgcagacacatgtacatacacataaacaaatagcaaagtaaatctttaaagcaagcaagacaaaaataataagacaagacttgcgtagcaacagggcaactattagttgagcatagcagatgtgaaagaagagaaacaggcaggtatcctcagagctgtgttctcgctggagaggttagatgggaagacgagccaaagctagtgtggccacaggctgggctgcacaggccgaggtcactcacacagcggactgagagagcaatgcacactggggtcactgcccacccaccctgcccagtctcctcccttctcataaggagtgttatgaattattatagtttatactttactctcccatttctccaactaaaatctgtcaaattgctgtgacctctccctcctccccccccccccccccgagtgctgaggctgtgtggccttaaggtaatttgtgactgccatatttcattaggatccttgtcttccagtcagagggtcagaagccagggcctcccgtgccaggcctcagcctttgccctagtttagctttgcttttcctagtcttctgtttctcggtctctccccctttctactttgacaacttaagctttgaggtgtcccaacatccgatataagcttgtgtaaactgtatatttaatgagcccagttgttgaataagagcctgaggcagtgtgtgtgtgtgtgtgtgtgtgtgtgtgtgtgcgtgcgtgcgtgcgtgcgtgcgtgcgtgcgtgcgtgtgtgtgtgtgtgtgtgccacaggtgcacaggccttagaggacggccagtgtgcccactcacacctgctc

SEQ ID NO: 31524 - DNA, 1148 bp, Mus musculus
cctgcctatctctctgctcgctgttatgtctggggccaacgtgaccccctctcccaggtctctcagccaacctgccttcttacagcacggactcccacaagtgacccaaagcacacatctttgaggggcgatgggccctccccagccacaggccctatccccagcatcctagcaaggatgaattcttcccttgaccccaattctgtggcctgagagggccctgagtcctggactgaagctggcttctatggagaagctgcatccgtcccttctaacagtagtgccaaggctcaggccctctgctgaggcccctgccccaccaaagtgctcagagcgacctttgggcctttgtcggaaggtgcccagggcttgaggaccagaacataagcaatgcccgtttagaaacaaaccagctgcttcccttcccctgggcaggcttggctgcctgccaacagctgcccagggcctctggggcaatagaagtttaatctcttcccttgtttgaagagttactgaacagcaggaacaggtggaggctgttgctgttggggaggaagtacccacagaagggctggtagggccagggtggtagcagcaggagagaggtcctgtccactaaaggtactagagaagggacctcatgtctctttgggtggaagtctgtccccaaggacacaggccccaactggaggggatctacccgaaacccctggttcacactgaacaggttgccctgtcccaggatactgccagcagtgggcctctagccaaactcccccctgcagggcttgggcaggggcagacttgccagcccaagggtgccaggcacattggggagattttcacattacctatttatgaagatgtaagtctttctatcaaatctatttttgaaacatgaaaagttgccttcctggatatgtcagagacagtgtacaattcaaccattaaacatttctgtattgactctgtgctcaagcatggtctatcacctctgggcatagaacctgtctagtgaccttaccttgtggagtctctagactgattttcaggatgggtgggtgggtgcaccttgctgtccagcctggtctggagaaaggagcctaagacctttcctctggttctgggccctctgaggtagaagcagt

SEQ ID NO: 31525 - DNA, 1197 bp, Mus musculus
agggagacagaactgtggtgaactagataaacagggctagactcactggggtccccttcaggtaggaggcagcctgtgtactagctgagcctggctctgatggcatggaatcagggtctgctctgagtgctctcaggtggggatcactgtggctgtactgggttagagctgcatggctctaagggctggggaccatgaagcccgtaaggctttcttaacccgtatgatccttttgggggcatggcagtgaccttttcacaggggtcacctatcagaaaacagctgactgtcttcctttcctgggcccgatgcacttgagagagtcctgcttgctggtttcagttggctcaaactcttatcagggagagctggttccttccctgaccccgcccctgcagagcctgactccacccacgggtgggtactacccaactctgagcctgccctttgtactgcacatggtcttcagagccatctggcatctgtggttccatgagtagaacctggggggttgacgtctccagagccattcaggaaggcagcctctcatggccctgctgggtggtggggagtttgccaggtctttggttcaggtgttcaaatggaagtcccatttttaggatgtgtctgtctctctgagtttagatactgaccctgccatagctacccactactacccagcaagccttgctctttagcgataccagtgctgagcccagcaggacgttagggttccaatgtacttagggcttagaagagggaggtcagagaccttttgccctaaacagagctctaccctttccttcacaagatggcaactgactggtgatggggctcacttgccaccctgggccatgagcccacttttctagcctccaaagactggaagccatgaagccagtgaggcagtgtttcttaagctgtgagtctcaacccctttagtgagctcaaaggactctatcacaggggttgcctatcagaaaacacagatacttacattacgattcataattagcaaaattacagttcagtaggtacgaaaataattttgtggttgggggttaccacaccatgagggctgtatttatgtggcggcattaggacagttgaggactgccagaagggcctaacctggagtggaacagaactcagtgggctctgcttggccaggtagcttcttcactggtggccccgtgg

SEQ ID NO: 31526 - DNA, 1456 bp, Mus musculus
gccggggaagatggtcagcagaagttcattgctcatgtgccggtgccatctcagcaggaggtaggctggatgctgtgagccccgaggcagagtgctgcccttagagccagtccgctggagaggctcaccttcccgggtgtcccttgtccctcccttccactgtgcactctttaatcctaaccctgtggcacacagagaggtgtcttcacaaaggggtgtgggatccatgaagggccaggccgtcttgacggaagtgataagcaggaacttagatggactgttgctaggaaagtggctgggttcttgcagacccccagacgtgctgaccttgtccctgcaggtagtccctgcttgggttatgtgagaggtgggggccttgctgagagtgacttctttactgtgggtgtccacagattgaggaggcgcttgtacggaggaagaaaatggaactgctccagaaatatgcaagtgagaccctgcaggcacagagtgaagaagccaagcgactcctggggtactaggctgagccagagcccttcttgaactctggaagacctggtgggtgtgcttggtacaccatggcacgccatcctcatagctgccctgggctgtggctaggctgcctggcgctggaaggcctgtgcctttctcacccttcagcttacctccatttctggaatgtgagctggcctgatagtagggccctgtcccttcccaggaagctgccaggtactgaatgctttagtagccatcgcctttgtacagatgcctttgctaccgtgtgcatccattcatttttgtcttggaatgtgtaaaatctgttctctgaaaatttactttgccctatactctgcttttgggaatcaagaaggatcaaactagtagccaattttcaaaaatacataatttttattcaaatcacatctaaatttagagacacatcttctctgggagactgagatggtgtatcgaccctgagatggaattccatggttagtgctggagccatccctgcgtctgggcactgcttaccttgccatgatccccctctgggagagccatttcaccttctcctgtcctgtggacaggagttttgagttagcgactttatttttataacttgtttcagagaaaggtacttttattaaaggtttttaataagaaaggaaacatctgtgcctagagcttgttctgtggtgcatctagactgtggtggcttgatagcagacatggaagacactggacactgtaggggtggggcggggatggggagggtacagagtggttggtaataaccaggaacggtacagatcccaaggctgcacccagcatgcacataccacaagcttacacttacagcagaggatggtggtattctgtctgtttgtgcacctggtagattctcagtgactgaatcccaagcacctctttgagctgagtctcctgcaagatctct

SEQ ID NO: 31527 - DNA, 1194 bp, Mus musculus
tacttgcatgctagacaaacactactgagccacatctctctagggtcacttttaagggttttgaaaacagtgcacaaatgttcttctatatagagtgtttttcatgtgtgaccttattatctcaaattgtattgtgaacaaaagagcaggcttgtgtgtcagatctattcttcctctttctttcccaacaagaaagttggccccaagatgctggatcatgaaggtaaagaagtcccaggaaatcgaggttacaagtactttggggcagcaaaagatttgcctggtgtcagagagctatttgagaaagaacgtaagtagttcatgtgtttgagagtgcgttggcctttaattgttgctactgagtgagagaagtatgctgtatgctatctggtaggaattattgctcccagattttaaaaaatagtttaaaatttgtattcctaagtttattctatatttttgtagcatggtctcatgtacccccaggctttgaatgcctcatcttcttatatccacctgttaggaatatagacatctatcctttttgttaaaaaacaaaaaacaaaaaacaaaaaaaccattgttcacgctggcctaagacttgccaactaacttctgtctcagccttcatagttctaggattacagacctgtatcatcgtgtctcatttttgtgattgttgttcttgttcttgttttttgttttgttttcatctatcgttcatttttttaattgtaattgacattattagtgtgtcatcagacctctgctgagtaccattacccactgagccatctcatcgttgaattttatacaaagttttctgccttgttaagatttgagtccatgagcttgcacttgctagacaagcactctgccaccgacttccatcctcagcccttagctgggtttttccttcagtggtaggctttgttgttgttgacgacacagagcctttccgttttaccccaggcatgtcttaaactcgtgagctcaaaggtctgagtgatatcctgcctcagtctcctatgcgaccaggcctggctcaagagtggtgcgcatgagtcacccgtctcagtagagttaaggagaggtttgggtccccttgctgccccactgctggactctgtagaggtgactgggacccattgttatcttcaggctcccttgtaggccccttccttgtaggcttag

SEQ ID NO: 31528 - DNA, 1191 bp, Mus musculus
cctggaactcactttgtagaccaggctggcctcaaactcagaaacccacctacctctgcctcccgagtgctgggattaaaggcgtgcgccaccatgcccggctgaggatgaagtttttaaaaagacttttaaccccacattattgggaatctttgtttatagtacttggtcttcctttatttgggtgttagtgactttccttaatcaatttattatttatttacttttgagatggagtctcactgtgtatccctggctaggctagtactcactcactgaggtttgcctgcttctgcctcctgggtgctggtgttaaaggcatgcaccaccacaccaggccttttcttctgaacttcaatgagtagttttatgcagtgtacctttggggttgaagcctttctttctaaagctgtaacactgagtacatgattggaagtactgacattcattattgggcatggcatcttgaagaaatgatattaacattttttgttttctagctggcttaggggaattccgaattcgggacctgaatgacgaaattaacaagctgctgagggagaaaggacactgggaggtccgcatcaaggagctgggcggtcctgattatggagtaagtagctagagctccaggggcacctgggacaagctgatgacttgtctaagcattgtctgtgtgcattgtctgtaagttcagtccatcctgtccagaggggccaagggtggcagggcagagaagcagtgaaaaggatggtggtaccatcctgaaatcccgcatggcacaggccttggcctggctccccagagacattcctgtctgctgtcttccctcctgtagtatcatgattatagtaagacacatgctcccacactttgtttgtttgttttgagacaaggtcttcctattatgtagagactcctgactctcctggaactcattatgtagaccaggctggccttgtgtgtgtgtgtgagtgagtgtgtatgtgtgtgtgtgtgtgtgtgtgtgtgtgtgtgtgtgtgtgtgagagagagagagagagagaacgagaacacaaacatgagtgttggtgccaatggaggtgggagggggagtctgatctcccaggagttggagttacaggcagttgttatatttgagcagaatacctgtgagcctcctgatgtggatgttggggattgaaggcagat

SEQ ID NO: 31529 - DNA, 1725 bp, Mus musculus
caaggtttttgagaacctagtttttactcttctctgttcttggttagaagataaagatgtagactcttagctgggtacgatgatttaactcctgtagtcacagcacagagctagaaggttgtgtttacggcttgcgttgacttttatatgagactgttttcaaaagtaaagcccttttaaagaaggaagaaaacaattgcgtgcactgtaagggatttaaaaacaacctgggcagtaatgtctcataaaagagaaatagtcttacaaagaaaaatatacttatttgtgttcataagtttttttttttctttttctgtattgaccattgatttgagaacggtgttatttgttctgagaagcaatgtcaaaactatgtaatttttttttttttcaggtgtggtgaaactggtcatgtagccatcaattgcagcaagacaagtgaagtcaactgttaccgctgtggcgagtcagggcatcttgcacgggaatgcacaattgaggctacagcctaattattttcctttgtcgcccctcctttttctgattgatggttgtattattttctctgaatcctcttcactggccaaaggttggcagatagaggctgttcccaggccagtgagctttacttgcagtgtaaaaggaggaaaggggtggaaaaaaccgaatttctgcatttaactacaaaaaaagtttatgtttagtttggtagaggtgttatgtataatgctttgttaaagaaccccctttccgtgccactggtgaatagggattaatgaatgggaagagttcagtcagaccagtaagcccttctgggtttgagtgtgttcccatgtaggaggtaaaaccaattctggaagcatctaagcttccataaataactttaattcttagcataatgacggccttggattgtctgacctcagtagctattaaataacatcgagtaacatctgcatcaggccctcagaatatacagttgagttgggagtaaactgaaaagacaaatgtgttgaaggctatgccagggaatctggctcaaagcctaacacagaagcagcttcatcccagtgacgatgctggacgtacagatggtgatggcaaaggtgtagaacacattttttcaaagactaaatctaaaacccagagtaaacatccgatgctcagagttagcataatttggagctattcaggaattgcagagaaatgcattttcacagaaatcaagatgttatttttgtatactatatcacttagacaactgtgtttcatttgctgtaatcagtttttaaaagtcagatggaaaaagcaactgaagtcctagaaaatagaaaatgtaattttaaactattccaataaagctggaggaggaaggggagttttgactaaagttccttttgtttgttttaaattttcatcaatgtatatagaacaaaataccatattaaagaggggaatgtggaggactgaaagatgacagtttggacttttctttctatgctaagtaatgtcttcagtaaggaaaagctggtgatagaagaacgcactgttttattaatttgtagagctacgaagagttctatggatcttctgttggctgttgccacataagcttggtggcttgagtttttagttccagaatctatgtagagatggaaaaaaggaactgaatccacagttgtgcttagacacatgaacaaaagaacattcttagcataatgatgg

SEQ ID NO: 31530 - DNA, 1187 bp, Mus musculus
tgtacataagagagagtactttgggagaaggcagtttgcatagtgtctaagacagacttctgagctcaactctctgtgggtttacttttggtaacaagtttttgagaaagtgaatagatgtagcccaggctggcctagatagaactccggattctctgccactgttcttggcttgaaattttaaattagtatttctgggtaaaagtgagtgatacatattttaattttccttgagcagtaagcatatatggcgtgcgcgtgcatacatacacacacacacacacacacacacacacacacacacttaagctggaccaggaatattgagatatttctgagattattaacacgggcatgttaatacatatatgccccatttagaagtttgtaagatatagtttcagagtttttcattttgcatatggtaggtgtatgaagcacaagtaaatagattggtactggtctttctaaccagtaagaattctaagtgtttaatgatattttttgatattccaaagctctaactgcagctatgagcagcaacgaatgcttcaagtgtggacgatctggccactgggccagggagtgccctactggtggaggtcggggtcgtggaatgagaagccgcggcagaggtggttttacctcggatagaggtatttttgtcgaataaaaaattttgaagtactccagcattcattaataccaagactggcctgattatcccaattctttttgtttctactcaaaatagggttccagtttgtttcctcgtctctccctgacatctgctaccgctgtggtgagtctggtcatcttgccaaggattgtgatctgcaggaggatggtaagtatttaacacttgatactcttgggagaggtgagtgtgtacttacacacagctttggaagggtttgtagcatgtggtttaaatatactactttataaaggttttatagtcttggtctgcttcttttccttattgttgaagcctgctataactgcggtagaggtggccacattgccaaggactgcaaggagcccaagagagagcgagagcaatgctgctacaattgtggcaagccaggccatctggctcgtgactgtgaccacgcggatgagcagaagtgctattcttgtggtgaatttggacatattcaaaaagactgcaccaaggtgaagtgcta

SEQ ID NO: 31531 - DNA, 1149 bp, Mus musculus
gctgtagggggtcttttgctttgggactgctttgcttagctgtcttcagggacacttcgttttaacatcacatgatttactctgcggtccccaaaggtgctgtttgcactcctggactgtactgctgttctcctttccttttatcacaggacagacgacaatcatccctggacaaggggtcttggaagacaaaacatgattgggtgtgaggccagaacagagttagggagcagcccttcccttcctccagagccagcttaaacagcacacgacagttcactagtgtaatgtgtgttacactcagtagaggaaatggggtctaaaatgtttccattaatctttctcctgttagaattagaaggccaagccttttgttttatccaacagagactggaaccaaggcttctgcttccaggctgcctatggagcgttgttccctgggcctgcctgagctgtaggcctgcgttggtctcctgaggatgtgagatctttgctcagctagacccttctctctgcagggtggctttgagtacaagcgtgccattgtggactgcatcatcagcatcatcgaggagaactcagagagcaaggagacaggattgtcacacctgtgcgagttcattgaggactgcgagttcactgtgctggccacccgcatcctgcacctgttgggccaggaggggcccaagaccaacaacccttccaagtacattcgctttatctacaaccgtgtggtcttggagcatgaagaagttcgggcaggtatatctgagctggggtgaccctggcctcttagcttcttttgcagtgaatttgcccagtaatgggacctaagctctcagggggacaagcacactgggaacatggccttataagctgttttttacattgtcagaaggattttagatgccaaatggataaatgatttttttaaaatttaatttttttttaaatttcattgtatattcgtacttaagagttttttgtttttattttttgagatagggtcttattctatagccaagctggttcatacttgaaaccgtactgcttcagccttctgtgtgctggaatcctaagtatgtaccaccatacctggagagagaacacacaccacaagatttatctttttttataagtcagtgatct

SEQ ID NO: 31532 - DNA, 1890 bp, Mus musculus
atgcagtgattgatagttactgcagcactatgtccttaagggttccagagctcagggaagcagtgagagttgtccaggcctcccagttgtgcctcagtgtgtgcggtgggggtggggtggagtggggtggggtgggggtgttgatcatgtgtcactctcagcacagcctccttcagcctcacaaaactctgcttcctctcacttacaggagtattccggggtggtcatgacatccttgtgcgttctcggcttctgcttttggacacagtgacgatgcaggtgacagccagaagctcagaggagctgccagtagatatcatcttggcatccgtgggctagaggtggcctaagccccactcctatcttgtccaacactacgtcgaagccacttcttccctgtgaagccggtggaaacccttccccagaccactgtgttaagaaacaatcaagagtcaatacagatttttttttttaattccatcctatcattcaggaatgctagggtagattttgtcaccatgcctgcaaggagagacaaatgaataaaatgttcagactttctcttaatatttatactcaaagaaaccgtctcatccctatgataagtcagcatgtatttcttgaataactgctgcttctgcaggctcgtgctcagggcctccacttctccctgaggcctcccttcaccaaatggagcgtgtgcatagcccctcgggactgtcagtgccaagcttagggtggggttaaaggctagccgaatgacaacagctagcaggtctggtaagccactcatctacaggcatctgtagatggatgggtgtccaaaggtccttagagggtgtcatgatctgctctgggtctatgagtgggaaaaacagtatctgcattccttttgggctggagtaagaaatcctaggggatgcttcagggcttgggctttaaactcaaatcaggtggtttaaactgttggaaacacttgaagaactggacctcctgtgaggctactcagatggctcagcaggtaaaggtacctatcaggacggactacccacttggtagaaggagaggaccattttgcaatagttgccgcctaacctcatgcacacctgtatactgtatgcacatgcacatgtacacattagaacagaggcctgcacctttaagccgaatcccataacatgaagacatcaggctacacttgagcatcgttaagctgttttagctatggcctatttcatgactggtcctggctccaccatgtacttggtcaggcatgcagtggtgaactaagtaacgtggtgtgaaacttcctaacaggttataaagagatttctcatttggggggttttctcaagtaggtgacctgaaggctgctccctaaagacatccctctgtcccccaccttccatccctctcctggggactgagcagttgctcttgcctggcctctctgcctcattccatccctttatgaaggcctctccaggctttaaaggaaagcctgaccttcaaggccacatcctgcttagcccttcctgactgtattcttcctgcctaataccctccccttctactcccaggcctggtcatagcctggaagccattccattcaaataaacttcattaaagaaattggtgtcagcctccttttgtgaagattacagcttactctagttttatttaaaggcttgcacacaccccacacacaaatgttaaaaaggaaaccaggtggggcttcctgacccttaggggtttgtgggaatagctagagagtctcaattcggatggccttacacattgagggtgggcagcacaggttttctggcttcagattccggcctgggaagggggaccctgaggcctcctggggtgcctgtctcaggtcagtgc

SEQ ID NO: 31533 - DNA, 1240 bp, Mus musculus
ccttttactacaaacatgtactgtaacacaaagaaataattaaaaaaaaaaaaaaaggaatgtctaagctagacaaacacctttaatcccagcacttgggaggcagaaacaggtgcatctctgagttccaggcagccagatctacatagtgagtccaagacagccacagctacacagagaaaccctgccttgaaaatctcaagaaatgtctaaagctagatgtagtggtgcatgtctttagtcccagcattggggaggcaggggcaggcagtctgtgagttcaaggccgacctggcctacatagtgagtttcagccagagctacataatgagaccctgtctttttaaaagaaaaaaaaatcttaagagatttgaagtgcagaaaaattaactcctctgggtaggtagctcaatggtaaactacttccctaagatcagttctcatctggcacttcaaaaaagaagaggttatctcctccagggccacacatgattctgagtgtgtgtgtgtgtgtgtgtgtgtgtgtgtgtttgtatttgatgtggttctgaaggtggaacctaccaccttgtacttgctaggcaagccctctgctaccacagtacagtgctaaccctaaccctatgaccatatcctttttattctctctcaggttcctctggggaaaggacggcggtgtgttgttttagcagatggattctacgagtggcagcggtgtcagggaacaaaccagaggcaaccatacttcatctattttcctcaaatcaagacagagaaggtatgagcagttgtgtaaacagtatgtttggaaaagacagagaaacaaatcaaggtcatatagcaatgtttctgcaaacattataggacacatataatgttgattctactcattggtgtataatataaggtatgttaagcatactctctgctgttactacaacaagaatgcttaatgtcacatttctcaaaactatcttatcattaatacagaactacagtttatttttgagattataatatgattgcaacatttctccctttctttcctctaaactctcccatatacccctcatgtcccatggcctattttttattgttattgcatgtaaatatatatatttacattcctaagtataccctgctcaatctgtatacattggagtatatgtatgttttcagtgctgaccatctggctctggacacaagctggtgtgctcttccctgggaaagacatttctcc

SEQ ID NO: 31534 - DNA, 1140 bp, Mus musculus
tctcctaaaatcagctgtacaaccagtaaaatttgagtctgggctgtaaaactggaaaatagtttgctttctattgccatgaccaaatgaagctccaggtggagagggtgtatttaatacttatcttaatcttagtccatcatgaaggtaagtcagggcaggaactcaagcagaggccatggagacatgctgcatactggtgtgctcagttactttttccccatcaaccaataatcaagaaaatgcccacagctatgcctacagtccagtctgatacagttttctcagtttgcctttcatcttccccagtggctttagcttgtgtcaacttgacaaaaaactaaccagtacaggggaaataaggttgagaagacaacactgtctgccagttgtggaggcacaggcctataatataacctagcactgggaggcaaaggcaggaaacttcgcacaagtttaaaaccagctggtactgcataggaagatactgtctgtcagtgaaacattaaagaatagtagtatctggtgctggggggaaattgaacattttatcaaatgaatagtcaccttcatttatcttttgtgtgattgctagaatccttgagtgctatatttacctgcatttgtggctttttcaaagcaaaaagttttgggatatgtagctgtatttgaaaccaccaaaccaacgatactagcagcaaagggagcagattttgtggtattgaagcttgttacattaaataaataaattgtgctttctctgtgagaagacttaagtattttgtgatgttggtcagatatggatctttatttttgcagcatcgtcaccagtggtgtttacttcatatctgttgtcttggagataatcatgttctcatttttatttcaaaatgcttaacatttctagtttttcaatatttaaaagtttcatttgtacacacaatcaaacatgtttgagccaggaaacctagacatgtttgagatgttaaatgagttttttctttatttgtgtgtgtgggggggggtgtgtgtatttttaaagcatatttaatttttaaaaatttttatgtgcatcagtgttttgctttcatgtatgtctgtttgagggtgtcatatccccctggaactggagttacaaac

SEQ ID NO: 31535 - DNA, 1197 bp, Mus musculus
gcgctgtcttactgggctttcatgtgggtgctgggaatttgaattcaaacctcatgtttttcacatcaaaaagtattttatccactgggccgtctctttttgataggtgaggttgttgggtgactccagagttgtcttgggtagaatcatctgattagtcaaaaccaggcgagccaggcgtggttgcgcatgcctttaatcccagcactcgggaggcagaggcaggcggatttctgagttcgaggccagcctggtctacaaagtgagttccaggacagccagggctatacagagaaaccctgtcttgaaaaacaaaaaacaaacaaacaaaaaaaaaaccccaaaaaccaaaaaaccccaggcactgctaggtctgcagaagggggtgcagtgtgagtcctttttctggaaatggggttcctggtgagattcctagggaactgcacatttttggctagggaaagagactggccttaaccagtaacaggttggaattcttctctgctggtgagaggcttcaagcatattcctggggccggggcccccttccttatccctgtctgtctcttctgctttcctgccgaatgttgaaactcactaggccctgcttcacttctgtttgttgttgttgttgttgttgttgttgttattgtttttgtttttttgtgttttttttgtggtttttttgttttttgggtttttttttcgagacaggatttctcttatagccttggctgtcctggaactcactctgtagatcaggctggcctcgaactcagaaattcccctgtctctgcctcccaagtgctgggattaaaggcgtgtgccaccactgcccagcccctgcttcacttctgactcatcttgaaatgatttctgagaagcaggcaaggaccttacgtcacataagtggagacccctaaagacaaagggaccccttttaggttgctggtagctatgttggactgtgtattgctactgctgctgacaagtctacctccaaactaaacttccccacatctgtccaagcctccatcctcacttcaccccaggtctgctagagggatgtggtgccaggctctgctaatagactccagtggctgctcatcaggcagcgagctggctctgcagcagcccgggtaagctctgccctggctccagcttcggcacactcccctttctgccttatgcttcact

SEQ ID NO: 31536 - DNA, 2057 bp, Mus musculus
gctgctgctgacactcctcacaaattctgccaccctttcatatgggtacacagtcaggatctgtccctgtgactccagtcatcaacctccctccctctctctctcctatccaggaaacagaagtggaactgtacaatgaattccctgaacccatcaaactggacaagaatgaccgggccaaggcctccgcagaaagctgcagttgttgaaggggcagtgagcacagagtccttcacagaccaagaacacacacgtaggccttcaatatgcgtccctcctcctccaaacagaccagaacgtgagctctcacatccagctgccaaaagaaactccaccgaacagttacccaacacacacacatacacaaaacacactcgtgcacacaaaaacacatacacacaacacacacacagcaagcaaactccagcctgtgcctgtcagggctcctggggcagctgcccgcctcgtgggccctgtgtatggcaggcatatggcagagaccctgggtgctctggggtgcagtgggcatggaaagcttactctttttgtccactggagagtgagagaactgttcacagttcatctgtgtctaattatctgattttttttttaacggtcttgtggtcttttacccctccctccttgaaggtcctgtgggaaggctggtgcccaggctccgttctgagcaggctgttttgtatgtatctgttaatgcttgttacttttaactaatcagatctttttacagtatccatttattatgtaatgcttcttagaaaagaatcttatagtacatgttaatatatgcaaccaattaaaatgtataaattagtgtaaggaattcctggattgtgtgtttaagtcctctaacgcaggcgtgcaaggtggagggttgaaccctgtctggattacagagtgttagagactcaagtttggaagtccagctagcggcagtattctgtacagtagacacaagaattatgtacgccttttatcacagacttaagagccaaaaagcttttcatctctctgaagggaaaactgaactagacagttcccttctgtgtctaaattttccaaaaggttgatttgcttaatatagtagtgtatacaatggataaattgctgttacttcaagaattaaaattctcattttctccctttctgttttttttccttatattcaacactttatgatgcccttttgtcactatcctactcaaagaggaaaggagaacccaccagacctgtcccagtgactctacctttgttctagaaggcgctcctttcagggttgtggtacctgtaggttagcagaccctcctcctttcccacccacccaagtgtggcccagcactaacccaccgtctcttgggttgagccctggcagttctgtcccttcccgaggtcctgccctgcatcatggcttgcttcctggagcacttccccttcagaggtctacattctagggtgtaggctgagttcttctgtaaagagacgaacgtgatgccaataaaatttaacaagaacaaagaacagctgctgtctgtctttttctctcaaagatcaagctatgtggggacattctgtatgttcatgggactcttggtgctcagaggcaagggggtgatccctagactacctaccctagtgtggatctttttcttagccactggaaacaaaaccgtggcctttactctggttattttgctgttttcctttctccctatcacaagccagattgatttgggctgttgaagacattttgagacaaaatatggttgggtgtgaagtaggaaggccctctccagagccagctcattgtgctcaagcagcccatgacaacttaatgtacacacaaaaagcatttttctctaagactgaactggcagattgcaatgagcaggaaactcactgagttctggctgcaccctaagtacctggccccctcattttgcccagatgaatcgtacctactgagtcgtgcattgggaagtttctaaactccagttcatccatggtcacgaaggttcaaactgacatggtatctgtctcta

SEQ ID NO: 31537 - DNA, 1230 bp, Mus musculus
tttccacatttaccataaattaacaacccgggagactcaaaataaccaaatcctatgctcaaaacaccgtccgctgttgtgggaatcaatggctttggggcagcaaccctgtgtagtttccagagttggaagctgaagaaagtgactcttaaggtgtctcacttcactgcggcccagtcagcatgttaggtgcttcctttctgatactcaaaaaggctactaagaaatcaagctatggccaagccatatatatatggtgcacatatttaatcctagcagtcaggaggcagagacagaggcagtggtgggtctctgtgagttctagacctgcctagtctacatagtgagactttgtaaaaagaagtttttacaacaggtatccaccggtatagtgttattcatctcaaaaagtgataccagccaggcaatggtggtgcacacctttaatcttgggattaaagtacttaggaggcagaggctgacagatctcttaagtttgaggacagccagggctacatggagaaaccctgtctcgaaaaacaaaacaaaaaggtgatgctagatcttcagtgagactgaaaccttgctgagtcaacacagactctgggacggtggggttgggagtaagactccatatgtatgtatgtatgtatgtatgtatgtatgtatgtatgtaatgtatggtttagagtatgagaaaactctagataggacaggtggctgaaggaagctgtctccgagggttcagcttccttacacagcctgtgggtgtttttcttatcagtgtcactgagcttaataggctgtcatgcactatgggggtggggtgggggtggggcagcattgggcagtgagaataggcagactttgtctgatagttgatcttggttgctgacttcatttgactgagagatacttaggaaatgtataaggcttgtctctgagtgtgtctgtgatggcatttccagaagtgatttttttattgtattgattttattgtgtgtatatgtgtgtgcatgtcccagcatatatgtggaggtcagaggacaactttcacaaactggttctctccttccaggctttaggaccggggattgagctcaggtcatcaggtttggaggcaagagcccttatctgctgagccatctcactgaccccagagacagttaagtagggagacagtctttgaatgtgggtggcaccatctcataccttttggtgggaggtgga

SEQ ID NO: 31538 - DNA, 1152 bp, Mus musculus
tttcccttcaaatataaactttaacttatcttactttatttggttttatttttcaagatagggtttctctgtgaagccgtggctgtcctggatggaactcactctgaagtccaggctggcattagagatctgcctgcttttgtccctcaagtatgaggattaaaggcatgtaccaccccagtgccctacttttttttttttttttttttctagacagggtttctctgcgtatccctggctgtcctgcctctgcctcccaagtgctgggattaaaggcgtgtgccaccactcctggccccacatggaaataaatataaaaataagagaattttcacaaattttcactccttgtgcctttttcaatccattatctccttactgctgttaactcaagtgtactggttttttttcatctttgtaaagctatttattgagcatcttctccaaccccggtcccatcccactcccacgctcaggacatgaagccagctgcagctgatttctaacacggtgactaatcttgcttggtttggattcctttgtgtgaatggaatcatgcactgtgcagtcattctctgtatctctgaaacctgtgtcatgtgtggttttaattccattttcattacactgtaatatttcattggtgatgtggcgtgcatctgaagtcttgttactctggaagctggtgcaggaccatctcttgagcctaggagttcaaggtcagcctggggagctaacatatgaaggaaagcctgtgtttttcctttttcttttttttggtttttcgaggcagggtttctctgtgtagtcctggctgtcctggaactcactcagtagaccaggctggcctggaattcagaaatccacctgcctttgcctcctgggattcggtgtgcaaagccacgcccggctctgtttcaaaatataaatgaatgaataaaaagtggaaaggcagggctttagtctgtgtgtctgtctgtgttccatgaacccagtagtttaaacagcagcagtgtattccttacagttctggagactatgtacctgagctgcgggtggacagaaacctcttttctgtccttcatactagcacccttgtttgtgtgtgttctgaccacctccttttagctatgctaagggccagccctaatg

SEQ ID NO: 31539 - DNA, 1209 bp, Mus musculus
gccagtgacttcgccttggactcctacaactgtgataaatgtcaacaggtatctgaggttaatatcatcaaccttggttagttgcttaaggtttctgccatcactcacattaatggttgaactaaatattagaggagagacttgagtttctggaaatttcccattttcctttaaacttttgcccacttagcattcgtatcactatagagaaggcaaagttagttccttagactaagctatagtatactgtttttgagctgagaggccagagttattttgcataagcatgaaggaaacagacaggatataaggaaatcaggggtgaatacggctattaagcgccccaagaagtacgcctgcactttaagattttcaatcaggcgccccacgatcgcccggttgccctggagacggggtcctttctgaccgggcccagccatcttgtggtgctgttggccaatcagcggttgcgccgtggcgggggggcggggcgcgtgtcggtggcgctcagctcgcggtcatggagtcgccggtcgccttgctgttgctgctgctgctatgtctcggggccttggccccgacgcccggcagcgcctcctcggaggctccgccgctggtcaacgaggacgtgaagcgcacggtggacctgagcagccacctagccaaggtgacggctgaggtggtcctggtacacccgggcggcggctccacatcacgagccagctctttcgttctggccctggagccagaactggagtcgcggcttgcgcacctaggcgtgcaggtgagcggagggaggagccggcgaacctcacgcgggatgcctgaggcgatcggggatccctggggaggggcggggaggttgagggcgttagggatcctccaggtgtctggttgtctgaaaggcaggtgttggagggggacagcggagaggttggggtccgccgtctctcttgtccgcgtgtcctctcggacacgtcagcacaagcttccgagcgtggggcaccgcccacgtggctgctctggagcccaaggcgaccccttggtcccctggcgacctccttccgcaccccaagaggatcttggctgtggccgggtgcggtacttcgggtacccagcttcttttctgtcccctggacttgctcgtctagtggaggactatcagtgagttaagacaatttatttcctgaatgcaattgactggtgtag

SEQ ID NO: 31540 - DNA, 1227 bp, Mus musculus
ggaattgaactcaggacctctggaaaagcagtcaatgctcttaacaactgagccatctcttcagcccctcccagggtcttcagacagtcctaatgtagctctggctgacctcattctccctctgtcactaacggctcttgaagccctcgtttttcagtgctgggattagagatctgtcacttgattgtctttggtagtccttacactcttgctattaaaacctgaggtgagcatctggacatctgtctttaaagacttacgttaatattttaaaggtggtaacttttatcttgagcataaaatttactgtgactttgaatatctctgttttcagtatctttaatctttttttttttttttttttttttttttgagacaaggtctatgcagccttggctggcctagagtttgcattatagaccatgctggcttagaactcacagggatctgcttgcctctgtcttttgaatactaaggttaaaggtgtgtgccaccatgcctagccagtgttataaattttaattctctttcttcctccagtgggagatttttcacggtcaagctcccagttgctcttgatcctgggtccaagatctcggtcgttgtggaaactgtctacacccatgtgcttcatccgtatccgactcagataactcagtcagagaaacagttcgtcgtgtttgagggcaaccattatttctactctccctatccaacaaagacccagaccatgcgagtgaaactggcgtcccgaaatgtggaaagctataccaagctggggaacccctcgagatctgaggacgtccttgattatgggccttttaaagacatccctgcctacagtcaggtaggtttcagagaccatctcaccgccatgcttggatgggatatgctaagtcgcattctgacactcctctgaacctatcttgaagtgactcttactcccgttaacttcttgagaactgagtttagaggctggcaagtgagcatcatgggagaaggcagtgagctattctgggtaggttagtgatggacaagagagacactggggtggctgtgtaccagaggctgaggtaagaaccttgggtttgggactgaggaagagaaagcaattcatgattaaaattttgttgtggggtcaggtggtatagtggtatatgccctcattcccagtactctggaggcagagactgggggagtctcttgagtttgaggccagtctggtct

SEQ ID NO: 31541 - DNA, 1149 bp, Mus musculus
tggtaggagcagacagacacttacagggctcctgtccttagtgcgagctgctaatacttttgtgtcactttatctagtttctggtctctgttggttcatataactactctgattagcagggtgacgtgcactttgactgttcacgggaggagttgtttcttcaagctaaattaccgtgatgttactcttacggggactttaagcctggccagaaagtaatatctgtgccctagccctgaaagagactgtgatttgtataaggaaagagcattccgaataactcccaaggcattcttcaggttctgggagaatctggtggactgtactgggaagctgcacactgtccttgtgagcactggagggagatgagtccagtcttgggctgaatcagcagcaggaggaaagggctgccagatgctggcagtaggcagggtgaagtgtgtgaatttagcttcttgctgccccttcgtcttagaattgtgcagcccacaccgtcgtgtgttggtgtggtttgttgaggctgtgactgtgtttgtgtgtcccaggaacatccaggtggacagtccctacgatatcagccgggccccagacgagctgcattatacctacctagacacgttcggccgcccggtgattgtggcttacaagaagaatctcgtcgagcaacacattcaggacattgtggtgagtggctctgctgtttgtggttggggttgtgggcaggacgtgagctgctcttctctgaccttcgcctttctctgtcctggctcacacgcaggtgcactacacgttcaacaaggttctcatgctgcaggagccgctgctggtcgtggccgccttctacatcctgttcttcaccgtcatcatctacgtccgtctggacttttccatcaccaaggtactctgctctcttcctctgtgtcaggcgtcctagtgcccccgtgatgtgtcacacacatctccaccgtaagatacccaggaccttgtacctctgagaatgcaatcaccagcacgccatgttaagtctctgcttcctgccttgttttggttgtagaagcaacctggacactaggtgaggtcagaacgtggttgagtgactggtggtggtggctctgctgttttgctccttgttactcttctgaacatgga

SEQ ID NO: 31542 - DNA, 1137 bp, Mus musculus
cagcctggactgggggtggcctctaagggatgttaatggcaggaagagtccacgatgtttcctgaagtccttgaaaaccttagaaggagtgatacaagatggcctccctgaagtcttccatggctagagctgagctctcctgccagtttcatgcctcagtctaccattcttgtcctgtcatgtcctgtcatgtccatgtgcccagggaactggaaagtgaagcctcgtccagtctttgttgttgagcatggtcctcactatgtgtcagaaggggttgactcctggtgttctgaggtgacttctgttggctggtggcagtaggcatcctctggcaggtaggtcggagtgagcctgttgacagacatgtcatctctctaccttccaggatccagctgcagaagccaggatgaaagtggcctgtatcacagagcaggtcttaaccctggtcaacaagaggctgggcctctaccgtcactttgatgagactgtcaatagatacaagcagtcccgggatatctctaccctcaacagtggcaagaagagcctagagacagagcacaaggctgtgaccagcgagattgctgtactgcagtctcggctgaagacggagggctcagacctgtgtgacagggtgagtgttagtgctgtgagtcacttttctgtggaaaagtacacgctgtgctccaggaactatttctggctgaaagcagcatccacccgactccttgggctaggcaaggctccagtggctctcctgtcccatatgtgcagaaccacaggctcatcaagtgctgccagtgcatgtggtgggacagaaagcttttggtatctgtaggctggcttggagaagttctgcagctgtgtccttggggctggcagggcagtgcttctcctcccagataccagtcttcagctctgggtggccatgcctgtaacctcagcacgctggacgtgtgtatatgtgtgggagtgtgtattttcagatgacatccacccagggcacataatatcctggccaaagggtaagaccttgtttttaaaagtaaataaataaaccaaatgcatccagacataaatcccaggctctgatctagactctcaatgtgagcagattatctaatttctctgtttcccttt

SEQ ID NO: 31543 - DNA, 1649 bp, Mus musculus
ctccctgttagctcctccacccccaccttgcctctcatccgtgccctttagttcctttagagcacccaccatggaacaattattcatgtgcctagagggtttatgtgtcagctccttgagggcggaaagaacactttctcctttgctgctttctggagcctggcacttgggacagcagaagtggtctggtcctaacagatgtctggccccagtaaagagaagacacttagggagcccgctgtgcccaggcgcgatgctggggttccgtggctttatcttgcttgtcatttgaaaagaatgtgccatgtaaatgatgaggccactgttttgacctgggcagttttcctacttgccagctctcttccataggcgctacttttgctgagtttttgaatcttcttgtgtcactttggatatgtaggcctggggggaggggggcagtggggctgttgagtggggtgaggggacggctcccaaaccctgtcctgttcttgtctctgccaggtgagtgagatgcagaagctggacgcccaggtcaaggagctggtcctgaagtcggcggtagaagcagagaggctggtggctggcaagctcaagaaggatacgtacctggaaaacgagaagctcagctcaggaaaacgccaggagctggtcaccaagatcgaccacatcctggatgctctgtagctcctggctccagagcaggcccaggtgcctagacttccagtggcattggataggtagaaagaggaggttgtggttagcccaaggcctcaagacaccactgaggcctgtccgtggcagtggcctatccgtggcactgcgggaagcttgtcccttatttctgaatggttcccttttttttaaaaaagcaaaaacctagacaaaaaattctgtttaaaagacaaacttggctgtgttttgagcacaggcgtttcagcagttgatgggtggtttctgttttgacagctggggatttttctgtcttcaagtcctgttttatggtcttctgatttctaatgtttgggtcttttgtgagcgtatgcatggttttttaaaagtgtgtatgaccaaatgaaaataaaggagggactgtgaacatttgcttttgctgtactgaaaaatctctcatgtaattctgaagtttggggatattgcttttatcaagatgggttttcttgttgtgtgtgcaaggcaagtgtcagaacactgatacaagtctcgagaggcccagtaaggtccggaggccacacaacaggggtggagtgagcctttgtattccttaaatctgtgccacacgtgctgagcattagaaactgtgatgggcgagcagtcatggttcataatctccaattggccacactgtgaggaagtcatggactggagaacactgggctaagtctgggtgggtgtgtgtttgaggggaggggagtccagagctgagccttaagaaccgtgcaggccagtgttccaggcagtgggcagtgtgtgtgaagggccctggtgcttgaggacccacagagggcctgtactagagtggatattacaggttatgacagggctgcagaggtgcaagtccagaacaagatagcttcataggtctctaaggctctggcttactttatatcagggcagactgagcactgggc

SEQ ID NO: 31544 - DNA, 1246 bp, Mus musculus
ctgcccctggaagccagccttccaccctctcacctggagtttcccctcgtccatttgtcctttccatttgtccttcactcacatgctttccctcaagcacggtgccagctactggcgatctcttaagtgcatgaccttgtggagtaggtggggatagacaggcagatgttaacagcagagagtggactgtagtgataggtggggagactcagccatacagaagagagctctgtagaggtctgcctgctatgggtgcctggcactggagtgtggcatggcaggcagggcctggatgacatctggaaaccagatgaagactcttggagcttggagcttggggaagaactgtacatgaggaccgtagggcagatgtcctacagcagctgcctcagctgcagcatggaggcctcagcaggtccctcttctcactgagttaagttgcagcaatggtactctggcctgtgccagcttgcaaggtggccctggaggatgccagtggtgtagcccctgtacccataggtgtttatagcagcatttcttttccagctcctgaagtcccagatttccatcccaacgagagacccctctggaccattccttatgtctgtggaccactgcttctccatcaagggtcaaggcaccgtgatgactgggactatcctctcaggcactatcagccttggggacagtgtggagatccctgccctcaaggtcagtcctgccttgactttcatttgtctcatacaccccccaccccccaataacagtaggagagaggccaggcccttggtcttcagggcaacagagtctaatgaacctttctcaagttctcttctacctaagggatgaggtagcctgcccctctgtgacaccatctgttattcaaccctctggcttcctggattctagaactactgttttccctagtctcatagtagtgactgtatagtgtgagctagtggtggcccacaaaagagattcctaaaataaaccaagtcttcaggggtagggtgagcttgaaagcacatggtcaagaacctagggtgctgggtgaaagtccaagctttctgaatattggcaaaaatatgtgtagaactatctctatgcttcataccccagccttaaatctgtagccttaaatttatgattctcttgccttggcctctccagcactgagattcatatgaggggtgtatgtgtgtgtatgcacacaagccaccaaatctggctttagatctctgggcac

SEQ ID NO: 31545 - DNA, 1170 bp, Mus musculus
cattggtacaaagcatgagaaagctatgtttagaagaaaagacagcatggggctgggagggattatgaactgctttttccttcttccctgacagtgttattgttagttttgttttaatgaagatggcttaagtaagggattctcctcagcgagaagggatttctagatgcagctttaggaactttgggatcaccagtagtcctaaatttcagagaaccagattgtatggatcttttaaagagcttgtagtttacgacctgcctagatccctgctgcttcctgagggggctcaggaggagttgaatttctaggtgaacctcttaggttctgatctaagtctttctttgtaggacttctgtttcacctggcaatgcagagcagtggtgctaccttcccatgctcacctgcaggctgaagaggaggcacgtggcgtgctcggtgatgtgccagcagctctgctgtctgtgccgggctgtgctgacagcctctgtgactgtcctgatggttgttctatttcagattccggggtgcaccgattattcccgtggcagccaaacctgggggaccagaagcccctgaaactgaagctccacagggcatctcagaactcattgaggtactgtcagcttgaacctaggctgctctctgccccaaccctgctcaagtagttctccatgttccactctgcctaagagggagggagaggcaatcctaggaagaggtctccaagggcctctctctcactctgatatcagactcttcacctcccttggaaactgcaaaacaaaggtccatagaagccctggacattggactctgcaaagttcttcctacccactgtgtttcctattctgcccctcctctttcacacttctttcagacaaagcagtgcctttctctgttacctgtccctcaagcctcccattgcccccaccccttcctctcactctcagagaagactcagtcttgtacgcatatctgatcacaagctccattcctgtccttcagattgtgcagtctgcctccacctaaagctggagcagcacagcacagcctccatcctggcagcctccactggaggagtagacttttttttttttttttttgtagaactatgggctcaggctgtttttccaggctcagtggcaatgggcagaaacggaaccgaat

SEQ ID NO: 31546 - DNA, 1196 bp, Mus musculus
taagatcccggagtgctaagttcttaggaacctgggaagtcagcagtgattatggggttcaactgatcactatgaaagaccacatactgatgaatttcctggggtcagcaagactcctcaagtctgggggagagctctggtgctgctctgccctgtcgatgttcaagacttgctgatgcttgttccatcctgcctctctctcctcccccagttagccagttcaccctccactacttgtttgttttctcttgatgtgactgtgatggtactagcacaaagtccttgtgggctttgctgctggtttcatgaacatatggtgattgagaccagaccttacttgtcatgtgtcatttgaagcaggcttgcaggctgcaaaacctccttgcctgacttcttggctttatttctttccttgggcttcttaatatcctaaaggtagggctaggtgaccttattctgtaagtttgatgacacagaaagagtttcatcatcatgttatcaagttcatttagcagtccctaagagatctgcatgcaaggaaggcagaagttaccctagcctcccagacaggtgggaggcaggtattaggaagtaacaaaaccataaagattgtgagttatggtcagtaccaaggacagtacaggactgttggctttggggtatctcccttacaccttcctgaggcagtaggattgaaagtaaattctggaaaagtgtggggcctgtgactggtgagttggggatggatactacatgtcagaggagcagcgcctgcagtggctctgaggagggcaggttgggctggtctgtaatggggagagggggtggtaggcagtcatggctatctttggacagatatgcacacttggattctgttagccctggttttgctggaggacaagcaatggtatattgtgatccatggacacagagagacattcacactagccctctacaggtggttggccataccaggttttctttactggcttttatgtgtccttagtcctgccggtttctgttaccaggcctcagattcatgtgggtgtttcctgcccttttcttaaaattttaatgtttttattgtagtattggagaatcgaatctcaggcctcctgtgtactgggaacactctgtactactttcctgtagtagagcaatgggctgaggtggaaatagggttggcaggcaattct

SEQ ID NO: 31547 - DNA, 2220 bp, Mus musculus
aggtacatccccacagccgcagcctttggtgggctgtgcattggggccctctctgtcctggctgacttcctgggtgctatcgggtctggaactgggatcctgcttgcggtcaccatcatctaccagtactttgagatcttcgtcaaggaacagagcgaggtgggcagcatgggagcccttctcttctgagccttgcgtgcccgtggaccagggtgagggcacaggctccagaactgcccaggaagggtgctcttactgctggagcatgctactgtggcatagggactttaatttttttttttaattttttttaaaatttcatatcttttcattccactgtgtaaagtgctaggaaatttccaatttgaaattttgctttttctggcattggcaaaaaaccagtagaagtgaattgttagctgatggccagggggtgtgataacaaattgtcctcaagtatcccatgtaatttttatttaaacccttgcacttctcagtgcctggcagctgcaagggtcccagctgccccgaggcagtctgtggccctggttgaaggaagcacaaactagatgtctgcatctcatctgggcgtgcagacaggtgaggatcagcagggtccacgtgtctgctgttgccagcaaagggggtcactggctttacctggagcctggccagctaggtagctggacgtatataaagggtcctcgtgcttgttctttgccagttcccactagaaaaggcgctcctgtggtggccacctctgtcttcctactgagaacttcctgttccaggttttagaattttcttattgtcgttaggaccaaatgtagactggctcaggacctgtaaggaaatcacaggttcagagatctcttagggaagttgctcaaaatcctgtttgtagttaaggtgtctggggtaacagataacatgggcctgagggagccctcaggtctataggaaaggcccctcttaagacagaaacggtttaacagcaagggtacaaaggctgtagtttgaggccagagcaattagcgcttgtcagcttaccttacaacacagagggtccagctgttcacacaagggggcaggagctctggtgggtgtgcagccatgtggtcacagcctgccagcagcaagacacctgggtccaccacacctcagtggaagtagcagaatgcctccctgacccggggctcttagggactcttgctgctatgcttgccagcaaatggcaatcaagggacaattagccacttgccccgacacaggtcagcatcagggccagatcccttgcacacagcccagggcgcacaccatatcacacgtggccttgtctagacccagtcctgagcagaggagcctggtgccctcccagtccacagggtcttcccactgcccctcctctgccactgccacagagcagcttcccacctaccctagggactccacagcttctggcaagcaggtgcagagtccccagctctgggctgtgctggggagtgtcaggcctggagtccacagcctcacctgctgctgtagctgtcagctggacctggtggcttgtggttgatggtcactattagtgggtgagtggggatgacctggcttccaagaggactgtcactgtggacaccaaaatggcttaactgagatacagtgaaaacatgacaaataaaccaactttttacaagctgcctcgtcatctttgtaaacggagagcagaaagcttgttgtgagtgttggaggtgaaccagggcagtcagcacctgtgacaactcctgggacctactatgtcaatctctgcctgccggcctcttcctgggaccagagggtggagtccctgtacaccagcagggagcagtatgcacctgggtcctgaagggcactggaggttgctgcccaagccaggtaggtgacccagttgttaggagctgctaggtttaactgttcaggctcagagcacagctgttaaccagagagtctgaggctgctctggggccagagcctggtggggacaggtgacctgggtggtacacctaggatgcctgccagcaactttctgtttacacacctcagcaagggacaggcgacagaacagttcttgggcaagactaggacagtgaacccagcaagcccctacacatgctgttctgtactgctttggaacgttctctgctgtgttgagcctgactgtagaatcctggcctgagcagtggc

SEQ ID NO: 31548 - DNA, 1517 bp, Mus musculus
tcagaggaaatgggatcaatagccaggccactggcactgtgggttccctttcaagacacctgaaatataaacttagatccaaaaggattggttttatcccaaagtcttgtacgctctggactggacctgaatggtgagctttcaaggtagtccacctacggctcagtgtagaggtcttcatatcccagggtcttgtgcacctgggcttcagggacgccagcactgcattgcgtctctgaatttgcttggcattccatgcttttcctaagaccacatttgccacatgtcaactccttctacattaccaagagactggagagcagatgtgcttttgttgagggcgcctgtgttatctcaggctttgacagtgtgactgttgggattcctccagctcctcggcggcagtgtcagcactatgttttttcttctcaatgttgggcatttgggtgttcattagccacttcctcttctttgtactgtcctgctttgagaacacagctctcttgatctctagtgtttggaatgatcattactatcggtcagtccattgtgtatgtgatgacgggcatgtacggggacccttcggagatgggtgctggaatctgcctgctgatcaccattcaggtaactgttgtgctgtggcccccaacccccacccccaaataccaaatctcagctgtgccttaaaagaagctggaggttgtaggtttgcccttgttaagagcagatgaaggctgagggcacaccccactcggctttctgtttttatactcaagaactctattattgaagaagagagccacatccactgggagcagtaacatgatctatttgggtttctttacttttttcttttttccacagctctttgttgctggcttaattgtcctacttttggatgaacttctgcaaaaagggtacggcttgggctctggcatttctctcttcattgcgactaacatctgtgagaccattgtgtggaaggcattcagccccaccactgtcaacactggccgaggtaaggccccagagctcaggccgaggtagggccccagagctcaggccagagtttggcaaaggcacaagctcctggttttgctgtgcatccacggcttttaagtacaggtcagctcatgctcgtggcattttactgcccagattttcatatgcctcgtcatggttggtgtgccagatctgagtgggcctgggttctcagcacagtgagagctgcatcacaggaggaagtgccttttgttttagcctctgtcttgtgtggacttcaaggcacagccactttgttgacattgagcttgtccgcgtcctctcctttattttggcagtttactctggatcatttttaaaaaaaacaaaaggaagcaaactagaaaaaacctggaactactacaccaaagcatttgatcctgcttgccctagggctcagatctattatccgtatgtggtgtgagcacattcctctactgctgatctgggtcatcatgtagtgaggggtcatgaca

SEQ ID NO: 31549 - DNA, 1135 bp, Mus musculus
tgagtatatatgtccatactgcatttgattaactcaatttaaaaatacagtgcacattaagttggaaatcagaactatgactggatttagcataatggaaggtgggagtttgttcacagccagatatggttgtactggcccctttccagactctgggaatgcctccagtgttatcctttcttactaactgatggggagaccggcctctcttatctccatgaggctagagtaaatctgttgctgaattgaaatgcgccagtctgaataacatgtgactgcctggacagaatgagatgctgcctggcagggtgaatggattgcgttaagctgtgctctggtcattgatatttgggggttgttctgtaagttaactgctgctagcaaactgaatgctgttgcagttgtacattagtgccctagtgttgatcagggtttaacagtgtttgttcttccaagcttattgtggctgtgtcttgcctcccttcctcaaggtaccttaatggagctgggcatctctcctattgtcacctccggtcttatcatgcagctcttagctggtgccaagataattgaagttggggacaccccgaaagaccgagctctcttcaatggagcccagaagtgtaagaaatactgtagattctgctgtccgcagttgcccgtgtgaatttgctataaagcttctggggttgaagcagctgtgctctgctctgacctccttggctgcccctctgcgtccagggctggggctaggaagaggcaggatgggtgcaaggagcagggctgggagctcaccgtgtacagttggcactcacacatcagagcttcactgaaccaagctcctgtctgtgtgaagcggggtcagggaagagaggcactgctgtgtgtcctgtgtgacctgtgctccttatcagctttgaagtgaagaaagtgaggtggtcgttctgaaggttcagtttttcatctacagagatagtgatgtttgctatacagcaagtgataggtgtaactggtaaccatggctagctaccagcattggtgtccttcctctgaactggaatcggttattcaggaataagttttcaaaccttttctgcctgaagaattcatgagtattagactgggtgtgtaactc

SEQ ID NO: 31550 - DNA, 1352 bp, Mus musculus
tcctgggaagggccctctgccccctctggtgaccctgaccatgcatagcagtcagaggctggccacctactataggtcataaggtcactgtgcccctcaacagggcccaagcactgcatgcagggaaggaagggcccaggagctgtccagagccccctcttagctctccttctgtttagaaaatgaagacagaaagagtgtgggaagaggggcagccagcactccctcctgctcagggaaccctggacagcagtggacgggcatggggtattttggctctccattaagttaaaaccattccagactactgtgctcagatctgtgactctcaccaggagccacccaaggctgctcccaaaagcacactgacaatgccacttttccaaaccaaacgccagctggcggctttcatgcatgacatcatttagagatgcatttgtatctggttaaagaaccactaacactaaaacccaggggtgggatgatcagaagttaagactgtcttgtgaagcctgtaagagtcatgttaagagtcatgtccctgcatgacagcaccggggctccctctgtagagagctaggccagtctcgtcagactccgcccctgtcactggaggaagcctgaccagcagggcttcacagtcacccccatcaccacaggatgcagaggaattggggtacggaaaaaatgctaggacacacaaggctcggcctgaagaaggtggaagccagcaagaaaccgccgatggtcctcccccgggtgaaggaggggagccagaacccgcaagaacagagcatctgtgggcttttccaacaaccatggacttagggcctgaaaagctttttagaaggtgccacctgcaggcagtggaacatctcaaccactaagccccagttccttagagataggggaacagcctccctccaccatgtgagcatcgggggagtgctctgctcacatcctgcctctgggccacctcacacttccctttctctcctgattgctaatgtaactttctaaggatcacagtgggtcactggtttgtcactgtcactgcgcccagtcactccccacgtatactcctagtggggaacctgtatcggcttagaattactaaagaagccaatgtgcactacagctcaccgtaataaaaaccacgtgcttttggagaggcctgtgtctgcgtgtctgtctgtctgcctggcctctcgtcctatgtgtcaactcctcttgctaagagaacttcaggcctgtgctggaagcagtgaagttgtgtgcttgtcacctggtgagaaggactcggcagccctttccagggtcaaaggtcaattcaatacctggattttttattc

SEQ ID NO: 31551 - DNA, 1200 bp, Mus musculus
gcgccgagaccgtgatctccgtgggcaggcagggaagagaaggatcctgacccttttctttgatagactcctttctcccatggcccttccttccaagtcccctggtcctcaacagatgtgaccaagctgcagctctctccgacaccagatgccacctcagagttaatgatccgtccctcaatttgaatgcagctctgagagttcaggtcttgcctcagatagcctccttgggctgccatgtcccagtgatcgctttctggttcatgacctcttctcctcaacattttatcaattgttttttccacttcttccatagatctgttctgttcccctccttccccgcccccagtgcctgcatcagctttcttctgacttccctgccattggctccccaggctgaattaggggccccatcaccttctctctcccagatattaaaagaccaaattctcagccttctgaacctggggcttggcctctgtccatgaagccatcacccaactcacagttgcagacccttgcagacctgtgtagtcccaggccttacccttctcagaggcattccctagcccagagagatgtggcctccttccccttcctggttgtctctctcccagatgagaagcaattctgacccaggctttgaacttcctgcccaggtacctgctggagcagcgagacgtggaggtgaacgtgcgggataagtgggacagcacccctttgtgagtgtgagcggtggggtagctgggtgggcagggtgggcctaccctactgacagcttccccctttcctaggtactatgcctgcctctgtgggcatgaggagttggtgcgctacctgttggctaatggtgagagagggtcagggtctgcctgtaagctctgagaccttgctccatgtttgtatgcacccttgatttcttgttaactccctaaagtcaacacatagtactctctaaccctctatccactttctcacgttacccttgacacccaggccagttctggggctgtctcctgtactgtaccaccattggtctgctaaactgactctctgatctccatatttgcaggcaggaggatctttccacagcaaagctgatgggagtgtttgggataaaagcacgtgggcatggttgcccacacctgcaattaaattattgggagagagaaaagtcgagacagggattatcttaagttc

SEQ ID NO: 31552 - DNA, 1959 bp, Mus musculus
atacctgagaaggatctgatggacaaggtatgcaagagctgggtggggcggggcggggcgggccagggcagggcagggcttgttgctctggggagctcttggccatttggggtgtaccatcagtaacaggcttgagctagcgataggcaaagggaaacaggtaccagcagccttgtccgagtacctgtggctggtgaagctcaggtctggagctctgaaccaacacagcccttccagaggtgaaggccggcgtcttctcctgctaatggctctgatgctgttctttctccaggccaggcagatcaatattcacaacctctctgccttctacgacagcgacctcttcaaattcaacaagttcagccgtgacctgaaacgcaaactgatcctacagcagttctgagaccagcacaggggcctctatgtctgaatgaggctcggtcaccacgctgagcctacgtcacttcccacttccactggggcttggtgccctgtaggggtgggaggatggcttaatgcagacctttacctgtgagcccctaggccaaggctgtagcattaaatgactatttattcttctgcccccctctagagcactcttcttggccagaccctctgtccaaggctcattagaaggctggggttgtgttcaggtgacagactttatcaaaactattgctgttttggcatgagttgtgtttctggactgttttgttttcccctttagacaaagagcaacttagaagtatttgcaaacttttccagaacattctcaaagcctgtgatggaggagcacaagaccctgtctgctgagggcccatgctcctctcatgggtttcttcccacctagccagtgccttcatttgcttgttgtacagtttcttgtagtttattttttaatagatttgaataaaacctaaatagcgctatccctttggttctggtttaatgtaccaacaaggcttccctgagctttttgaaggccctttctgcctgccctcagtttcaaaatgaagtaggtctggttagatctgctttgtggatgtgtcctgtactttgggttttaaatgtcccccttaagggtcattgctaatgcgatagccgtctctccctccctcccttcctcccttctctctctctctctctctctctctctttctctctctctctctttctttcttcctctgcatttattttatgctgaatttattcctgggccatgagattttgtttcttctgggatatctttttcttctgtgcagcctcctcttctggctttggaacgatctgttccttctctgagatcatctcactgtggcagggggagctcatgtatgggttaatccggccatgagctctgtaggttcgtcagcgcatcttaggtgccttgttcacctggatgtgttcaatggctagaaaatccatgtccaaacccttaagttcagcatgactctgcatttttaagcatatgcagcaaaaatttagcactctttggtcaccgtccctgtgtccagcctcactgtttggcctgggctcacccactgactccaccattacaccgctggaatggcacacattgcttctttataaagagacgtccttcagatacttggtggctttgcggatatgcatacccttggtggcctgggcagtttcccgggtgttcttaaagtgaactcgaaggtttgaacctcttgatttgcatgattttgggggaggggggttctgggtcaagagaatagcgaaccatcttcacaggtcatctctggctgcttacaggaagagaaagcacaaaggctactgggagaattcatgagacctaagatattagccttttttcaattcaaggtctcaccatgtaaacctggctagcctggaattcagtatggagttctacctgtctctgcctcctggaattaaaggcgtgtaccccagtctagctcaatgctaattcaccag

SEQ ID NO: 31553 - DNA, 1179 bp, Mus musculus
tagactggggtacacgcctttaattccaggaggcagagacaggtagaactccatactgaattccaggctagccaggtttacatggtgagaccttgaattgaaaaaaggctaatatcttaggtctcatgaattctcccagtagcctttgtgctttctcttcctgtaagcagccagagatgacctgtgaagatggttcgctattctcttgacccagaacccccctcccccaaaatcatgcaaatcaagaggttcaaaccttcgagttcactttaagaacacccgggaaactgcccaggccaccaagggtatgcatatccgcaaagccaccaagtatctgaaggacgtctctttataaagaagcaatgtgtgccattccagcggtgtaatggtggagtcagtgggtgagcccaggccaaacagtgaggctggacacagggacggtgaccaaagagtgctaaatttttgctgcatatgcttaaaaatgcagagtcatgctgaacttaagggtttggacatggattttctagccattgaacacatccaggtgaacaaggcacctaagatgcgctgacgaacctacagagctcatggccggattaacccatacatgagctccccctgccacagtgagatgatctcagagaaggaacagatcgttccaaagccagaagaggaggctgcacagaagaaaaagatatcccagaagaaacaaaatctcatggcccaggaataaattcagcataaaataaatgcagaggaagaaagaaagagagagagagagaaagagagagagagagagagagagagagaagggaggaagggagggagggagagacggctatcgcattagcaatgacccttaagggggacatttaaaacccaaagtacaggacacatccacaaagcagatctaaccagacctacttcattttgaaactgagggcaggcagaaagggccttcaaaaagctcagggaagccttgttggtacattaaaccagaaccaaagggatagcgctatttaggttttattcaaatctattaaaaaataaactacaagaaactgtacaacaagcaaatgaaggcactggctaggtgggaagaaacccatgagaggagcatgggccctcagcagacagggtcttgtgctcctccatcacaggctttgagaatgttctgga

SEQ ID NO: 31554 - DNA, 1101 bp, Mus musculus
gtaggaacttaaatttcttacctgcctgttaggttcagtttcatgaatctccctctatccctcagatctttgccagcattgcaccctccatctatgggcatgaagacatcaagagaggcctggctctggccctgtttggaggggagcccaagaacccaggtgagccccaccccccttgccagccctcactgaggggattaagcataagagttaacaagaggctgcagggagcgtggacatgctcaccctggtccactctgatgggctgtctctgctgcttggctgtggtctctctctctttgctgaggaacaggtttgagttggagggatctagcctgtcctctggccctcctcctgcaggtggaaagcacaaggttcgaggtgacattaatgtgctcttgtgtggggaccctggcacagcaaagtcccaattcctcaaatacatcgagaaagtgtctagccgtgccatcttcaccactggccagggtgcgtcagcagtgggtctcaccgcgtacgttcagcggcatcccgtcagcagagagtggaccttagaggcgggagccctggttctggctgaccggggggtgtgtctcattgacgagtttgacaaggtgggtatctgggctctggggctgagctctctgtggtgggagggctttattagagagtattaaggcctcttgggatgccctgtgttgtgtagatgaatgaccaggacaggaccagcatccacgaggccatggaacagcaaagcatctccatctccaaggctggcatcgttacctcgctgcaagcccgctgcactgtcatagctgctgccaaccccataggtatgcctgctgtagtacaggcctgggaatgacagcacacacagccccatccaacatgacctaccagagggggacagaggaaggacgtgggaacccagggtgattgtccatctgttccttacaccacctttgggtgctttgattctttgtccagatggggctggagctgcacccatgcccagccaggaggtgactaacacctaggggcccgtttatcttattagagtagaactttgctttggagcagctctggttttaatggaatgaggca

SEQ ID NO: 31555 - DNA, 1106 bp, Mus musculus
agactcccttttccatcctgggggcttcggcctccttgacggagttcctaaatcatattcttcaaactttcaacttcctgtttgcagctgtccagcaaggactttgtaagcccgtggagcagacctaattcttaagtgggttgtttggggattcattgtccactgttggtctcttgcagagactaccgtcccattccggagctcgatgtctacgaggccgagggattggccctggatgatgaagatgtggaggagctgacagccagtcagagagaggcagctgagcggaccatgaggcagcgggaccgtgaggctggcagaggcctgggacgcatgcgccgggggctgctctatggtatgtgtggtgggcatcccagaggtgccacttggacgtccaaagcatcaggaatggggaagacgtgggcagcgagtgttgtgtagaggatgctgggagaggcttgctcacgggggtgctttgctacccaagacagcagcgaggaagatgaggagcggcctgcccgtaagcgccgccacgtagaacgcgccacagaggatggcgaggaggatgaagagatgatcgagagtattgagaatctggaggacctcaagggccactcggtgcgcgagtgggtgagcatggcagggcccaggctggagatccaccaccgcttcaagaacttcctgcgcacccacgtggacagccatggccacaacgtcttcaaggagcgcatcagtgatatgtgcaaaggtatggtcctgataggctggggcgagcaaggctcagaggtgcagcatctctcttgagtgaggtcctggatcagtctcagcactggggggtgaaggtggcctggcttctgtatcctgctggctctgtgtgccgcactgaactcagaatgcacaggagcattgggtgacaaggactgaacctgaggaccccaaggtctcctgtatctgcaccagagctaggctgtttggggacatgtttaaaaatgtattacgaccctgttttggtttttggagggtttggttggttggtttttgcagaatcaggttgagcctagggcctagcacattctaagccagtgttctcccactgggccactctc

SEQ ID NO: 31556 - DNA, 1198 bp, Mus musculus
taacaagtggtcatctggaaagaaactgctcagacagttgagccagtgggtgtgagcctttcagtcagccagtctggctgggttgtgttcagctgggggaaaggcatagacagatagggagggtatagtccctggacacctggaatctgctctctgaccttgctggtgtcaaggtcttggcttcctctatttctgttttattttcttcttaaaattgtaaaaacaaacaaaactatttgtttattttatgtgcattggtattttgcctacatgtgtatctctgtgagggtatcaggtcccctggaactggggttacagacagttatgagctaccatatgggtactggggattgaacccaggtcttcctgaagagtacctgtcgctcttcactgagccttgtctccagcccttaactccttttcttactgggagttaggagctctttggagatttccccatatttaaaaacaaaaacaacaaaaaacttgtgtatacttgagtgtctggtgtgtatgcgcatgagtgtatagatgcccgcagaagtcagaagaaagtgtcaaatcccctgcctgacgttggagttctacaggttggtttatgggctgcctgatcggagtgctgggaactcaggtcgcactgcgccttcgctccagcccagccccttcagttgtaaatacacagcaaagtgccttctccgtttttcgtgtatgtggctcagtggcgttcatctgcatcattccaccagaacttttttttatcgtctcaaaacttaaatcttccccccaaaacgctacctccccgtccccatttggctgtccttctgggtctgacccctctggcccccatgggagtggttatggccttatccattggtgtaatgtcaagattgatccgagcagcttcacctcttatagtccccttctgttttaaggttgagtgataatctacagtgtaggtttatccattgaccaccctgggataataccgctaaatttggttctcactatgtagccttgactggcctcaaactctcagatctgcctggcggtcttccggcactactatacctggttaaattgttttgttgttttcatttaaaacgttattttatatatgagggtgcatctgtgggtatgtacatttgagagtgcaggtgcccgctatgggtgctgggaattgaattctcattctctgcaa

SEQ ID NO: 31557 - DNA, 1191 bp, Mus musculus
ttctctctctcatgtatgtgagtgttctgtctgcatgttcacctgcatgtccgaagagagcatcagatcttataacagatggttgtgagacacttgtggtttctgggaattgaactcaggacctctggaaaggcagccagtgctcttaaccgctgagccatcatctctccagccctttggtagacattttcacagctcgccttttttgactgtcatagaatcttgctgtgattgtccctgtgactctcagaagggaagtgactcactcatcaaaggtcacagcaagcaggaggcagggccaggaatgccatcctagcctggcttgccaattccataacctacaggagatgggaaccaggcctggggacacaagcctgttgccaccctagctattaggaagctgggacaggagaatcacaggttcaaggctgggcaacatgggcagcctagggagaccctgtctcaaaagtgatgacgcaagtctcactgctcattgtccagtgcttgcctagcatagatccagtgtccagcaatgcaagacaagtaaacatctgatctatttggaaaattgagaagtcagactcaaacaccctggtagtgaaggggacctggccgtctcatgactgggaaggatgggtgtcgtatgtggcagagtccggggttactaggagtccagtgtttctctctgcatccaccttgtgactttgctctttgtgagctttctctccaaggccccagcccagagtcacacttggcctgctgacctcagcagggtgctgggactttctggttggctggatttgaaaatgctcgcatttcctgacatttgtgctgtatggagctaatcccatctaagtctgtggacagagccgaagttcggagtgcccccggggaaagtgtgcccattggctgcctggccctatcccaccttctccatcctgctgctgtctctccttcctgtctcacctagacctgtccattctctgcagtggcctaagggaccccacccacagtggcttggggtctttggaaagagccttttcagtaccgagaatgaaatcatgttataggtgtgccaccccatctgacccagtcttaccaactgttttctctttccagccgccctggcctagtcttttttgtctttggccaagtctgtttctacctcagaacttttgtatttgccattct

SEQ ID NO: 31558 - DNA, 2703 bp, Mus musculus
aggccacataagtcacagcctggggctgtcccaccagcctctactctagcaccctgtgcttgccaccaccctcagattcaccgcgtgctctgcgcggccaaggctggagtgccacatccttctgctggggagagaggccccactcccctcctatggagggcctgcagaccccacttccaagtgacatgtggacaatggctaggcgaacccttctctgtcctcagggctgtgcctctgggagctcctggtcctggggctccagtcagagtgcatgttcccgttatttattccccgcctcctgctcctatcgcagcccaccacggagctctggaggataacaggccaccgtcccaccatcctttatcctcccctcccctgatgttcccggtggcttccagtctggcctctcaacggtgtcctggcccctctgcagtgggacatctgggtactgcttttaagggaacaagaaatcctgtggtattttgccctggggatgtggggggcatttctgccaccctgctgaccatgggcagtgacccaagggactggaggtcaactgtgtccacctctgccctcaaggagcaacagtacgtttttaatggaccctgtacatatatatatgtatgtatgtgtatatatatatatgtgtgtgtggccctggccccaatggggtgctgtacaattatttgagggaagagacacggaaaggcaattcaggaggaacccaggtggaagagagcaaaaccaagggccctggagctgccatctgatgtggcctctacttcccccagatggaagaagccgctgcccacgattccgtgccccgagctttgggtgcagagctgtggacctgcatgactgtgctagcgtttagtctgagttgatcttttcaaactgcaagtgttgaatactagaggtggttagaccctttttttaaatgttttttttttaattagtcattggaaaagcaagcaagcggcctactcccttttcaagttcacctttttgatggtactaaagattataatggattttaagggacagctaactgtggccaggaccattatcagtgctggggacagcacaccccacatccatgggctgctagtcttgtggtccctcacactccaagctagggagccgatgggacagggtggaggtcagattagagctgcacctttattagctatggggcaggtacaaggactcagggagcaactcctctgtggtagtcatgagcctagacaccctgggccatgaattctggtcagactcccaccccaactctttggctcattccctgggctgatactagggtcagagcctggatatagccgtttctcagaagcccctgttgttgcctggggttttacccatggatatacccctctcttccttctgatgcctccaggctgtgcctgggtgggagcctcagtttcccctaaagtcttccctggttgtaggcttcagatggaagcccccagttcttccagctctgcctggaacacgcacagcttctaggctcaatgccttcactatccagccccacgtccccaggctccctcagaataggccagcctcactttgtcctacaggccaccttgcccatgtgggtgtcaggtaggaggtgaggtggcctggagcagcttcccagggtgtttgttcgcaagcactttagcatttctgtttacatgcgaactgccctagctgttcttaccacgcatcttctcggcacagccatcagggccaggcctcatttccctgctacttctggactgggctctgacatctgcttgtccttggtcttctagagccatccatctctgtggtatcctgcaaagggttccgtttcagcctcaatatggcttggggttggagccaactgcacactgggtggtggatgctcagagccaccctctacaggcctagggcccagggaggtgggcaagcactactccagccagcctggccctaacactcttggtactgccgtcctgccatgggccccatcccccttcctgcctggtctttccctttgcacctggactcaggagtgcctgggccattccaagctgggcctgggtgcctggcctccacatgccttgggctggctctgctctccagctgccccactctcttatggttggacagctagacagagcagcaggggtgagggccttgatgtgtccccaagagacactgcattgagtccaggcacaggccagcaacctctgttggttcagaggggtccgactgccaccctctactccagtttccccagttggatctggtggctcacatcggtgctacacaagctagagtagatatatttagagagagaaagatatttttaaggtgaagcccatgattagctgtcctttaatgccgcagaacactccctcttacccccttcctcccacccccacccaaaaaaaatccctggtcatttggatggtctgagtagaccaggcctcggccattgcttctctggaagcggcagagccaatacgctcagccatcagatgtgtaaatatacggctatttcctattttacggttcttcagatttagtacttgtaaataaacacacattaaggagagattaaacatttttgctaaagctcgtggctctgagtcttagtgggatgggaatccaagaggtgaccacagaaatagcttatatcctcaggggtgacagtgggca

SEQ ID NO: 31559 - DNA, 1126 bp, Mus musculus
cagagtagagtgatggaggagacccgtggagaagaagctgggtgtaagtttgatattctctgggaagccagggctgtctgagctgaaggaagagaactttgcactggggaaagtcaaaagtcaaaaaaatgtgggacacagttctgggatcctaaggagatatgtctggaatagttgaaactggaacctgggtagagcagggcctacctcttgggctcaaccaagcaccagatgaaaggccaaccccatgggcagactatgccacctctgagcctgtgagtgtagctatccagtggaggagcctcggcttctggctctatcccaggctcttcctcaagtgcagagcaagcccctccctgtcttcctctcttcccccactcccttgttctatgtgccagtagaatgaggagctggatagaaggtagagaggaagaaaaggagggagagaaggaagggggggtcccacctctaataccctacttcctgtagagtggcgccagggtcgcatggcacgcatcatccttcaggacgaggacgtcaccactaaaattgacaatgactggaagaggctgaacacactagctcactatcaggtaacgctaccatccagggaccactgtgggctttctttcccttaaactggaacatgcctagtcaggtgtggactgtgccatgcccaagtaattatctgccctggaaccatcccagtggagattcagagtggtggcatgacttctctcgaggggcagaaccacgggtgtctttaggtcctcccaggttgggctggacacttagtggcaccctgggacttgtatccttgatgtctgcccacaggtgacggatgggtcatcggtggcactagtacccaagcagacatcggcctacaacatctccaactcctctaccttcactaagtccctcagcagatacggtgagggaccggcagggttgcaagcaggaagtgggtgggcagtggacttggatgggatgcccttcctactgctctgccagtgtgttggatgccaggactaaggggacatgtggctcgtggccttcctgtcagttctgaaacaatgcctgtccccatagcctataaacaagggacctcgggtgaccacagtggcta

SEQ ID NO: 31560 - DNA, 1217 bp, Mus musculus
gtagcacggggtggtggaccaccaccctaagcatgaccactgtgcctgcttccaacagtactcctatgaggggaatgatgtcagcgatctgcctgtgaacctgtcggttgtgtggaatggcaactttgtcattgacaacccccagaacatccagggtgagtagcggggctggtggcctgggtgggtggatggtggatggtccatgctgactaaccttcccaccatcatagcccacctctacaagtgcccagccttgcgccagagttgtggcctctgcctcaaggcagacccacgctttgagtgcggctggtgcgtagctgagcgccgctgttcccttcgtcaccactgcccagctgactcaccagcctcctggatgcatgcccaccatggcagcagccgctgcacagaccccaagattctcaaggtaggagctagagacccagtccaacacctaggcagccccacccttgtaagcccacccagtatctcctcccaccctgcacggtagaccttgctatgtccgccccagcctctgccttcctgcagctgtccccagagacaggccctcggcagggagggactcgactaaccatcaccggtgagaatctgggcctccggtttgaggatgtgcggctaggcgtgcacgtgggcaaggtgctttgcagccctgtggagagcgagtacatcagcgcagaacagtaaggcagactaggctgggtggtgagggcctcagtggccgggggagcttttttgaagtgctgagccccaccgtacccacaggattgtctgcgagattggagatgccagcacgctgcgggcccatgatgccctggtggaggtgtgtgtgcgggactgctccctccactaccgagcgctgtcccctaaacgcttcacttttgtggtaagccccaccccactgccctctgcttcctgctgcccccagaaagtagttaaggatactgcagaagtaggcctggactcatctctagtatagggcactgcccccgttgcccatacctaggctgagcccagctacaagggaatggttacccgtgcccccagagctgcctgtgtgagaacacagatgctagaggatgcacctaagagggaattccctctaacaagtcatcttcctgcagacaccgaccttctaccgtgtgagcccctcccgtgggcctctgtctggaggtacctggattggcatcgaagggagccat

SEQ ID NO: 31561 - DNA, 1181 bp, Mus musculus
tttgattctagtatgttctatattagcaacctaactcaatgtgttctctcagtgcagctggagcacgtccttgttaaagcagcagtaacgttgccatctcttgttttctttgcaaacaggtattcacaacattggaaatcacaaagtcctcagggctggacattactcagaaaggctgctgaggctagccctgctgctgttgggtttccctgtcacactctcactctgtgcccatgacatctgcttgggcactggggaccagtgccggactttctcctggcatagagacgagaaggcggcagaggaccagcagcagcagcagcatctggagtctcagctgacggcatgcagcagccaggctgcttccttgacaccttggctcggaacctgcagaggtgagccaaggccgacttctgcacgtcagcctcgacttcaccccacgaggccttagatggcacagtgagcccacctccctttcccagttgctagtgctttgacccctcactttgtttccatgaagagattatctttcagttgtggacttgactgtaaagaggcttgttgcccagagtgtagcacttatggatctgtggtgtttggggagccaggttagagcaattggctgcactggcctcccactaatataacctgctgtcagaagcctgactcaagcctcactccttgcatagctcctgaggggagaaccgtggagccattctcctcccagcctctagtctaacggagcatcacaaagaagagaaaaaaaatgtccttgtattgctattggttttccatgtttatcttaagggtactattaaaaaagattttactacaatttgtgtgatctaattcgttaaacatgatttgttaagtcatgatccattgaaaactattacactaaaattaaaaaaaaatgcctgtatttttttttttttctgaagcagagtcttacttggtgttaaaataaggctctcctggaactcaaaatcctcctgcctcagcctcctaaaggctgggattgcaggcatgcaccaccatagcagtggcccttcttctttatacatccgttatcttgggtagtctgagctgactggcaccacatgtgatagggaaatcatacttcacaactgatgtctaaccagttctccaagcactgcctgaactatcaaccaaatgacagg

SEQ ID NO: 31562 - DNA, 1131 bp, Mus musculus
cagatgtggtccaggggcagaaagaaagccatgggccatcccaatctgtgctgtccagctctacagagaggccaggggctcagaaggactcagagctcagtgctggcacaggcagtctctacttggtatgaagcactctattccatcaccaccactagctcacttccctaatgcactttggatcgtgttggggatgaatcctgtctatgcagacggttctttctggtgtgcagaaggacagatggagcctgggcaatagtctggaagcctgactttgactttgagtctggaattgacattcttacagctttaagcaaatcgcttaacttatctgagccctagatcctcacttatttctaaaataaggggttttggctacatgcattctaagatttcttttgagttctgtgattttatacagttttcatgagaaaacttgaggcatttcttactattgaaatattcacctttgtgcttttcacgtagtgacaagtcctagaagagcaatgttgacttcaatcgtcttaacagttcagtgggaacttgaaagctacgtcaggatatttttattagaataacagtgattcctgagccttcattcttgaaggattataacaatactctaattttgaggctggacagttattgtattctatatttatatcaattatacctttaatataatctaatttaaagtaatttaaagattcctagagagagtctgactttcctcagtctacaatggaaatgatcatataggtttctttagaatgctggttgaattttgttttgacatttatcatgttaagaatcatgtatcttaccttactatagcctaaaatactgctgtgaactggaatcaagtgtaagagtacctagcaaccaacctactggagccgacttgcatttatctcagtgtgagagctgcacagtctgtctgtccattgctggagtctggctggtggtggcagagctacacttgcaggcatctgcttaggctgtcaccgcagttgctaagagcaacaggtgactagacagggactggaggtaaccacaggtcagagcatgtgggaagcctgtccctgccactccatgcctccctgtgtctcaggaaagatggaatggaagagc

SEQ ID NO: 31563 - DNA, 1110 bp, Mus musculus
agccagcagaagttaggcttgccccttttttgttctcttgctagctgtgtgtggcattgggctccctgcttctctgagtgggatggtgttgtgaatggatttcagtatgctgtgagccagagaggactggtttcctttgctccatgtagttttaagaatgaaattttccttactgagtgttcacacatttttaaatttcctatttgaatactgttttctctggcacctccataagtttgctgaattcagtaatactttttgtattggcagatgacagtgtggcacttgctgccaacactgcccagggctgctgagacataaccctggcatcaagaagatgtggtgttttagggagcagggcagtgtacagctcttagcagtctctctctacaatatcttagtgcatatagaccttggaggagtatacttcacttattcagatgatgaagctgtgtgcgttttcctttgctaacaattgagcacgtggtttcccgagagcctttgctggtgactgaatcctggagctctgatacattgccaggcaggcttagtccccttgctacccttcctctgctgtttagatcaagcaactgacacacttttctttggtcccaggaaagtgggggctcagcaagaactgattaccgagccattcaactagtcaagaaaaaaaagcagaaaggaactgggagcgatgaaggtgaggccgagtgtgctgcagtgctggtgggcaaggggctcaggtctcttgtgtcacagtcacaggcagagaaagcacacagaacagttgtttctgtgttctttgtcttctatgttcaaaatacccttttatcaattccttagcttaacatgaacttagaaaacaggtagcaaccaaatcaccagcatgtctgaacatgcccaacaggtctgagaggccctcgggaaatcaagggtccaaacagggtcagttctggaaggctactgagtgaatgagcccagaaggctcggtgtcaggaaagcagacgggtggctggatacctagttaggccttgccttgtggtggaagcccttgcctagtagggccattatctcgaggatagctgtgtgaaggcggcctgtgtgcagcag

SEQ ID NO: 31564 - DNA, 1157 bp, Mus musculus
accgccagggcagccagggaggccctcttggagatggtctggtatgtctacaggctcactgggtggtgattccaagaagaaaagaaaacaaagctgggtagtgaccacacttgcagctacatcttatcatctgccttgtggaaatggaactccatgtaaagggaccgtttgccacctactgttctatcagagctgttgacaagagaatgtttatagctcaaatgtctgtcgacaaagctgcatgctttgtacatggttttggtaagtcagtctataagaaacggtggatgtgtgggtagacatatttgtgtatatacttgcatagaaacagaagtggtaagttgcccatgctggatagtctctttttctgggtgtaaatattgtgaatattttattgtggtcatttctactttttgcatttgagcatttgagaatacatcagttttatacatcaattttataactttaaaatctaaaactgccacattaagtgagcagtagagtagccagccattcctcctgggtggtttgtgaggccttaggctctctggtctcactagtacatggagatgtatgattcccctctcaggggcaggagcgagaggccagggtgggcatgtgctttccattccatagctttagccctgagatgacctactggtcccagcaaagtctagcctgtagccagagagctatgtggctgtgccatgcacatgtagttgaaatgccctggcgagttaccagccaagttgagccttgagtcagtaatctcatcttcataagtttctcactttcaaacaaatatctccaagcatgtgtttcataggtttcctcccttcttcctttagctgccatcatgaatgaaaggggcctccttaaggagaggtagggcatcagcccgtgattgctacacttctctttctaggacagaatttagtatcattcatacagttatctgaaaatttaagtccaaagcactgggtgcatttggattgcgtgggatgtcgtttgaccacgggagtttagtctcatcttatgagccccatacacacctagaacgtacgggcttatgaaggaggtagcttttggggtccaaagcagagtgtagactctacactgtcaccacatgttcttcccattcgccaaggtgcctctgt

SEQ ID NO: 31565 - DNA, 1389 bp, Mus musculus
catgccgtgtgtgtgtgtgtgtgtgtgtgtgtgtgtgtgtgtacacgtgcgtgcacgcacgcacatgcattccagcccttcccaggtccccttgggtctgacgtgggtagcaccttttacattaaaagatccttgcaggaagtgggtagagcatggctccctcctcaggtacttctctatactgagttgtagtgtattaggatttgtctgacacattctgagagcttatataacagcttctcacctgtgggaatggttttggtgggtgtattgctttctctacactgtatgctgtagtgaagccaaagtcaggttgagctctggcaaaacatctagtctgaaaggtgattggctggcctgccgcctgccagtagcctgctaatagaacctcttcctaaattgacagtgtgctcatagtttgtgaatgaagagttcgggcttttaaagtcatctttctaaattctgtttctggaattcatggtaagtagtaacttgtcagcagtctctacagtggagttctgaatgctttatgttatgtgtagggctggaacaataggcttgttttatgattgaggttggagataagcatattatgtggccttgtgtgttttcacagaatgatttggtcttccccgtggagacggttggttgccttgcacatatttgttagtcaagactggatacagggtcactcagcaatgctttgggcttttgatgtgtgtgcttattcagatactgttttgattctgtcccatctgagttgctttgtttcttggatttggggagagctctgaaactgggcatgagttttctctggatgctacctgggtgctgctccctacaaaaggattataaatcctacttgagaagactcctttccacatgtctctcctgcatcacaggccaaagtttaggggttgaacttgcctagctgtaatcagcgcccccatagacactcagtaggcagcctggtaccactgtcgcctgcctccagagcccaccccacagagaagttgctccagcagctcccacagcctccagcgtgtgtctgcaagtgacaggatgggctgttgtgctctgagctctggagcttcctgctgccataggcccagtccttagtgcaaatgaataaaagtgttcgaatgttatgtgcaaaagcttttgcgctgctttcattcaaggtactatgcgtggtattgagactcttcccactgcttcccagctggctacttgctcgtttgtctccaagagccagcaccatcctgccgtcctcagggacaggtttgagacttctccacgagcagctgtttgtgatgacaaccggcacagtgctctatccctcaagcacatgctttggatgaaatgacaaaaggggctccaagagactcc

SEQ ID NO: 31566 - DNA, 2595 bp, Mus musculus
ctactaggcaccagcctcagaccagcccagggcaccgctattgccactccctctgccctcatagcctgggtgggcctgtgggcttgccttccatggagcagagctccctctctggcttagccctggcacccagtcctcccttggcccaaggctggacctcagccaccactggccttgacatggcgctgaccaaggagaagtggaactgcctctcaccctgtcagccctcagcccctcactctacacacatctgaaaactcatcctagcaaagaaaacataagatagaaaagtcagacaaagcagaaccaacccccagactggctgtgttattgttttgttattggcagtgggcaaaataataatataataataagtagacctgataagggtgatgaaatacgtaagtaaactttatataatataaatatataaatatataaatatatatatatacatactgtataggtagtgtttgtgtgtgaaagataagcatttcatccacaaagctagcactagggacctcctaaggactgccacttaggtggcaggaagtcaatctagatacatgtgtgagtagaccaaaaaaccctgctagaacaaacccagatccttccatattttcatacaaagagactctctagcctggctgaaaccttacacgctcatgactcactgtgccaagtaacacagcacctgactgtctaataccccactctgctctgtatagccccctattttattaacagagtactattctaagtaaccagtattataactgctgttatctccagtaagcaactaggcaaagtgcagtcaactctaccctagtacttggggcaaccagtctagagctggctgtctcaggacctcagccccacagatccctagacactttatactggctgccataactttgatctcccacgctctacattccttccctctgtacatggtgagccacgctccccctcccccacagtcctcccagggcccacgtggcagaggggttccaccccaacacaacgaccactcatcttccataacttcctcatccagttcccagccccagcaggcgggtggcgtgagcgctgggcggcccagggcggtgtgtgtgtcccgtgttgtgttctgagtggcaacagcaatcactgtaattccatgcagccatgtgctcgtgacccctgtgtcatcattgcacctggccaatgagtgcttggccctggccaggtgaagcccccactgcctctcatggtccagtgagctgccaggcctcacatgccccagctgtgttcttgtcgcttccatgtgtgacaccatgcactcccctggggccacgtgctgcccatgttcctgtgcctgagtcacccacgggctgtactttacagtttcagcccttccagccaccacagcctccagtgctgtgctcctaagcctaggacccgaggactgcctgtggcctctgcctgcgcggaggccctttcagattggaaggagttgccgcctgaccgtgggctgcgtctaggaccttgtgagccaccggggcctgcccaaccacaagagagatcaggagccttctggcccatcaccactctgctggcctgcttgggtcacccatttccctccccttcgtgtcaccatcgtcgaggtcacgtaccagcagatctgcaaactgagcactttgtatctgtgcagagagcaaatcctgcaacatggaggtcagccttctgtctcacggtggctggacccgcccgccccatcctctgtcagcatggctcatctttctcttgtcatctacgcagaaagagaactgatcaccatagtgtatctgactggggccagctggcgaggagctgcccgcttcacagtgccccgagttccttgcttatgctccacgtactgtctgtcctcagttaaagaacactgtctgacaaggaagggggactgtgctgcatgtgacctggcaccagtcgtgtggggctgtgctctctgtattgtacatttacaaaatacaccagtgttactgttggcaaatagttggagtggtaacattaaatatgccggcttttttttttttcactctctctgagctagtggtaagtcaaccatgaacttgagattgttctgaaaaagacatggctgttaggtacactctcactctttttaaagggacacttaggaacaaactcaaaggaaggcccagtttatctggtagggtggagtggggcctccctctctccacagtgtcctgtattctcctggctagccagggctctgggctcctcccatgttatctttcatgtgtcctagagacaagccgaggatagtgggtgagttctagggaccaggcttctaagcatactcagtctttctctgagttcctaattcaatatgttatcggatcaggataatgagagcttgtgatcctgtgttgttttacagacagggacctgtcttcataggatgtgcctgggcctgcaagtcacacagcagaactagcttggaaagcataggctttttttttttttttttttttttttttactgatgtcccttgttgcctgttattcagctatggcattgaggcactgagtgtct

SEQ ID NO: 31567 - DNA, 1100 bp, Mus musculus
cctttgggagagggaaggagacccagctctaggcctgttctcttcccttggccacaagagccagagtctgtcataacacactgtagtagctgtgcccagcttggcctacccagctattgacaagcaccaagttctcacagagcggtcattcctggaatcccagaggcttcgtatcctgtaccaaggcagtccatctatgagaactggtggcactgaacagctctctcacctcctactgcacaatgttcagccacagagactgtgggcagcatgggttcttgagtcagcatctgaagcctatgccattactctgctactatccatgaacaggcagtccttgttctcggtttcccaagctaccatgacaactcaatgcattgtcctcaatagtgagtgaggtttgagggccagaatgcaaggagagctcaacctatctctgaaatgcagccaagtctttgaggaccttatgagaccctttcagatgaaccatgcagaccagggggtgagcctatgcacccagcatgccttgctctcattgaatgtttgaacaggagtgtgaggtgcaacggtgaacacccaactctgtgattgatggtggaaagagctgagacgtggaaaagacgaaattgaagaaactacagctcccactgggcagtaccacttctctctgctccagtttgggctgcaggatataagccatccggacttttctggagagccccacgcatgaggggtttgagagcttgtttgaaaaaaatgacagcagagaggggacactcatcacgtcagtgtggcacaacactgtcctggcctcccaagagcagtttggaggcaggaaataccagtatcacagatggggaaactgaggctaagagcctaagcagtagtgagtgtatcctttgcaactcaaagtctacttttgcttgtccatggacctcactgggaactcttttgtatctgcaaatggggaagcaacctttcttctcaccaaaggaaggggccatctctctgggaagcccagcagctgacgtctacatggtgcagtgctttccctctgattcagattctcccatgaatctgggacttggggacagcaggca

SEQ ID NO: 31568 - DNA, 1177 bp, Mus musculus
ctcactgtcttggttttgcttcctatagagctccattcctgagaattccaggcctctgttagcccaaagccactgctgcagtaggtgtagagctccagggtgtggggataaccgtggtagaagctgttcaccatcagtgatgttgccttgtttctgtggtttaatttggtgccagccacttaaccccagaaagtgggagccctcacgcctcctaggtttcttataggtagagagtactatgaggctagggaagctgctttcagtgtctcctccagccttggagaggaaacactcgctgtcagagcagcagccccttaactaccaccagtgtccatccagtcagtgtgcacggaacagtgtgacctgggcttattgtggggccctccgagcctgtccagcactccctgcctgccctcccaccacagctctgcctcatactgctttctcatttctcaggaattgttttctccttttttgagttttctttgcttttgtcattttttttttttcatagtgagaatctgacactcaccaccagcatgagggtttaagcaagggcttctcaacctggacactggagatactctggggcagataactgcctgtcattgcactgtgcctgggttcactgaggccagcagcacttgcccagttgtgacaacctgttgcatctccagaaatgccaggtgtcatatgactcctggttgagaaccactagcttcccagcggcctgttcaacccagccatgtcactcgactgcttgggccctggggtggtttgagtctgtgcagtggtcctgctgtgactgaagcccagggcaacagcctcagggatgccctggttgcatccctgcaaggatggagctccttgatgccgctgctctctgaaatacagaggcaaagatcccaggggcaaaaaactcagaggggaatctcaggcatctgagtccagaccaagaccacctgtgatgcccagtgaagcagcagcttaccctggaagacattggcagggcacctggagaggcagggtgcttgacctgggcaatgaggccccaacaggcagccaaatcatcctctctctccatagctgccactgtgcaaagtctgaggtgatgacagtcaggtgcactatcatgaagatgcaggcctttggtcaggcagggtaccctgagagcagc

SEQ ID NO: 31569 - DNA, 1203 bp, Mus musculus
tctcttttgactggaagctgggtggtgtgggcactcagatacaggcagaacatgtggaccagagctcatggtcccactaagcctttacaaggcagtgcttataatggtcatttattctaatgggttttgttattgttgtttgtgtgtttattaataggctttgaagggccacctctccctcaagaggaggccacctagaaaggcctagccctccctggctgttgatttccccctttggctttctgtttccgtttctgtgaagatccttgtggtcacctgtagatgaggatgctcagcctattggttgggagcagacttgttatattattagaccacccacctgtgccctatagcctcagctatgctctctggtgtctctgtgacttaatcacatcttgtacctcagtttccccatttataaaatgtagacgatggcaggtggctgtggggtagccttgaggacagaagacaccagttcacatgccagtgtgtagaggtgcacagaaactagtgctgacaggtggtggcactgacatccaggctggtgtggctccccaatactaggacaggaccgtgttgcttattcagggacaatgtcttgctggacaggagtagttaatttcacttcctcgccacagagaaaactagttttaaaagagagagggatgcagacatcgcagtgacggggccaagaactgttgagcatttgacagggttgagcgagaataggtcagaccagaaggaagtgatgatggtccacaggctcttgtgcttatagtgctgttaatagctgctaaaaagcacacagagatgagaggaattgccttgcctatggattggaaggtgtacccagcaagatgacttgccattcatctagggtggagagggaggcatggcctgcatgctctatgaggcagaatccgaaagccagagatactgagcactgcagaccttgaggtctaaatcccagccctgaggcagatttagtagatagagctttggggccttgggttcagtgggtgacctgtgttggatggagctttgggccgcactggtgattctggtcctgtctgttctggcacttgaggcctagggctcagggcttagcttcaatcctagagggggagatgaaagagggactcccttagccacccctaaatcctagagggggagatgtgagagggtctcccttagccaccccta

SEQ ID NO: 31570 - DNA, 1288 bp, Mus musculus
atgaggctgccacctcatagtcagtggttggaggttactgtccagagttggttcctggttcttctgggcctgacgtcttgagcataaagaggacatggagaattccagatagcaccttagtagttcccctcaaatataaagagcagctctgcatgagaacgttttactcaagccttgtgtctctcacttatgtaatgtttatttacatggttaagtactcaaagtacaccagaggacactggggattgtcccctccccttctccctccacgctggggactatagcaacacttctagtttccagttgcctggctctttcttctaaactttgcttgtcatggctcaacttctcatgtcttattcaacatttatgtttatacaagcaagtatatataaacattattcccctcatctttattttgccttgctggagttgggcccagggcttcacccatgctaagcaagtactctgctgctgagccacatcccagttcctcagccccccacttctccacatggactgtgaggatgagatcagacagcgtctgacaccttgtacagcctgctgtttctcacttggccctaggacatagacatcattatcttctatgtggagagggcttgaagttcagagaggaccttaatttgcccaagttgcacagctagaaaatggcagagccaggaatcaaaggcggagccggcaggtgccagatgcctctctggctgtatcttctacagcctcactagggagcagccctcggactggctgtgtggctttgtttgttcccttactgttctgactcccactctgcttttctatggttgaaactcacctgaaatgaatctgttgtaggaaaaaaagaaagaacattggctttgagccccagcacacacacaaggcaggctcaggggctggaggtagagacactttgttttgcctttcttcatctcctgtcttggtcttcccaccattttccaaaagagctttgtcctgcagcagagctttggtcccagtgtcccacatacacaagccctgattgctcctctagaacctgtgtgctctgtctagcgctgcttggatcagctgtgtgaccctgggcaagggaattaacctgtctaccgccactgcctgctgaatgggatatggtcaagattaggtgcagtcacatttagataccttagctttgtctttttgtttgtttcctttgtttgtttgttgttgcttttgcagaacacagtcccccccagttaagtgtcttgcccttcagtttcctattggttttgtttac

SEQ ID NO: 31571 - DNA, 1133 bp, Mus musculus
cccttctggttgtgcatctggtcagggcatctctgtggagattctagccctctgtttgtccagcctaagcattaaaaagcccccttgcttctgtgtctgttccaagagtgagggtatggacaaggactcacattgagccagcataactcacttcacccacaaaaacttgtttacaaccagtagcactaaatctgtgctgagcctagggacagatacacagacagcctatctttatccagagaaagggccatgttccctcacaggtcacccaggaactgagtcactgaaggtaggtttgggttagccaggtcctgaggcagtagtacctctgggctcaaccagtctccaggctgggccagccaagatgcagttctccagcaaggcagcaggtggcaccagcctctagcggtggtgagtagtctggcctagcaggcctaggacaaatggggctggagactgctccctcctgaacttgctaggcttctctgcccctcacccacacaccatccctgagccccaaatgcagctatcaacaacccatctttcatcccctctgaagattgttccaccagctgtggtctggctatcttcttaagccaatataaatttgccccagggtctgtcctagagacagatggagacagctgttggaatccctgttacaggcagtggagctcaggagctagagtgcctgggttcagatcccagctttgcagacttcaagattaaatgctggttccaggagagtgagcatgagggtccctgtgagtgagccggtgtcaggcagggagtgctagatgccatgccattctatctgtgcacaggaaggactgctggaacttggtgactatggtcaggacttacctcctcagctgcagcattaaggtatctggtccagcaccccagcactgcctcttgcaagctgagcacatttgggctgaatcttaggttcctaaggcacctggcaggggctcatgcactgcatgtcagagcctcagattgtgctgtgggtggggtgggctagatgagtgggggattctccactgattctgcctttagacccagagtactctcacccctttaagacaaggttggacctaagtgtcagtgggggcctaggcatgggtaaggcc

SEQ ID NO: 31572 - DNA, 1137 bp, Mus musculus
gcacaagatttctacccactagaccctcttctcaaatgtgtgctctggactgggagggagtctggccctggagccccctttggattggtggtcagttcctgggctgataggacatagcctgctgagaaaacaaaacaagacaaaacaaaacagccttcatttcatctccataagaggggaggaaggtctgaagaccaggcacctcactaccacctcttctcctaccttacaaagtgtggaagagcaaccggtctcacagatatggaaactgtacccagccccatccagcatttcagaggcacacccacggggacctatgtgttacaggcttgactactggtcctcagtgggtttcttgggttgtatggcaaaaggcagttcctccagtgcagagagcccaaggttttgagaagaaagtcagggaaaagctagcatctgggatcccattcagccatgcacagccctccctacaatgtgcaattagcttgtagtgctgggattgacttggcattgtactgtagacatcacagtggtacctgttttactgttaaatacccagagactctaaaatgctatggtgaagaatgtaccttgagaccccagccctgccccctatacccctcaggcacttagtcaattcaggctgttttcacggatcaataactgaggttccttagtcttctggagttcttagctcctgtctccgtccttctggggctttctgtgttaatgtgcatgtctcttgccccagtgcttgctaggaagtacagattatggtcaggaactctaccctggaactgtgtacagaggagagtgtgtgcgcccctccccagaacaagtatgaaaagcattctggggtgtctgtcagctaaatattgatcagccaccaagggtgtattctaaaggaccctgggcagcttgctgtgattttatgtccaccctctcggaactgggtccctggtggccacctccctccagaaggcacacagattgtcaaattctggcaccagattgtcctcgtcagcagggctggagcctggcacggggcaaacagtaggaattgtgagcagaaagaacgactcctctgtgcccagtaaggccccagggcagagactagccccctaccccactaccaga

SEQ ID NO: 31573 - DNA, 1175 bp, Mus musculus
tccccaaaaaggagggtgtctggttgggcacagaatctggagccactccactgttggatagtgctcaccttgttccctcagcacagactggaagaggaccacactctagctacagtgatagggaggtaacctggctggccctggagtcccagactaaaggtgaaggggacagcaaagagctgtactggggagggtggggagaggttgggggggtagtggagatcagactcgttcagtcatcacgtaaagcagagtttttcaacatgtgtcaggaccccttgagggttgaatgatccttttataggggtcacctaagatcatcagaaaacacagatatttacatgatgattcataacagtatcaaaattataattatgaagtagcaatgaaaattgttttatagttggagttaccacaacatgaggaactgtatgaaacggtctcagcattaggttgagaaacatcatgttagatagaggtcctgtgagagtgtttgagggggagtggggcaagctgggtacttaaaacaagcagaacatgataagctccaggccaaagggatgaggtaaggggtgggacccagaacacagagaggcgggtcagctcagcctcagctttaatcctgttgcttcatctgctttcagagacatggcagagataagggtgaactccacccactgggtcactagggagaagtgaagggtaggggcagggcagggcagggttaaggggcctctagaaagaatgtggaaaacctggaattgggttttgttttcatattttatttttatttttatttttattttttacagtgctgaaagtagaacccagggccctaggcatggtaggtaagcactaccactggccacatgacctcacattcctgtcgttccttttgtcctccctgtactaccaggcctggctcttttctcttctcttcctgtctccattttcctctaccttcttttctgggctcaagccatgcttttctcttagccttgtccatagctaggacaggccagagctatcaaggactgttggatgtgcatctagctctcatctgtataaggactagtccagccacagcttcactggagtctcgggcgttgatgactcaccaaatgctttggaagttgagggaggaaaattactttgggtttgaggccaagctgcaa

SEQ ID NO: 31574 - DNA, 1159 bp, Mus musculus
ttaagagttaaaaagagtcatctgattaaagtgtacaatcacaaggacaagttgcgcgtggcaaaaacaaaccatatttttccatagaggcatataaacacatagcaatagccacttgtgaaaaataatctaaactaaactcattcttaccggcttcacctggaaggggcaggaaagcacattccaagaacaattctgtgttttttaagaaactgaggtcacaagacttgtcttgttttcttggagctctcttacaaccactcagaaaacgcctcacagaactccattcttggattgtgctctgacaggaaaccacaaggaaattccaaaagggaattcctttcctttccatactatgtggttgaagtctcaccctttgggaagtagacagcattagagactcaacaagcaatgttagcaatgagtgagaaacagaccctgctgcccaggctaagtctggaatagagctttacagaaggtgacatcaatcagggacacagattctggaaccacagtggcttgactaggaaagtgacccatcagcgaggaggcccttggaaagttccccctctgtgcagctgtgtgatcttagaaaaattagttaatctgcagtgcttcagtttctcatccttaacatgttacttcatagggtcctggtgaattaaataagtctgtaaataagattcatgtatatgcaaagtgtgtagtgttaagctgctgtcacccagtcaccagggttctgaggaggcagaacatgtgtactttgcagctctcaggaaatgcctcctggagaacagggtagagagaaccagaacatggagaggagaggcttggagcaggttcagagggtagatttgtaagtctgtctatagttctgggggctatgaagtccatggcattggcatctggcaggggcctcatactatatcacaaaatggcagagggtattacttgcaagacaaagaagtgtgctagctttggtcccttcctcttcatataaagtcacctcatctgacttcccaaaggccctacccagatggtgtcagtatatgattttgggagcaagcttttcatgtgaatattatttggtgacacattcaagctataggaagggttcattttcccaacctttatgactatgagaagaccctttaaaatc

SEQ ID NO: 31575 - DNA, 1173 bp, Mus musculus
caggtgtccactagcgaacgaagagtaaacaaaatacaccacaatggaacactgctcggcattaagaaggagcttttgacacaggctatagcatggatggcccttgaggacagtatgctgaatgaaacaagccacattaaaaagacatgtcttttctgattcctcttaggtgaggtcccttgaatggtgacattcaaaggtgtagaaagtaagtagcatggtggctgccaggccctggagaggggtggagatatatttaagggtgacctaattttaatctggaaaaaatttaaaaaaagaaagtcatgatgctcaattttatgttttgtgtattttattataattgaaaaccttggaaagaaaatagtatgtgtcgtccagcgagtgctgggtttgtgaattttcaagctactgctattaatacatggtggggtagatgtcccaggctcatttctttgggcataatggtctcaacagatgagccctcaggtcttttgaggggagtggaggtactgatcacccctgctgagctggggaggttgccatgtcttggccttgcttcaggaatgtctgctgtactttgactcattagagtgctgctggactgacaagggtctctgcctggcatcaaggcatagccttatcaggtgtgtaccttctcagtctcttcgcctcctctgccttgtgcacgtttagtctttcagacactgtgtaaacatgagggtttccatctctgtcctttgggttctgtctttggtggcctcctagggcttttctgtatgtctcgctggcagggaattcagctccctaatatatttgtgagaaggttttttgacatgcaccacccacccacttcctcactccctcacttaagaaatgcttattgcgtttctgcctctcccagatcctcttccagttactgagagcttattgctgtgcacaaagcaagacaacaatattcatggacttgcactgcagtgagaagaagtagacaataatggagatgaatatggctaatatttagtgcatttatttgattggaagaaggcttcagagataagcagaacagaggcagggagagctgagggtggatgagtcgttttagaatctttagagccaaagcaaaaacccatggcaagcagtgggtgaacagtatgtatatccagacagatg

SEQ ID NO: 31576 - DNA, 1134 bp, Mus musculus
ggaccgaggattaaggagacgccggggaggcacagccccatcgccctggcccctggcgtcccgggagctccagcctgcagcagcttcgcctcttctgggtgctggtgccgaagccctgctggcagtcttctgtgcccatctgggcggggctcggtctctaggctgggggcttaggtgatgctgggatggagttgtctggtttgcagcaagctttctgcctactcctttggttgcctttgggaccgtcaggggtcaactagagaaagtgttcgatgtggtcagtagctctagaataggcgacctgagagtctttgggcatgcgatgctggaggagggagttaaactcactccagatagggaatctgattccttggagtgggaagccaagcactagagacagcgtttctcctaccttacatccgctgcatcctgctatggccatgggacagagcatgcttggaacatttatgctagggctggtccattctttagaagagaagaattgtgtgtacgggtggagggtctggaacaccagaatgtggctgagttctgtggctctgtagagggcaggttgaggtgttatattcacccctacgttctgttcatttgggaggtaggggattgtggctagctccaaactgaggtccctaattcagagcttctgcttccacttgagagcacatagaggaagcttttagttctgaggctcttcactagtccccttcacagaagctgtgggtcagcccatgctagatgcaagaatggagaggaaagtctgggctgctgaaatgaagtctctcgaagcttagggagggggcaccaggacagggacacatattcctgttttgatagggaacagtgacacacgttggtcggctgatgcctcacaacattatcccaggagatatatatatatatattctttcaaagtcacccctactgaccaactggaggatgtggacaggagaactctgaggggcagaggcttctttccctgccttgggggagtctccattgtccatccagacagtggtcttggctgaggaggtcaggggtgcaaatgctgaaattttatttcataagattccaccttggagaccatctggctttgctttctcccctactagaggcaca

SEQ ID NO: 31577 - DNA, 1941 bp, Mus musculus
ttccttcatgctcacgtccctttcctccccagatcttgcctcatctccggctgctttcaacacactgccttctggtcgcaaagccagccctccctcggggctctggagcccagcctatgcctctcactaggcaatgtgcagggctggtattactacacagctgaactgacacctggacagaagggtcactgtcattttcacaccggggtgaaaccacgcctgggccctaggccatcctcactgccctggccgtgctgaatcactgcctgattcacacaagcaagggattttaatttgtttgcttttaaatctctttcccagtcttgagggtcagggcttcctggttccctccttctcatgtggtgtgcagggtttgggggtgctgcttaatcttgtatttgttctgctcgaggaagctcgcttccctgttcatggcttttgagtattggaagctgtttctacatcatctacagataatgtcactgtagtgatctcagggaaaggattttctcatgactcctggggtttttgtggtgcttggaatagaacccagggtttcatacctgcttggcaattgcttgtccattggcacatgtgcacaccagccctttattgtgggttttttttgttattgttgttgttgttttttgttttttgttttttttttcatgaaaactcactcttctccttatcctactgctgctaggaaatgtgggggacaagcagatgtggatgtcccctaggggacaccatgcccagagccctgtgctgactgagccttcttactgtgatagttactgagcctcagcagagtggccctcccttcagagccccgggaggacttcggtcttgtttcagcagaagggcttctgtcaccagggttggagtacctctcgctctccctgaggcagcttgggaatagccacagcatcatcggccctgccctgcagccactggcagggatcttctgatctctgggtttgttctgagatgctgctgtgacttgtggagcagagagacccagggtcatctgctcatctgccttggaggacacagaatgcagtacctcagtggatctgagccaccctattggccctcctctccccctcctctgccaccagcactcgcctcgctagcccaggagcgaagaggatgccttgggaatacgacgcatcttcacgtccaagctcagggtcatggcctctgtttcaggtccaggtgctgtggtgctgtcagaatgagccagagactcacctccaagtggacgtgtatgggcaccacgtcaccaagagttgtttgcctttgaaggtcatgtgtgatcctttgaggctgagccataggatggactttctggacgtgaggatagagtctttgtgcccagccagccactcaatctcccccgagagctgttaatggagtcttccctgcatttgtttaataaagttctgtgtagtttcttaaggatgcggtggttcttgggggtactgactctgcctgggtgtttactatgactgatggcctgtaagcaccaatggtgcccttacctcctccctggccatggggtctccctaccctgaaggcaggggcaggagcaggaccttgtctgcagtagtaccgcacagtctcccttccctcctcttcctgccagtcctctcaggcacctgtcattctgccttctccttccttcattgtcatctaaaatgtttgtatttccccttaaaatggcctttctctgtcctccccctactccccctccctcagctatactcccaagatcttgaacacctcaaaggaccagttctctgcccctctcccccaccacacgcccttggtctggcttgccttctcagagccctcatgggccccaccctagccagcactagtcctgtcacattcctcatgggacctgccctgtcacaccatccacaggaaacaggattc

SEQ ID NO: 31578 - DNA, 1189 bp, Mus musculus
tagggctctgacaggtaaccctgccacactccgaccaggatttaagctgtgagctcattagattgtgttgcctggggtgtaggtgatacaagctgcaagaaaggtcatgaaatcggccatcactggaaagagaggcccattggacacgcagactttgtgtgccccggtacaggggaacgccagggccaaagggggggagtgggtgggtaggggagtgggggtgggtgggtaagggggacttttggtatagcattggaaatgtaaatgagctaaatccctaataaaaaatggaaaaaaaaaaaaaaaaaaaaagaaagagaaaagggaagtcagatttaactagtcacattatattatatataatatattctatttcaataaataaaaaggctcaagctaaaaaaaaaaaaaaaaaaaaaaaaaaagaaaggtcatgaaaaatgcccaacacaagccagcatgcactcgtcgctcaacacaactgacttgtttccctagatagtggtcggcacccctcagaagattgtggcccgtcgcctccactctgcccagaccagtatccaggaagccacagcctccaaagtgactgtcagcgtgggagacaggagctctaacctacttggtacaggatgagcaggccatgggcatttgggcttaccttgccagacttggggagcggggagtagcctctgtgccctttaggtatggttttatctgtttgggttttgttgttgttttgtggtgttggggattgagctcagggccataacacaccacaagcacatgctataccactgagcaatacccccagacctctttttcttattcagactcacctctaactccagagagagccttcagcccccgctcatccactctttgcagctcttaagaaacacgaggcctccataagccaaagcgtgaaaggtgccttcataaaagcacagctctaagaaactgcctgggctgagtcagagctgtgattgcagccctagggcatgagcagagcaagccacagtccactgcagctgatggtagaaactaatgacatcgcaggctggtggctggttttgatttttataattacctctccctagtcatgcatagaacattccatctcactcttcgcctgtgacagccctggacagcaagtgccagaaataaatatgtcgatacagattttttttaa

SEQ ID NO: 31579 - DNA, 1099 bp, Mus musculus
tgttatggtttatttttattttatgtgtatgaatgtcttgcctgttgctgggaattgaacttgggtcctctgcaaagcagagcagaaagcattcttaaccactgaacaatctctccagcctatgatttcttatttttattatcaacacatcgccagtgaggtctcgtctctgtttttaaagaggaagtgacagtgctgggtagtgagatgggcccagagatatggccccagcccacccaggacaaagaattgggaaagggtcttgtgaaaacagattccagatgggaaggtacagggggagctggggcctcctgaacaggtgcagagggagagtggcaggcggccagagctgggaaggtgggaggaccactttataggtctatgtggattcctccctgaagctgaggaatccctcacagacagaggggagtggggagctaggtttgggctatgcgtccaaacaaaatggatgatatctgggtttattctcccaggtgtctcagggacatggagctcctcagccagccatgtcctctacgttgaccctaagacaggcgtggctatagcccgagatgcagggtctgtgactgtttactacgagatcgctgggcagctgaagaccttcaaggaggtaggtcttggactgagagcagccagaagcaattatggccaatgaaccctgttagaggcagtaagagcatcggtgtgtgtctgtaactagacttggagatccatgtttgcacttgggaggctgaggcagaagattattttgagtttgagaccatcctggcttacatagcaagactgactcaaaactcaagcaagcaaacacacacacacagcccaccattgcatccccagcacatcgtagtgtgtatgcccctagataccagaacctgagcatgaccagatctctttacacaaaggcgtgagacctcagcacctcctgcctatttttattttatttttattttgtttttattttatttttattttgtttggtttcatggtctgtttggacacagggtcttactgtgtagcccagggtgtccttgaactgaatctcccgtgcatccctggtgtttgtcaccccctgtat

SEQ ID NO: 31580 - DNA, 1481 bp, Mus musculus
cttgcaggcaaaagccctggctagattgcgagccactgggtccaaatgtccagtgattgattctgcctagattgtttcagagaaggggaaactgaggcactgtgacatccacaaaaggctcagagtcctagagaacaagcatgatgatggtctctcttcttcctgaccacaggcattcccaccacccactgctgctcaggtcagcacagaacctgggtatagtcagttctttctggcataacgtatactcagtaccagacatgcaaataattgtatcaactctgaggacatagtggctcattttgaatcagagaaactgactcaggtgtcactcaaggctacacagtagctctacactgtgttctgtgcctactggggacagagacctcctcgggcaccctgtcacattgttaccaccttctggatcctagaggacaaagctcactcagtcactggacgctttgattcagggctggactgtagcttgttttatttagtgggccaagcaaatgcagcccacttactttttgagtggcagaaagtacgaggtgttcatcatatcccagccctgcaacagttaacctggcttgtgggctttggattttgatggcctcgtggaggcttcttgtctagagtcaggatgattgtttacctgccgtttatggggcctggattcagaggtggctctaagtgtcccactgttgacttccatcagcacccctgatgtaggggtgtaggcgcgtggcacctcttctccatccagtgggcattgcttctacttcacgtgccctgaggaccttctcccacaactctgaacatggcagccatggcacagagggcattctggccctgtgaaccattacctaagttttcagtcctggatcctgcctcaactgagtctcttggaggctgactagctgtatggggtgatagaaaccgtgttgctaggtgggaactctaaaaagcaaagtctttcttcctcacactcagaagtcagcccgcctactaagtgtccctaaaatagggacccacttgggcaggtaccaccacacccaaatgctgtcctccaggtctctcctgtttcatacctgaggatctccatgagcccagtcctgcacactcagcacaaggaggcgctgacagctctgcctctggggatgaccgtgaccttcattgtccacttccacgacagctctggagacatcttccatgctcataattcagtcctcaattttgccactaacaggtaggacataggcatttcttgtttcccaagaagctgggcttgttgtatctgggtttcatatataggttcagatgggtgatgaaagaaaggcaaatgctatggaaggacaatggaagggatggcatgccacaccacacaggccaggcctggaagcagcaagtccagtcaagaggcagagggagtgaggggaagaaaggcccaggcctttgtctgtatgtggcaggaacgtgttact

SEQ ID NO: 31581 - DNA, 1189 bp, Mus musculus
ctctggctcccataggtcttagatagatcagaccagagaatccctgacaagtccccaaaagaagtactagtgctgctagctggggcccacatcgagtcctgcactgagagattcataggtttctcaagcactgtgtggtacctcggcccctactggttaccctcagctgagggatgttcataccccatgatcagtgcatgtcatgtacagccagtgccaacttgcagatgccagtcccttctgtctctgtctccacatccaggtcttccccccattcagattgatacccaggaaggtgacactgatcattggagccatgatgcaggtgggagccactgtgggtctacacaggccttccttcagtgtcagcatctcacccttgagggatggtgaggactctccagcatggcaggtgctgatgagagccactgtttctcacttctcagatcacctctgaggggggcccccagcctcagtccaacatcctcttctccatcaacaatgagagtgtggcagcagtgagcagctctgggctggtgcgtgggctcatggtcggcaatggctctgtgctgggagtcgtgcaggcggtggatgcagagactggcaaggtcatcatcgtctcccaggtatctcacgtgccactgatgagtagctcttggtgtggtcagatttctgctcggtttggtctctgccttcttgaggacacctaaacctaagatggctcttctacagactaagtctcctaggctctaatagcttctctctgggataagatctctactatccctagacctacaggttctctggtacatgaggaggtatatgctgcagaacactgatctcagaacttggcgttcctcggtttatgttttgctaccttctgcctttgcagatgaattgtgtgacaaacctgctagtggcccgtggctgttgtgattctgagccttggcccaggactcactgaggtcagagctctgagtccttttgtgcactgtctgcagtggctcctgagcatgtggtaacaggatggaagaggccagtcctgatgagatgctctgtgtgtgaccctatatgcctggattcacagcagtgtgctaaaagcatgctgtatggttgccaataattctagacctggatttatcgttcagtgttctgctcgtctcttccttaaccactggcccaatggctc

SEQ ID NO: 31582 - DNA, 1145 bp, Mus musculus
cctttcaacttatctcagcaactgttctggacctgttaatccttacaggactaaaagcctcagcaaactcagttacctgtttcaaaacttgaaactgaatcagcagcaggatgaggtagccccaaggtaaccaaggggcctgtgactgatatttgtttcctgtctgtgccctcaggtttgcagacagtctcggttcacgaggcatcaggaaccacagccatctctgccacagcgactggctaccagcagtcccacctgagcgaagccagagtgaagcaaccggtatcttccagaggacacagtgggtgggaccatgggcaaggccaggacggatcctggttttgtgtagattctgtctggagatcactacctgcttgatttttccttgcttcccagcatctcttgatggcttcaggctaaggtgctgcttggaaggggttgggggagagggatccagtgggtacatttgaggaattagaaggcttctccaaggatggacctgtgtggatgatacctaccctgtcagactaccccataagctgctactgaaatggtggagacagtagatacttgtggacagggaaagtggggggcttgtgtccttgagagccaggatgctaagacaatcaggatgctaattcctctgggagaaatcagttcccctttggatgttttgatgttcacttatccctgtcccaaatgtcttctccccatttcgttcttttgtagaacttgttagcttttgagaggcctcactggggctcctctctggagcctcacaccccacagatggccttttaagaacttcacttatgcttccaacctctctgggggccaggggttctctctgcctccctggtgtcccctggatactaacaccgcttgaagcttccattcctggaatgaggcctctacctggagcatctagctcgactcttttcagagggaactggtagtgtccatggtcttacggatctgacagtgttggcctttctctttcagcatgaccctctagtacctgtgtcagcctccattgaacttattctcgtagaggatgtgagggtcagtccagaagaaatgaccatttataaccatcctggtgtccaggtgtgaccctttgcccaccacccctcaagtgaggaact

SEQ ID NO: 31583 - DNA, 1177 bp, Mus musculus
atcgcttagcacttaagagcacttgctgttcttccataggacctagatttagttccccagcacatgcatggcagcttataaccatctgtaactccagttccagaggagctaacatcctcttctggcctcattggaaatgaggcatgtgtgtggtgcacagacatatgtgcaggctaaacacccatacacattaaaacacacagagacagacagacagacagacagacagacacacacacacacacactaccaaccactacaaccaccaccaccactgtaaaaacaaagaaccttttttttttttttccccaaaatagggtttctctgtgtagccctagctgtccaggaactcactttgtagaccagactggcctcgaactcagaaatccgcctgcctctgcctcccaagtgctgggattaaaggtgggcaccaccactgcctggcacaaagaaccttccttacctacaatttctctgcccccgttcctcacccaactcaacctccttcttcttttctctgtgctaagaatgttcgccctgcggaagtcaggctgctgatcttggagaacatccttctgaatccagcctatgatgtctacctgctggtgggaacctccattcactacaaggttcagaagatcaggcagggcaagattacaggtacagttgtgactcagaagtcatgttagatgctttcttctttctttaaaaaaaaaaatctattttttttatatgtatgggtgtcttgtctgaatgtgggggtggggtggggtggggtggggtgggccctatgcacatgcagtacccgaggaggccagaagagggcagtggatcctactggaactggagttagctactgggaactgaacctgggtcctctgtgaaaggagccagtgttttaacaactgagctatcttttcaactggctcccttcttgttactgtggtaaaatacatggcactataaagttttcatgtgtgcagaccagggagtggcattgcattcctttgtagcactttttaaccatcgttacattccatctccagagcgtatccatcctccccagcagagccaatgtcctcatcacacacaccccatctctctcccttgcacccacggctcacaaacattgtctcatgaagttaactgctttgctgagctcagttgcatgcaggcc

SEQ ID NO: 31584 - DNA, 1123 bp, Mus musculus
atggactctggtggaacagtggtgtgtgttctggtgacatggaaccttagcgattcagggtgctgagtccttgccactttcatgcatcctggaatgccttctctgccaccctcccctggctcctggtttcctgggtcctcctgtttccttttctcattcttaaccatttcctccctctgcctgtgggagtctaggtagggagagttggtgcatatgcagagtaggccttccatttaggaaggagagatgtgacttgagttctctagagctcagcccaggtgggatgcaggatggtacagtgaccagcagagaaggcagtaatttgccatgtctggcctgtttgccgctccccacccccccaggtgcagggcagggttttcattttcaggctcctctgagcctctgttgtcaccttggtttagctcacaccctgagggagcatgtcctcagctggttccatgcttgtctgcatacacagagagcctagaaaattccagttagttccccatgtacatccttctgaatacgtgagactttaagaagcctttagttcttctgactcttgagtcatcacatctgtcacctcttcctcttgtgagtgtcagcaaccatggggcaagaaaaggggctagcagctgagcccagaagccgtatgtgcagatacggacattctatgagacagaccccttgtatagcatctgtctccccgccctccttgtaaggcctttatgctcactgggtacagtgtctttcttaagatttattttgtattatgttcatgtgtttgtgtaggtttgtgcatgagagtgcaggtgcccttaaaggtcaggacctggagttgcaggtgattttgagctacctagtgtgggtgctgcgaaccaaactcagttcctcagttcctgtgtaaacacagtatgcatggctttaaccactgagctgtctctgcagcctgctagagacactttgtgaactgatcctgtagatgtatgaggtgaagtttttgttcctattatatggtagaaagaaggggtctgcactgagccaagaggaatcctcagagtgttctcggatatgtaaatagccaccgtcagacatggtgctggagaggggctgagaggtaggt

SEQ ID NO: 31585 - DNA, 1152 bp, Mus musculus
tgccctatttgggttacttggaccagaagaacccagctcagggcttcttgtgtctgcaatggttcatttagagacatgtcttggcagaaacagtctaggggttagggaaggggctagacaaatcacctgtcagctgttacctgtgtagtccagtcctgtgggctctggagagagcatcccctacacacacacacacacacacacacacacacacacacacacacacacacacacgcacgcacgcacgcacgcgcacatgcgcgcacacgcgcgttcttggagccagtcattggctgcccattgctctacccgccctgcaagaggatcaaggctcctcagtgcttccttacaagggaggggctggaagtgcaggtcaggggtgggtggggttgaggtgagaggttcccctgcacagagcctgcagtatgtattacacttggtggccctgaaacccaaccacagctcctcattgcaacccacaggctccaccaaggacctaatcgagacctgttgtgcagcgggccagcagtgggccatcgacaatgatgagtgccaggagatccccgagaatggtgcccagagtgacatctgtaggtaagtggctttgggtgggcagaactgctcttgccttccctggaccccagatgtgtgagggtgaccaaaagtgaatacaatgagccatctggccaggcggatgtggggagactgactggttctgagggtcagctgaccacatggatctgtggctggcttggtgagtaaatggtgtactatttagagcaaattcaaagtgccatcatcaccttggggatccggggctccccaccccgaatgccccggagccgatccctttctatcctcctctgtcacctctgctgtgactcagacacctgcgctctgcttcccttgccagaattggtcttctgttctctccctttctcaactttcatggcctactcataaagttcagagaggcagtgtgattcacctagtgctgcacagctcaccagtatggccagaattagaactcatattttctaatgtctactgtgttctgtccctgcccattctccttcttctcccttcccctacccccttcttcttcttcttccttcttttcttctttttcttcttccttcttttcttttctcc

SEQ ID NO: 31586 - DNA, 1203 bp, Mus musculus
ctcagaaagctaatgggatgtctcagggatgggccagagacaggaaggccagatgtggacagcagggccatgtagcagtgtggaagcagggaggcctgggtgggaggcaggaccccagtggctctggctcttgtcttttctcagttattggaagctactgacagcgacgaggattcgggtgcatgtgccgtgtgcacatagtctgggtcacacatcctgttacctcggccacttagcttgcttgtagatttatctgggatctcccgagaggcaagtagattgtcctggtccagctggcccagttcaacatccatttgctgtgtgaccctgaacaaatgttactttcccctctgagccttccttcaatggacaaggaagatgtgagccctgtgtaaacctgcacgtggctgggcctcttgtctatctatgcctgaataggccggggctgggattctggagttctgtggacaaggaaggactccatactgtcttgtgtctgagttacctggtattctcactgaggaaaaaatgtaagccctggcttcctgcatctcagagataacactgagtagaggagaagtcaggcagactggctgatgcaatgatggggaaacaggcaaagggagacttcactcttgccaactggcacccagaggaaagaggaatagctccacctattcccaaggatgggtgggaattggcgatgggaaaagccacaaaacaggacagttttgaagacagttgggacagaggtgtggaggtgggaccagggcacacagtgctcagggcttgcggccagagtcctgtctgtcttgcctgtgcttggggaccatgtccagcctggacatgtcctcttcctcccctgcaccgctgggcagcagtgctggctgacatgtttgcctcgctgcacccacggtacaacatggccctcctgatgtgcttgccagtgatggcagttcctcctgggtggactgggtttgtgtgtgtgtgtgtgtgcgctgggaggcatgtgggtcccctctcaggatgtccccccatttgccactccctggcttggcagctatgacctctgctgcagggttcttagcggctgaaagatgagcccacggatgagaaagccaagatacattccattcagcaagatttatgaaccagctctgcattgcttccctctttattctgcacaagctatcagtcactctc

SEQ ID NO: 31587 - DNA, 1410 bp, Mus musculus
gcttagagcggtcaaggggatgcctccacaaagtaaggaccaaacaggttttgcatgttcgagatcatagagaacacctctcatctttccctgtccatctttctgttccagggttgatactgcctaacggagatattaactggaattgtccatgtcttgggggaatggccagcggcccctgtggggagcagttcaagtctgccttctcctgcttccactacagcacagaggatatcaaggggtcagactgtatagaccagttccgggccatgcaagagtgcatgcagaagtacccggacctctatccccaagacgaggaggaggaagaggaggcaaagccagtggagccggtggaggagacagctgacactaaggtctctgcagccaaagagcaagggacaagctcttgaaggccacatggctgccactcaccatgggactttctgtacaatgccttttggtcacttttgtgaaagttctttccctctgtgcactgtaatatacaaaataacttattttaatgatcaggggtcttggccgtatacactgaagaaaagggcgtgtgtgcacctgtgtcctgcataaacctgtccttaaacattagtccactcctggatgtactactctgtgattgccctggattttgccactttgaaataatgtgttgagacttctcagcaaccaaaagttgttactcaggaaagtttatcgtgagaaagctgatctattctgatccattttggtatcccttttggtagattttacacctcttttggaaattaagtaaatagatgccaaaactcctttaagagtgggtccattcctactggaagaggctggtggtcaggtgcttgctggagtacatggggctgctgcctcgttcccgacagctaattgtctgtttgctgtccaggctccagtgcctacagctgcagggtggcattggatcctgtgactcccggtccttcctaagtgaaaggatgggctgggtttgcagtttattgttttgctgttctaagagccctggtttggggcccatgttcactcagttgtgatattgaggtggggacctagctgcttccagagcagaagccaacagaggaatgtctgaatgaagtactcaattaaaaagaaaccatttctatctgattttgaatggcttttttttccctccctttaactagttagaaagttgttagctttcttatgatggtggagactgaacatgtctgaggcttgtgtgccaggcagaaaggtcgccatgaagccacatcccagccttttgtaattttgagacaaggttgcccttgatcttcctgcattagcttcccaaataccatgccaagctgttagttttgtttgttttgttttttttaatttttaagatttatttatttttttatgtatgtg

SEQ ID NO: 31588 - DNA, 2076 bp, Mus musculus
gcagacgtcgttatagagggataatgtgagctgtggcaggacccaagtggccctccctgtccatcagtaaacatgacctgctgaaccctgggtccttcctatgcaaggcatggagcagtgaggatagacaagcccgtcctctgcaggcttgcacagaggcttagagctcaggctctgactgaacagtgtagattgtcagtcagtgctggctctgggagagagggttttatgggtgtcttttcagtggcctcagcatggactttgaaagtccaaagcactcacacttggatctgggctgcacagaatagtattgtggtagcttgctgagtcccccaccctcaccccgtggtatcttaggtatgtgtgtggctatgtatggctctacttagtgactgtttcctccctcaaatggtagagaggagcagtctagggcagggagcacagtctcctcggggactcatggtcttccctttccccacagtggactggtttcctgtcttccgagaccttgtcaacattggcctgaaagcctttgccttctgtgtggccacttccctgaccctgttgactgtggctgctggctggctcttctaccgaccgctgtgggctgctctaatcggctgcctggctctggtgcccattatcattgcacggacccgggtgccagccaaaaagctggagtgaagcctgagaggccagattccctgtcacctctgcccagctcagctggatcaggcatctacacaccccattcttccaggggccagtgtccacacctgcatgtagggattcggtgtcctgcttaatgccttcccctctcgggcttcattccacccagctgtcagctgacctgcgggtgaagggctcagccttctcacccatccctcattgctggaaccaagtgccaagactaccacaaccatcagctacaactgcaacctgagaaaacagacatcaccctctactgcggggccacaccacatcagtaggacaccccatacccaggcttggaggagtgcacgccacaccaagcctctgggtagaatctgatgtggcctgaagaaaccctgaaggtcactgtcactgtggcgggacagagtgcttcggtataagcccgcaggcttctggttcttggttctattatgccacttctccggttctttctatcccaaggagagtgtgactgggtcacactcacagttgctgttactgaaatgaactctgcaggaatggtgtttcagcgggtgcggcttgactggtttgagttcccgaggccaaggggaagctttagctttgctctgcttttgaaccagtgttgggggattccctgtcgtgctgggttgggactgtggaggcggcaccctctttatcccctgctatcacagatgatctgttcacttgaaggtgatttttatcttgtagtcagtgttacaagaaaaggctggaagcatttctactaagcgaggccctttacagtgacctccaggcaactgaagtcaagaatcaggactcgggcttgctgcaggaggcccacgtctggcctttttctgtgggacacttctgaccttgacactccggcctcaagcagttgctgcagagtggttctttttgcatttaatgcccatcactatcctcatcccaaataaaatccattcatactagtggacatcatttctaagtttccttgctactgttacaccctttgaacggatgctttagctctgatgtcgtcacagagccttggtttatcctgtacctgtcatttctgtttgcaactggttgctgtagcaacaagagtgtttggtagctgaccaaggtgtcaggatccctgaccctagcgatacttaacagttcttcccatgtcctatggtatctgtgcttttggctgggtaaaagtacagccagagacggcttactgggtttagaatggaaacaacattcactactgttcagtgcatgctggtacaatctcttagaaactcctaagatggtttgggaaaatacagtgcaattagtgatggctaaatacacagtgcttgggattcagtctgtgtaacattttcttctgtgtttttt

SEQ ID NO: 31589 - DNA, 1219 bp, Mus musculus
gaacttaggacagaacttaaaaagccttcatgggctgtggcttcgggcacagaatagcacgtgggctgcacctcttgggctcattgagatgagtggttatccaaatcatggagggcaggcatgatggcacagctgtgatctcagactcaggctagagaccagcctgggctacagagcaaaggtctgcttcacctctctcacagagagagagacaaccatggatttccctgcatgggctagctagtgcaggcccacctgtgtcagattgacagcactcagtgcctggcgtgggctgagtcgtcaagcaggaagcatttcttataaccaggccgtttcctctggagcagatggtgaaaggcttctctaaccgtgcccggaaagcccggctctcggagccccagctgcatgaccacaacgacttgggcctctatggtcactggcagacggaagagtatcagcctcctatagctgtcgatgggaaggtaagggcagctctggaggtgggagtgagggtgggggtcagagtgggctgccctgtctcccatccagctactctggcattccaatctccacaggtgcctcggaatgagtttgggaacgtgtacctcttcctgcccagcatgatgcccgtcggctgtgtccagatgaccctgcctaacctgaaccgggtggcacgcaagctgggcatcgactgcgtgcaggccatcactggcttcgatttccatggaggctattgccatccagtgtgcgtgaggggtcttgggtggcagttggggaggctgaggctggtggcacacactttttagatttgactgtgggtttaaagtcagtcttatcccctgatcagccctagcttcttgcaaggagcagtagactcagagcactgagtgtcctggtcccactaaactgaagcactgaccccttttgcaactcacaggccggggaccaaggcatgggcagtgcccttggctcctgagtgctcctgggtgaagtggggactagggttgggagttctctagcactcaggcaggtcctgtgaaggaagaggtacaggctcccataagcctgcctcctgcatggctagcatctatctttggctgaccaggaatgtccatcggggccccaaatactcacaaaggaccattggcttctgaataagggaggaggaggggctgggtgggtggccagctcagggagctcatctgtattaatgtcccca

SEQ ID NO: 31590 - DNA, 1356 bp, Mus musculus
acttgaattcatggagacctgcctgccttagccttctccgtgctagcattacagtcatgagccataatgtctgacttgtttttattttacatttatctaatttttatatgtatgtgtgcatctgagttcatgtgtatcatgtacatacaagaacccaagtgccagaaaagtcacacacacacacacacacacacacacacacacacacacacacacacacagtgaaaataaatcttaataataatccagcacttgtggttgaggtgtgagaggtataggaattaggaatttcagactaacatgggctacacagcaagacggaccccatctcaaaaaaataacacaaaaccatctaccttgtgtccgggtctggtcacaaagaagcctggaaagtgcactctagcagtgcacagcgagagaagagtgggtctcggtgcgcagtggtccctgctgcggtcacccaggaaacaggcactcagactgcttaccctgatcctgcctttcccttttgttctcctccagtccacaaaacgaaacatccctatgctcttcgtccggggagatggcgtcgttctagtcgcccctccattgagagttggctgagacaaaagatggatcctgtgtaggaaagtggagactttgcctcttgagatgtacaggacactcccagagagagacgctcacacgaatcctgatagtcagaaatgaccccaggatcactctaccctcgaagaagttcatttgcaagcaactcacaagctctccagctaaatgacctgtccctttctccagccctccagtcagtgtgaccgtcttgctcttttcaggagttggtttgcccattgttcttgcagttactttcaggttgtttttctttaaattaaatttgatgtttccttttttattacttttttttttaatgtgtcttgtggattctcaagtttttacctggtgtgttcagtgtgtctcccatgtctagggcatcgtgttgggtgtgaggaaggagagtggccagtctgccctgcccttatctgagggagtgctgttctagcaattctggggtgggaggccattgcaaatatccttacctgtcttaggggccccaaaagctcaggtagcacccagtaagaactagacaagggaggcacgtgaccccagctgtcaacctactgggtaaatgcaaaacatgacttgtgtgactctgaagaaactgtcttccagtcctggctcataggccgccagtgacaaggacatggggagtctgagcaggaagcagtgaaagcaaagctacttccattccggcttcagccagcctacgcttcacatagaatcacaagaacacagggccaacacttg

SEQ ID NO: 31591 - DNA, 1173 bp, Mus musculus
accagtgacaaaccaaaaccaaccaaacaaacaaacaaaaaacaagaaaaaaaaacccagaaaaataaatgcacaaaaatagatgagctccaggttcagtgagacttgtctcaagggaataaggtggagagtgttttggcaggacacttgatgtcttcctatgactctccccaggcacaaaggaccaatcgccccttccccacagaactctatttgaaggtctggagatgtgacccagctgctgagtgattggctcagaggcatggatcccatgtgttcagcctcttgaactgtgtatggtggcccacacgtgtaattcagcactcagaagatagaggcaggaggagcaagaatttcatgctcatcttctgacacatagctaggtcatggccagctgggttacatgagaccctgaatccaaacaaaacaactacacaaagccctctgctgggatcagctgtggttgactttttcatggtcaccgtgctggccccagccatcataattggccagcgcagctggacaagtagggatggactgaccgagactgaaggtcaaatcatggcagaccttgactgtagacagcttcccctccatgacctcaccgaagggagccactcctgtgtttggcgtgtctcaactctaaccctattcatttttaaatttatttttatatacatatctacctacaaagaatatagacaaatgtcagtatttttcatgtttatgtattttgagtatttttcctttgttttcttgtgctgagtgttttgtttgagataagaacttgctataagcccttggctagcctcgtacttgctatatagcccagacgagatttactaataacagtccccttgcctcagcttcccagttgctgggtgtgacttcatactggtcagggccacccgtgtgctaaccatggtggtaccactgagttacaaccttcatgtttactagaagaagggcatgatggatgatcgtttgcaacctgtctttttgcacatccccaagattcatctgtgttggtccggttcactcatttttgttactctatagagtttatacgcaggtggtgtgatttttgttttcctgttacagatgagaaaaatgggactcagagaggttaaaagcctgaggggagtcagccagcttctaaggaacagaaaatca

SEQ ID NO: 31592 - DNA, 1193 bp, Mus musculus
acacacacacacacacacacacacacacatcttgcctatgtgaacctgtacgtgtggctgtgtctccggaaccctggccgtgtgcacgtgtgtgtgcccgaatgtgcctggatccctggatctgtggttgggggcaagtctagtgtcttctagctgtacccgagaggccatcccttgtgcccagtgggcccaatggacatctttggttcttcgtagtatttaggagaggtaaaagggcggtatggctccaggtgctgcctgggtgtggcacgcaggtgtgacagtcgctcccaggcttgagtagcagggctgaggcccgaaacgacagccaggggcaatgggtagcaccagctgaacacatcttcctctagactgctccccttcactttatgggttcctcttttgggtgggaggttctggtctgctcccactggggaagccacacaaggaaccagtctcaggaacagatcctacagtcccaaagcctcaacctaggctgtagcctggcggcaagggaggcgtgtgctcagcagggccaccgacctggctattttggtcactgcctggcctctgccagatccctgccttccctaggaccagccccaaaggcttgggagacagcctgggcccccatttcctgcctggggaaataaatcatctcaaagactggccaggcgcttgacccggagggtcctcggactgcggattggtagcacgtggctccaattggatgtcagtaaattggcctccgatttggcacagctagctttcaaataaatgtcatagagatcttttttaaattaaaagaaaaaaaaaattttttttttgttgctggtagggaggggatctcactcagagtctctaagccagaaggagtttatttttatgagagagctggtgagtgcttagcaacggcctgcctgcctccctctctaccagggagtcatcggggagtggggggtgagagggaggtgttttagcaagatgatggtgggtggctggagggggacctaggcaccagctgagaacccacaataggatggtattggcagatggttggaggttgtcttaggccttggttcagccactcagttaaccttgggcagtatttcttgtcctcagtctcttcatctgtaaaatgggtggggcatactacccattggatatgtcaactggggatccaagagtcttct

SEQ ID NO: 31593 - DNA, 1157 bp, Mus musculus
tgttaggcaccatcttgtagccctggaagccgctaccaccgccacccgctgcaccaacgtccgtcagcctgacagagttagatatgactcccgtgcacccaggtttgccataggagtttactctctgcctctggtgcctactgtatccacagggtgggagtgttaggagtgtccccactcccctacctccctcaggctccctctctggagcacgtctcctgtggccatccatgtccgtgatagagtgtggtagggccttggtcttggtttcctcccccacagagtgggattgcatctgaatgcacttctgtggccctaccatgcagcttccaagggaagtccctggtccttgagaaacctttggggaaagaccacagcacgttcaccacagaatcatccagagagcgcaccgctcaggggatgcattgtgtgatagaaatggaagcgaagatttggggctctccaaaacaacaaaaaagactgttcatcttcttggggaagttgtgctctgtggccgggaacaggttcaggtcatccctcctctctttcaagcatattctaggtgtctgtctgtctgtctgtctgtgctttgccctgtggctctgcagcgcatgcctgccctgaacatctgcaggcccctcaacactctttgatgtgtttactgtgattgatgtctggaagcagctaggactctcagtggaaggggccagtgatagactgctgagctcaggctggtggtgtggtgagagaggccatgaggccatcaccccagaggctgcctgtcacagcctggtgagggttctgttcattactcttggatggactagtgttccccatcaagggcactctggagccaaggtgtggggtgtgagacagcagcctttggaggtcttctagggggaagggtgaggaagcaggcacagtgtctcctttgttcagaacagaggatggatctgggtagaggatgccatgcttttaggtccacagtctgattgattgattgattgattgggccttggtgtgagggaggaaggacgtccttcctgtgggggaaaaagaagcattaaaagaggaacactgcagggaagggtacatttaaaatatcacccagacattgtactcactgcatagagggtaaggctgaggcccaggggcag

SEQ ID NO: 31594 - DNA, 1099 bp, Mus musculus
cacccatctttccatatttctatccattcaagtttctattcatccatatttctatccatctaccatccatctgtccatctatatttccatccatctttccatctatccatccatccatctgtctatccatccattcttcctccatctttctcttcatctacccatctttccatattcctatccatccaaggtttcattcattcattcattcattcattcatatttctacccatctatttatatattggcccatctattttttcatctatctctccatgcatgtttccatccaaccatccaactgcacagtcagtgtcctgaccccacttcttccattcatcctgtgactcctccagctgccatttctctaaccattcagccacttgtccctttatccagttgctccttcatcctgcgactctctcctgcttactgttgagatggcccctttgtcccacagactgggcacatcagtgcctccccagttgaaagtgcctcctttgtgacatgtgtctatttgcttgtcccacccacaggcattggctacgcatccatcgtcattgtgtccctcctgaacgtgtactacatcgtcatcctggcctgggccacatactacctattccactctttccagaaggatcttccctgggcccactgcaaccatagctggaacacaccacagtgcatggaggacaccctgcgtaggaacgagagtcactgggtctcccttagcactgccaacttcacctcacccgtcatcgagttctgggagtaaggctacatcttgggagggaggagtggtgtgggcaggtcaagaggggacagtatcttcctctgtgattgtggcataccctgtttctggagggaaggaggacacacagctgtagaacaaacactctgtgcctttgtcttgtacgagctagagttgaatcctagtttaccgccaaacggctatttgatttttgtagggaagtccccctactttacctttgagcctcagtttctttaactgtcagatgaggaaaatgtatcattcttccatgggattcctgttgagagatgtacaggtatttgaaaattatagttttcttaatgtatt

SEQ ID NO: 31595 - DNA, 1161 bp, Mus musculus
catgcaggccagttcagcagccttggcagcaagtacctttttgctcagccaactaaatcagtctccactttacagatgaggaaacagaggctcggggacttgacttgctcatggccaggctggagtgagcctgagatcacctattaagaatcctgactttggtttttttgtttgtttgtttgtttggttggttggttggttggttgtttttttggttttttttgggttttttttttttggagacaaagtcacactctgtcgtctaggctggcctggaattcatgatgtagcccaggcttgcctcaaattcaaggcagtcctgtctgccttaacctccccagtgttggaatgaaaatgagcactttgtagttcattttgtcatggtgccggtaacagaacccagggtcttgcccatgctggcttagctgccaagtggcccccaacccctgacctcttgttctctttccctaaaggcgcaatgtgctcagcctgtcctccggaatcgacaacccaggcagtctgaaatgggacctcgcgctctgcctcctcttagtctggctcgtctgttttttctgcatctggaagggtgttcgatccacaggcaaggtgagtggactccatcccctgcctcagggacagccccactgtggccagctcctcttgaaggctgaagtacctttcagtgagtgctacctagaaggaggttccatgttggacataggagtgctctgacaagacacacacacacagccccgtgtggctttgtctcttactgggtaaagtccctgggtgtcccctactcactgatcaggagattagtgaccttgtgactggcaggcaaccaaggtgtccccactgagcttctgtcaccagccactgatgtgcactgttggtatggtgagctaagctagcggagccaaaggccagtggcggccctactgctggctttgattatccacccacaatgtggaccctaactttgcaaagtgatctggcagcacccagagtttaaaagagatgctgaagcaggaccacccagctgccctgtatgactgtccttgtacagggtgcagagccccctgctgtactgaacctcagtctgaagggaagccagccaggcctggaccactccctgctaacattctccgtaagacaaatagg

SEQ ID NO: 31596 - DNA, 1135 bp, Mus musculus
tgcttgtgaggcacgtgtggttcctagaacaatagcagccctgatgggtcagagaagccaagacaaacaactctgtggactttctccagctcagtgctgagaggccttcagaggccatccgcctgcccgcctaccccatttaggggcccacccactggctggcttcagcttccagccctggctgcacaccagatgtggccaagtttgtttctgtggctaacttagtccaggagacgggagggtgatggatggaggacccgagttcaggtgcttggcttttctttcctggcctttccaactctctgagggtctgaaacaggtcccaggatgaatgtcagtttcacttattcaactaaccaggttgctgaaatactcacgagtcacctctatgttggcgacagctcatttaatccccctgaagttctctgatcctgtacaattgaaactgaggttcagagagcttaactaacgttccccaacgctacacagcttgtcggtgaccagactgggatttgaactcaggcaactcccttctcccacctctccgtctcatcctcgtgctggctggcaggtgcagggaggcagaagcctggcatgttcctgcttgctctcacaaggagacaggttgttggtgctcaccctggaaaggtctggatctgtgtgtggctgggtctgtggtcacactccaggacagcctgttttgtcagaaacaaagcagaatggggcagacagggctagttctgggtttggacccagctctgtccattataaatggaatgactttacaaaacctcttaccttgctcagcctcagtttcccctggtgtaatgtaatcgaatgagcttgctggtcaggccatctgctcccaagtaaagctaagtagcaggagaccggaagccaggtccctcttgcaaacccactaacctccagaggaccagggatgaggtgccccctaagcctccattttccacaaggcctctggccctgttctgaaggatcagcaacaggagtggaaaaataccacgtcccacagcaaggcctactgggccacagtcaggggcccaaggtggcgcctggcaccagcctctccctagaggatcccgagggacagtcacggaaaagttgagagaatggt

SEQ ID NO: 31597 - DNA, 2085 bp, Mus musculus
cagttgaaaattggagcagagcagggttggtggccagcctgagctgtaagctgggaaggtaggcttgctgccttccagagctataagctacagtccctagagaagtaaagaatgccttgtgttctaacttaggtctcagactaagccatcacagccgtcaaagctgccttggtgtgcttgatgtggaccgtggcaacttagcaatagactcagagaagactgctctttactgagtgtggaaagttgtttgcaggggcagggtaggctaggggcccattctgtagatatgaaaagcaaggtttcaggagtggtactggtcactccagagttagaggccttaactgatgcaggaagaagagggtcttcctctggggttctagatctgccctctggggttctagatctgccctctggggttctagatctgcctctggggttccttgcagctcgcctgtgtagacattgtcatggttaatcaccccaggcaaccaccctaatgctcttcccctcttcaggtgtggatcgacgctggaactcagatattcttttcctacgcaatctgcctgggggccatgacctcactgggaagctataacaagtacaagtataactcgtacaggcaagtgtcgcgctggcgggcccggtggacgttagaaatgatgattaaagaaaaaaaaagagaagtagggagcgtggcttccttgtgttgtgattaacttaccccctgacgtgtgtgtaacttagggactgtatgctgctgggatgcctgaacagtggtaccagttttgtgtctggcttcgcaattttttccatcctgggcttcatggcacaagagcaaggggtggacattgctgatgtggctgagtcaggtacggtggtgtcggtggcagtggtggtgggcactgccacctagtgtgtaagatgagtactgcaggcatggagccagaccccagggggatggagggagcctggcttttacatagacatcccctctccccccaagatgtgctcccatacctgagtacaaaggctacagttaaaggtcctcagtgcattctggcccactgaaggtgggaggagcaagggcggttgagatgaaacttggtggctgttttagttgtggtcttccagcccccaacacttccccagcatccgctggctttagccatggaagttggttttctaataaggctcaggtcagccacagctagcacaccaatcaccagcgctgctgacatctcagccttggtttctgtggtttgcatttggcacctggcgggctccagtgccaagccgatccactcttgagtccttcctgtctatgttccaaacctcacccctcccagcctccaccacagtcaccaggagcgagagggcaggggagaaacatcactcagagcccacgacagagccgatttgggagtaggatatgaggacactgttgcctttggggagttggggccctgttggccccatgttgctactcaagatgctaacattcacagaatggatggtcgatcttagggtcaggggctcttccttagcaacatgggatccagaactccagcaaagaaggttctggaacatggtcttgactcctactacctcatcacggttttttaggggtctgggctctagtcgccctgtagtggatggggttctggggtggatatcaccaggggccacctcctcaccccattctcttgcagggtggtcaggtgttatccaacctaattactctggggcttctagaggctgccaagagccatgggttgggtcttccttcaggccacatggatgggtgagatagggaagactgtccttcattattctaggtgtttttttacagaccagggcaggtaccctaagtccctgccattctcttccctcgatctccttatatttgaaacttaaggtcatgtctcagttctctgatcctgagccttggtattggaaggtcagagggtaccttgatactttgtgtctagatcatctagatattcatgtctcagcggagatcaggttgccttggtattggaaggtcagagggtaccttgatactttgtgtctagatcatttagatat

SEQ ID NO: 31598 - DNA, 1185 bp, Mus musculus
ttgaacaagggtattgcacaaccaagggaagcccaggcagaacatggcgtgcttcactcggggcatcccagcagtctaagtattctcggcttctactcgctcaagtttactgtggttgtagaggagggtgcttggcccctctcctgaggctggtttgagaaaatctaaaatgaaggacagaaagaagtgaattgactctgttcacagtgcctggtgcggagggttgggggtacaccaccttttacatctgtcttgtagttggctagtcctgattgctcattcttgaggtggacaaggcaggtccagagctttgaacttcagggggagccgaatgcttttggttctaacttgagcccaagtatatgtttcatgatgtccccggtgggaggtgcatgttctgagccccctgctctcaatcttgctcatccaagcagctttcagcttggtaagcagccgcacctgttcccctcacagaatcttctagtatcaccttctagcaaaactcagcggctgccccaggtcgttgtttcagtagggtttctcatttctcaggctgagcagacctcattgtaagacttctcctcccccgccacagttggggttgttgatgctttactaagtgaatttttttttttcaaaattggtttgtttttgtggattctcccccccccccccccccccgcctccttcttaagccattcatccagttttgatgattgtttaatgtttgctttaaagtgtaaaacatctcccgcagtttggcccatatttcttcttgattggtttgttttgtttctagtagtggattttactttagtttgtcagccctcttgtgggcccagtcccagctagctaatctctcccaggagtctgtttggtggtggtggaggaggggggcgttgtaagcaggagatgtttgtgttcaaatgaccctgtgagaggcactcagagtgggcggagctcttgtcccctttgcctctgagtctggccagagcccttttctgggcagtggtatccacttccaagaatctgaacatgaggatcctgggactacgaccctcagatctcaggggaaactgatgtcccccaaaacatatagaggaagtggtggatgaggactgagatgtggctagtctcctgggcctcggcaccttccttcagtgccaggcctgactgtttttacct

SEQ ID NO: 31599 - DNA, 2681 bp, Mus musculus
cctgctgtttactaacgttagattctcataggaccaggtttacagagctttatatttgtactaggatttttttttttaattgtcacagaaaatgttactctatgtgtgtgtgtatgtgtatcgtgtatgtctgtatatgtgtgttttgttttgtttgggggatattttgtacaaaaagaaaacccataggcctacgtcctggggaagaggatggactttcatattgatttccatgtattttgtgggaacttggtaaatttttctttgtattttttttaacatataactatatatacttagagtctgtcatacactttgccacttgaattggtcttgccagcaatggatctcgtttttcaaaagcaattcttcggtgcttatatagctggcagaaagttctgcccaaaaacaaatgaaaaaagagaaaaaaaaaaaaaacctgaatgctgggtggaattttcctatgatagtggatacatcttcaagaacggtgtagtcccttctgagctggttcaggaggaagaacacagctgaggagagggagccccccccccccactagctgaacagacctgaggggcaggagagagcagggctatggaccctcagccaacaagaaagatgccaaaatactggcccaccctcagcatgaatgatagatctcagagcagctgaagcggttgtaccagggccaaacgcctgccctcttacttggaagaagacatgggtggtagtcagtgggactggctgaaccaccatgggtattacaggcagggatgggacgtctgaatgtctggtgaggatgtggctcaggtctgggagcctgcctctgcaggcgtaggccgaatccctgtcctttcttgaacactcagtatggctgcccgaagccaggccacaggagctgctggggcttcagagtgggggtcacactcaggaagtgtctgcggtatttgagtggagtcatggtgggtggtgaccagagtattccccaagcagaatgtattttggtgagggcccggggtgagggaggccagtggaccaaatgatattagcagctcaggagggtgagtgtaccccaggctggcaagtgtaccccaggagggcactattcttccttgcctcttgacaaactcttgtgaaagttaccaccccagaaccatccagcagctcccagcaaggagtgctccaagtggctgtagaccctggatcttaaaggatctgagttccagtacagagccagcttggtagtgacctcagatgatttccaagccactgcattggctgttggacaggcgtttgcccccaggggacggcagagggaaggcgaagggaagtttcggtcagttgaagctatctccacagaagtgaggtcagtactccagagctgcccaatgtcagcttctgaaccaggagagggcactacaccttcaccccagcctccactgggcccaactgtgccatcctgaacttctttgacaaatgtacacattttttcctgtctccaaagcaatgtactctgccaagtgaccctctaatcctcttccagtggctgttgactcagccacccatgattgtactgtgttcctgttgtcctgtgtatttctggttgctctcgtgttattttgagtgtttggagttctccttccccgattttaccgacttgtaatgtaccctggttttctttcgttcaacggaaccttaaaagtaaccactgtgggtgactgaaagacaggtgaagtgtaagggagaggggggctcgtccagctgtggcagtgtctgtggtcatgcccgtctaccctacccctaacccccaccgggcacgcccctctggcgagccttcagtattttgggttggcagacaaatggcaccattctggaaatggcctgagaaaggctttttttaatcattcccagatcgaattctagaccaaagacacagcgggccaagtccccaggccctgcctggatttggaaggccagccgcctcccgagcccactccccagcagtgtcccctcacctgtcttcagtggcccccactctcaccccgcccctgcccctgatgacccttattgtgatgcttgtcttttcacgtctgcatgtaagtaacattttgaagtagagctcgtgactctggtccgcctgcctcctggagagagggctaagctgttcaccaaccagcccttgcctggaacaggccagatcctgtcctgcctgtcagatggagacaggaagcaagggacattgcctggtttagatgaggacattaggtgggcccaggagaccctgggagatgttatttggtcctaagagtgatgtgacctcccaaatggagggtccctgctgggcactgtgggcagccccagagggccctgatccaaggcacttatgtaatcaggagaataggcctagtgtggggacttacactgtgagctaagtggaactggacatttgagtcatttgtagcttcaggttctccaagacttagtagagggaaggcaggtccagggcattgtctaagtaaactgtcaagccttccctgtcaaccaaaggccagagctgatgagggcccttgctccatattcatggaacacagagcaatacccacgtgtgccagtccttaccgccctgctcaccccggccccgtgccacccttccttccttcctttctcctccaaagcctt

SEQ ID NO: 31600 - DNA, 1236 bp, Mus musculus
agcctatgaggaggcaacatcctggtggaaggaccccgtgaagcaaaactgctcacctcatgacaactagagcagagagggggagggatggacggtgaccaggcatacccctcagaggcttgcctccagggacctcacaatccaccatcccaagccccatcactggcaaccaaggtgtcatgagcctcagggatgcctaagagtcagaccaaaagagctccaccaaagccactggcatcctgctctccgttggattggaccaggagacccacttgagagtaggtctcaagtagggacccacttgagagggccacccatgaggattgcaagcttgtgtctgcagttcttgtgtcaccccacccccaccccctacccgttcccagctcagacagctctcccctcctgctcctatccttcttatcctggagccgagagcagctctaagatgaggtgacaaatctaggagctgctgccctagtgcaggaagcggtctaggaagggaggagagcaggcaccgcctgtgagtcaaaggtccgactttccctctgcctcagagaagacaatagacttcttgagtattgatgtcttcgtgtgtgaaatggccagtgtaggtccagtggggttttgtgagacttgtgtatctttaactttttcaaactttatttttgattttgattcttaaacgctttaacctttttagcccaccacccctttaggtagtgggaaagaaaggatacgggcaaagtgaacctggttagaaaggttcttcagagcaactccagtctgtgttgtcaggaaaacggcagttcagttcacaggtcagcagtggcagcttggtccacttgcaaacactgcacggatataccagcagttcagcttggtagagacgggatagcaaacacaaatcagcagtggtggccctacctagcagagacaccaggcctcagctgacttgagtcagcaaaagggagcaggaggaaggccaggagaagttctctgctgtgcctctctcagggaaacaaagatcagcaaagatgtgagacccacgagcattgcacagctagctctataagcaagccaagctctgtctctgtcactggtcatggagtcctttttatactccctccaaacatcacgtgtcttgcctcagcacctgtctgtctcagctgacaccactctaccaatcggcctgagtccaaagaagtggtaagaagccgccagcacaccactagaagt

SEQ ID NO: 31601 - DNA, 1154 bp, Mus musculus
tatgctatggctatttggtcactgtctggtcttgcactctgaggttgacttcaagagataggactacttggcacaatttttagggcctggagtagtggccaggttcttggaagagggaaacacatggccattccattgtggggagagttgtatgataacttgcttccagatgctcactctatgtgtgttcgtgttcatgtgtgtgtgtgtgtgtgtgtgtgtgtgtgtttgagagagagagagagagggagagagagagagagagagaagttctagtgaaccttcaccttgaccttcatgctcctatagacagtgacacattctcttctattcattgcagcgagtgcttcatgaaagatttcccccatacacatacatgcacacagcagccaatgactgtgcattagaaacaccaaaaactggtctttagtggaaagttgcttcagtctgccaggcatccaaggtactcagtgtgtggaggatggtactgagggacgagaagaggccctgtgcaactccatggagatggtcggctgtctgccagcagcatcttctgtgggttggcctgatttgggttgctcctttattggtccttcctactctctgacaccctcttgggatgttagtcaggggatatcagaagatgcccatccttctccacagaggtgggaaacgaagcagcagcagccagtatgcccagggctctgttctgtgtggagggtcccactgtgaacaaaagacctgcagggacagtttacactcaagggaaagataaagaagtatgcaagtcaatgaggagggacagcttcagagtgggggaaatgtactgtaaagtcccagggaaagagatttcttcaggcaaggcgcaggtggtcaagaaaggtgacttcagttgctaggcccagagcagaggagcagtgatttgagccaggagcagcgggtacagagaaaaggataggtatgcaggggtcatacatgtgaaccctgtgatttggcggcaaggaaggagacaagccggagattaacaagctgtaagactgaatgagccagatcttgagatgcaatatgttcaggcccagtggcagggactttggtgagaaccttagaacccaagcttgtgctgtctttacagataagcaggatcccgagaagtg

SEQ ID NO: 31602 - DNA, 1137 bp, Mus musculus
tggtaggtggaaggatgctgtacttaaaacaacatgagccagttgtctgataaacaaaatctatttctcccaggctaggagttaggaaatgcaagaccaaggtgccggtcgatctggggtctggagagagccccatgtatgtagatggcacctgtttgctgtaatatagaagagacaaagggggtcccacaagggagagggaagacttcctgtaggtagtgattcctgggatagctccaccacctctcctctctgcctgatgccttgtggctcagtgtgtagcttctggtgacagactacaccgattgtctgctcctgcctgtcctatggcctggagtaccagctgccattgatatatctgcccactggagggggattatacattccctttaagcagtgtcaccctggctgcctaccttactgccggccaaagtggcaccttctccctgcccaggctgtgggatgctccagtgcagggcgagggcgacacctagtgggcactaagaatatctacccagctttctcctgggcttggacattggggctcaactagggcccagaggctgctgaactcgcagcaagagagagggtgccaagcagagccacagcaccttggctcaccgagtctgtgccgacagctcctgcgcggagcgggacgagtggcactactgtctgagcagagcccttccggaggattacaagactcaggccctggctgccttccaccacagtgtggaggtgagtgggggccactccagggttcctagggtgggtcctgccatatcctcctcacagagacaagttcctcctgtcctcggggccctggcaacaccctcatcggtcccgcctaccatgcttctgttagagcgtggcaccacagttcaacccaggagcatgccctgcagtctggcaagcagaccaggggacagagtagacttgactccgaattagggagaaaggggctgcacttccccaactgtcccttggcctctctcctgactgtggttgctggctgccgcagatccgggaaaggctggggatcagcctcggtgagaggctccccaccctggtgcctgtcactcatgccatgatgtgcatgaactgcggctgtgacttctccctcaccgtgaggcgcca

SEQ ID NO: 31603 - DNA, 1115 bp, Mus musculus
caggtccctaaaagcttatttctgtagtaataggttttagttttgttgtttctagatttcagttatgaagttagtgactgagttttccagctatcactgttctttggagcttgccattttgggaagggagatgccctctaattgaaaactgatgccccatactttgttccatatgacttatgtctgtgaggtgtcctgtggttgtatggtggtgagacttgcccacattatctttatttcaggagcacttagctacaggtacctcacagctctccttcctgacatttcctgagagtttgttttacttactttttacattgtgatgtcctgcaaggagaagcttcatacacacacacacacagagacacacacacacagacacacacacacacacgtgcatgcacacacacacaagaataggatttggtttacacaccacattttctaacatggctaaatgcagttttaaaactctaacttatctgctctagttggataaaagtctttcttttggaatcatggttgtctgaagtttctctgcatgtcctttgactgtctcctcttttcttttcagaaggcatacattacgcctctttcatttttatttagcagttgatggctgaagctgcttgggaggtaaaaaaaccaacattgacatcaagaattccaggaattcaagagatggtacaggaagtggacaaggcctataaagctgtgacagtgaaataatggtggtagtaaacagaaagataaataaccagtggtggactagagaacctgccattatatgtacacactcagaaggaaacctgagttatgatggcagagatgacattacagatcagtgatgaaaggataggtcgttcagtccacggtgctggaaaattgatgtctgtgcctgactcatcacactcaaaaaactaatgggcacatggattaagagcttacaaagtgaatgataacattatttagcacttatataataaaatatgtaccatggtatttttaaccctagggtaggacagaatgtccttaaaacattaaaatgcagactgccagggctggcaggatggcttggggtaggtgcttcaatctttagagcccttgtaaaggca

SEQ ID NO: 31604 - DNA, 1199 bp, Mus musculus
ttcgtgagacagttagataatgaaggcattgaccagacaaatgggttcatcgcttgatggaattttaaaataatgatgttggtgggaagtggtgaagtgtaggaggtggtggtttgttgcaggagttggtcttgggagtgtgtttttgaggactgtatttctgtggccccttcttttctgtttcttgcttgccaagtgagagcagctctgctctgcctcattgcctctgtgatgactaaaacagtgaaatagaaataatttctccatttatcttacttttctattatctgttaaagcagcacaaaaacatagcatagctactatattccatctctaaggccatgggagtctagactactaactagccttatcacttccagaattgagcatccctacctaccgactcccaagggtgcttgaagctatttacgtaacctaaatttaatactgaatccattgccagtatgcttccccagccaacccaggtagagtcctttggtcttcttttataaataagattgcatttagggtttttgtgtgtgctaggctggcactgtatcattgtgctatatctgtagccctatgcttctgaaataaggaatcatgaatgtgacaagtatatgcctacacaggtaaagaagccagactgcaaagcttaaaaacagcacactcatagcccagctcaggttcaagtataacataggcccaagtagttgctgtagttttgtggtttgaaaattttttcctgggtttctataaaatatttttgaatacacttggttatttaaaagacaaatttgttagtgtaatttatatataaaatttaattgttagtctaatatatatataaatctaaattatattgattgtaaaattcaatgaattatcacagagggaatgtttccatgtgactaccacccaggttgagaatgtaggggatgtggaatgtagctcctttggtagagtgcttgcctaatttatacaaagcacccatctgtaatcccaggacgtgggaggtagaagcaggaagatcagacattcaaaaattatccttggctacatactgtgcttgaagctagcctggcatacatgatatcctgtcacctaagacagaaagggagggatggctggtcgaagaatgagagaggaagaagagaatttcctaaattccagaaatttagacatttctatttttcatt

SEQ ID NO: 31605 - DNA, 1112 bp, Mus musculus
tgcttcccatagctctggcatgtctcattctgtcttttgatccacttaaggttgctgagagtcacttcaggacacaactgatcctaagggttagactttattcattagctgtctatagctcaaaataaaggcctttttttttttttttttttttttttttacaatatagaagaaaataccagatgccacaaactaacttgttcattctttttaacacactgtgttgaactggttttaaagagaactgaaataaggagccagaaatccaaaatgtattacacaaaagctggagttgagggtctctggacaattctttgagtatcagttaaactttgggaagaatggccacagttagtatagaaggcctagggttaggcatctgtgttctgtgctccctcagcctgatgcctagctttgtaacgagctcatgagcgagagcagacaagtggccactcaccctgggctgaatgttacagcttttctcttgtagactgcctggcatatatggaagccaactgaatgtagcatgaacataatgtgcagaaaatgttagatactactctgggtttctttgtgtcttaaatagacaaacaggtcttcttgatccagggatgcttgtgaacatccaacagcctttgatacgtgaggatggtacagttctcctggccgcggattccaaggtaacactctctcctgtgttgcagtgcaggctgcttttccaactatacctgctctcttggccatcagacatgatgctgaaagcatagcctcctgtagctacattaatttctcatgataatagtcatcctaggacttgttctaaagatgcttgtggttttcagatactccactcagggctgaatggcaatagtcactatcacatggcagctttgtggacattcaatggttcttcacatggcatctttgtagacattctatggttctgttccctattaatgtaatccccttattctacatattggcaggctcccattatgctgggaaggtagctattttttctaaagcagccttttgtaaaagctccagttctttcccattagataatttgtaataggctaacaaatgagccataaataacgaacttatagact

SEQ ID NO: 31606 - DNA, 1766 bp, Mus musculus
acacctcatttctctaatgcctgctctctcttccagattggccaggattcttgtccgcctaccagcactcaggctcatgagctccaacataacagaagaacttttttttactggtctcattggcaatgtttcaatagacagcataattccttacatcctcaagatggagacagcagaatataatggccagatcactggagccagtctatagtgcacaaccaacagctgccaacagtgggatgcctcctagaactgtgcaggtgcaagggaagggaagtgtagcagtgtcttggtgtgcacaggtgtctccagtgtgtcagccacttcttcctgttcatcccagacaatagcaactaaagatgaactcttccctgccctaagaaatgttttaacaccttttggtgatgcagattttggaacaatcttttaattcaatttgtattttaaaattctcaaagggcaaaaaacaatactgaagttttataatgtcagagactagtattaaaagaacctaagaacagtatgtgtaaatacattaaaaaaaaaaagtccttggaattaatagctactaattaccagggtaatgttagcactttctaagcacttcttatcaaatctgcaatgttaacatcttacctgtggacagggcaaatggaaaactgtgtctcttttgtcaaaatgctaatgatttctgtgaaaattcactagggtacaggagacaatcgttcacatttgtaagagggcagcacttctagctgtgtgcagtggtggtgctacgctaaattcctgtgagtaaaatgtggattcctggcattgtgtgcaggggatataacttgcagtgacccaataagagctgctatgccagcagagatagcctgtcagggtccttaccctcatggttggtcccaatccctgatgcctttctgcagactcttccagaacatgggctccactaattttcagaattagattgcagcttgtcagaatgcctgtgataagggtcctgtaattcttccagtgactgaaagtacacctggatccctctaccaacttgtaggaactggagcctttgaccagagtgcaaggtggttgactgcaccctttgacatgacctgttgtccaggttgagtgtggcttctgcagtgagagttcctattcctggtgcatgtggagaggggccagtatctgatcattcagaacctgcagctgggtgggggttgtgtatcctcgctgtctggtgagggactggccttagattgtgaaacaaaaggcatcaagagaaatactttctgatcttttaagtattagtgattttagtgtactgggacacgatgttcttcagttctcccaggtatgtgctagtccaacaaagctctctggggcatttgagataacaaaagtagatcatcttctctctgaaagagaatccaaaaataatcctcagtcagggcacatagtgcaggcctgtaaccccagcacttgggaggctgaggcacaagaattatactttgaaggccaatctgcgcaacttaatgaggaaactcctgagttttaaaggagtttaagggagtggggtagggtggtgacttaagtggtaatgtgcttgcctagcatgcacaaggtcttgggttccatccccagtaccaaaagaaaaaagaaaaaccttcattcacaaattcccttacgttataatgactatagtttccaacaagaaagaatacagaattcagttccaaggaagttagatctgacttaaagctctttgc

SEQ ID NO: 31607 - DNA, 2963 bp, Mus musculus
aattcccagctagatttggaagccagtgttggagaacagcagggattgccagtataaaatgatggaaaggacataattttgccagcttaaagctttttttttttttatgtatgtattcaaaattaagacaaaagctctggacaccagtatagttcgagtctattttaatctctgtagagattcctgtagtacattaatcagtacaccttacagtgctggctttgcttcccttagggttttagaatgtgagccactcagacagggcctggacagcctggctcccatttggtatttagaccacatagttggataagaagtaccagcctctaagatgacactgaagggggaaaaatttttttttttttaatatagaaaagagttggtgattctaactctggtcctttgtaagttccgtcattagtaatggccaattgacagggccactttgggccaaactccttcactggttgtccagatcgttgtggccttacctttaacaattgtatccatacaatgttctcattaactgaaatcatttcaaactttgaatgatgctccattccatggcttgtcgaatgacctatgaaggtcagccccagttgcttctgggcttcagctttcagggctttccacccttgatttatgagtctgtgatactccaagccttatgaagcagggctgacctgtctagacacccctctcagggaggtggacagacacactgacctggctacttttgcagataggctagggtggagagatacacaccaaccctggctaactaggctcttttccagaaaggtcttaaatgttgatagttccatgttaaaatttgggataaaatatgacaggagatgtagacagagaccaaattccttaagcaagtcatcctagttactcctcaaatgttacaatgtgtcgctgtccttccagtttgcagtgtgtgttgaagaggctcttcactgcctcttctctttctgaggctgcagttggggttgtggtgtcttgagtttctataatgaaattcaagtgagtcacttatgcccttggaatggttttctagtttgtcagtgtcagtattagatgtggatggtgttctgaggtagtcatggcatcaatcagggtggtcagtatggctttcaaatggagcagcagcatccacactatataaaattgttttgaagggtagtactgctcatgcagttctctggtcagtatccctaagagctggacctattgtctgggacctgatgtcatgggggtctggaagactgttgctgctttccagtggctgggtgcagcggggctgttggtgctgctgaaattctagatccaggccttgaaaagcatcacttgacagctgcttttttttcccagggggaaggtcctggtaagacagatgcccacctctttcctttgcctatctccaattacggagaaccaatctccagattacggttctttgcaaaaagtcttaactcttatgtcaatttctaaagacaactccaaaatgagatgaggttgacctaggtgttttgtacaaggttctggacctcctcattgagtgcctcccatcagtgtgtactttctgtgcacaacctgtcccttcagccacactgtgcatgtccagagttacaggcctagatgactgaatgaatgtacatgtgttcatattatcttctttgtacagtgtatataatgtgtgtacataggtgtacattatgtatacagacatgtagccacatattcaaacttctatgttgtcaagagttgatgctagcgttgctaatgtgaatagatattggggttgcaaggttcccttaacaggaacgttgtgcaggtgagtttcttaccaacttcattttccttagacagggagctgcctgggccaggtggcactaattcctgcacaaggaagcctcgagccagaaaagtccagataggagggcagttctctaaatttacaagggcccagaagctgcaagagatgttagcctaatatcctaaactaaggataaacttccttttcacaaaccagtttagcataactggaaggagcttggtgactgagacccttggtcttcttcaaaggctccaaagctggagcttcgtgtggctcagacatgggcatttgggatccaggggctgcagcagtctcccttgtttaccctgggctctgtcagcaagacatgggggctctctggtggtaaaaacaaaataccagtctaccaaacattctatgaaaacagtgcagatagctaaaaactgcaatcagtaaattatcctaacttagctacattctgtagaagttgtatttaatagtacgaaagctaaggctgacattttcctcatctagcgggtctttgctgatattcgtcccctatgattgggatttttgggctgagatgtggacttgggagacagggcccagcttggcagagactgctcgtggccacagtgagcaggcatctggcttggatgaagccaagtgcaaaaatttgcctgacccacaggttgctctttgtgtttttgaagtaaattactggagtgttttaagaaataattgttaagactatagtcctcagtgcctttggtgagacgtgggtcttttggcttcagcttcccactcgtgtccctggcctcaccctttgtggttgttcaatcttgcctgtgtcattgcctgttgtgacaatcacactattaaaagtggctttccaagtaaaacacagggaagcttggtagtccctaaatgaatccttccattttctctttgggggctattgtcttagcagcaacctaacagtaaacttaaaagtggcttaggaaggggaaaccatcagacatttctaatgctcagcaatatgcacttttagttaattttcaatattgatatttatacatggaatgtaggaaaatgctcaatattaccactcttaagttttagtgtttgggtaacatttggt

SEQ ID NO: 31608 - DNA, 1942 bp, Mus musculus
gatatgagctgaagtcaccaaatctcttttccacttccttgctgtgacagtgagcaagggttacccctgccttgacatgcatgtagctaaagggaagatcagactcagttcccaggttcttttctgctcctttaatgaggaaggataggaaggcgggaagccaagacacaggctccttcacccctcctatccatctagcccctagccccctagctcccatccccatgggatgctccagtggtctgcttcccagtacctttcccctcacatggaagagactgcccctgtctggagcccctggtcatgttttgctactctgtgtgttccttggcagggagaccctcagggaggaggagctggaaaagcagcagcgctttcatccaggcaactttggcccccggaagtactgcctgcgggagtgcatgtgcgaagtagaaggccaggtgccctgccctggcttggtgcccttacccaaggagatgacagggaagtacaaagctgctctgaaagccagtacttaggtctaagcaaggccatctgggatggactggtggcatttgactggtggagatggattacattggtaccataaatgatggaactctgcaatggaaaggccagcttgcacatctgtttaaaggacatgggatgaaggccagggttgccagctgctgaacagatgtcaataaaagatttagtcttcctatacatagtaagtgtggccttgctggtctaaagaccatcagcatcagagagtttgggatgaggaggtgcaaggcagtcagtgattgtctcagtcctggaactggccctgctgctttcacttaatctccctccagtttctactctggaagctgttgagggctgttgttattggtgagccaaatgtagctgggagagtccatgttcttacttagcagtccaaagcaaacatgtgggcagtgtactaaagcctgcaattcttgcttcctgagagaggggagattctccagccccagttagtaacgagaccttgggcagtaggatcatttcaggcctggcctttcagttcagcagatgtgagctgaagtcaccaaatctcttgtccacttccttgccatcaagtccatgtggtggaggagtgccagtggcattgtgttaaccgtaagcatggatttttctggctttgagaatgaagatgccacctgggtggtaatttgactctcaattcttgcttactaggtgagagacagacaagacacacacactcccggatgcctttctaggtatattttccagttatcagtgccattttagctatgtagactccattcttcagtggacaacagaatcttccagggtcacctaatgtttaccacagacttcttggcatttggccatataggtatgagtttatgaggcaaaataaagcagtggttgttaaaaatgcccaagactctttagatgcaacaaaacagggcaactgccctcctcccccccgcccccccacatacccagttcactcccattctcctggcccctggtgcaggggtctcagggaggcagtgcaactagaatccttctatctgcaatatagtgcctttccattgtctactctggttctggtttgtgattttgcagcagaccaggtaggggctgcaatggaatgcttgtagctctgatgtgtaagggataagagtgcttcaatagaatttggtacagccccccacaggtcattcttttgagtttttgttcccatggtgtcttaatggctggtatcagggaatagactgcttccctccatggcagatacggccagggcccaaatcctaagcatggaccttgaaaaaaagaataaagttcaggtcccaaggggacaaattcttgagcttcactttggtcctgacccttgtttctgccaaagctgtggcaaggctacagggcaacatgtgggcaactgata

SEQ ID NO: 31609 - DNA, 2895 bp, Mus musculus
tgtgcactttgagacatttccactacagttgagcaagaacgggaaaaacaatcggcattcatgtgctggtttttctgtattctttttttaatgaagtattccattttcaggggactttaccattttattttcaagatacagctctgttgggccaaggcagaaatggctcatgggcacctcttagttcattttctgcggactgttgttggtcattatgcagtattatagggcagcccttgacaggcccttcctgtagccaggataggcagggctctagcagaagtctgtcctgacttggttgttccctttcagcacgtcacttagggagatactgctgtgaagcccagtgggaccagggcctctttatggatggcaggaatgttgccagtgttgtcccctcccagttaaaggaagtaaaattcccaagtgtgagggtagtgggctggtggtgtcagtgtgagcttgactgtgagatagtagtgttcaactttttggcggatgttatggtttggagaagtttctacttatgcagctgtctgatcccctgggaacctccttccaggtctttggtagaatgaccgttctgcaggtcacattcaagggcctgttgatttggaattgtgactgggaagcttctgtggagtattagcaggtgatggaacacttctgagtcaggatgattctagtaacttcaaggccctccagtcagccctcttccttgtggtttatcctgacctgggaaactggtaagatgtactgagaaatggaaatatttgaggcacagcctgagaccattccacagccctgaagtacttgaactcttgatagaaaacagaaagggaagttatgtagcttagtactttggtttacaggaacagatcgattgacagatgaccttgtaaggttcttggtgtgctcagctctgggtaatttctttggtgatgatactctttagttaatggacaataactgtccactagtcactttcccctcagctttctctgggccatgccttttgttggttactggtgtataagctgaaagtcttctgtcacattctggtgaagatccatctaggtggtaagaatgttatctgggtgcaaagatctctatgttggcagctttaatcccagttcattagtacatgttggggctttggctggatagagagccctgtatggggctatgggaagggctggagaaggagggagcgtatgaaccctttgagttctgctgacaggtgtttactggcctgctagtagattaccagccatttgccagctctgttggtgtcaagatgttctggaaggtaggcagcctggcattttatgttacctggggcaggctacctctttctaaagcccaggctccaggcatgcccaccatatctgccctgcttggtctgctattgtgtcatggacaaagaggcagtgctaacacaagaatgaagctaaattctggtttccaccattacttttccagactcaaatcaggtgttcagggtggtacaactgtagacaatgcttttcttataagactgggcttcttaattagctgtgagtgactcgatgggcagtagtggcacatgacttttatcccagcacttgggaagtagaggcaggaatttctgagttccaatccagcctggtctacagagtgagttccaggacagccagggctacacagagaaaccctgtctcaaaaaacaaacaaataaataaataaacaaaaataaaaattgagaaaaaaattatctagtgacttattaaatgtacttctttctggaactcaccccaggtagcagtctgactgagagcatggagaaaacaaatgcttttagactgactgactattaaaccgggtgaacccagatcccagagggtttcctgagtttctcattgaattcctcgctgaccatattctgaaagtccaacagaacacgagagacttgtctgccccttgtctggatcagctcccagaatgcatgcaggtcagagttggtttgcagagggggtttggcctgtgagggaaccacagtgccagcttcttaccgtgggtgaatactcgatgattcccaaggatggagcacgtccttgatacggtgttggcagatcccttaggtgtaggtcctgttcatagtggacaggcttcttgcttattcccttctaacaacactaaggaactggagcctcatcactgcacttaccacatatcatgtctttgtcgtcagacagtaaaacatctttctaagtcatcatgagccatattgtgtagctatgccatgcggttcaaattgtggaattggcctcggtacgaggtcagactagaggagctcggtgtgctggtaatcatgatgactgtcagcaagatggtcattgatgcgcatgcactacactggggccttgtattagaggcttttattaaaaacattaaaatatcatttatgtaaggcttttattaaaaaaataacatgttcatggctggacttgtgtgtgcttaaaacgtcccttcacttcctttttgtaatgtgtgtgtgaatgtttgcatgtgcacatggaggggtgtgtgtgtgtgtgagtgagtgaatgtttgcatgtgcacgtggagaccagaggacaaccttgggtattagtcttaggaaacccatccgccttttaggcagggtttctcatcctgaagctttccagttaggctagactggctggtcatcgactctacagtcctatccccaccagaaactgaagctcggaggggtgagggagcctggggctggcatttgcaccaggcactggtacatttcacactttacctcagctctgccaacaggtctgtgttgtgttgtttgacaaagaacagattggatacttacaactcatttgccatcagtatttaggt

SEQ ID NO: 31610 - DNA, 1471 bp, Mus musculus
aagccgaagagaggggagatttgggagaagtgggagcctggagaccccacaaacgacagcaccctggccgacgtgccaaccaagacaaggattcatggtcagatgagggggacagtgactggctgcccccgtcctggctaccagatttctttctggattcctggttctcagatgccccccaagtcaagcggcagcaccctggcaggcgatccttcccctggatggagtctgatgtcaccaagaggcagcatccaggccggaggttcatagatcctgagctccaaagaagctgggaagaaacagagggagaggagggtggcttaatgcctgagaaacgtcagcatcctggcaaaagggcagtgggtcacccttgtgggccccaggggatttgtggccaaacaggcctgctccagcttctaggtgacctgagtaggggccaggagaccctggcaaagcaaaccccacaactggaagcctgggtcagggaacctctggaggagtaaggttagagtcaggctttaggtctaggctgatgtaagccctgtgtatcctatcccagtcccttcactggttttcttcttagatgctaaccctgggccctctgtacatagcatccacccaaacccctcccttacccacttcaggaacttcaaagagccaatcaggaagttaaaaccctacttatcccttcaagcaaggaggtgggggcccctcttctctgacagccccacagtctctcaccccttccacactggccaagacggttcttccacgcctcctaagggacctcctcagaaagggtaggattgaaaagtttgggtgttaaaatccaacttctgtcatctgccccatatggcaagactgacctggtataacttcagcgcatcctccaaggttgggggccctaagcagtttgggggatattcagatatgttggggggggtcacatcttgtatataaccctgctcttgttaatctcaatgacaataaaatatatccaggtcatttgttgctttgctcttctgtatagattaaggtttttctttggttttttgggtttttttttgggggggggtgtctccagccacaagctctgcccagagggcataaaggggctccctcttaactgagaaaatcaggaccctcttgcctgttaccattctcagaacacaatgttactgtgaccaagggtctggctctgcagtctttgattgtctgggtgtggtgggtagagattaagagctagagaagacggctgtagatccttgagtctgccagatttgggggtggggaggagtgtgcaggaggggtggtcctgtgatagtaccatgaaccaggcaaaggatcaggatacagtcaagatactaaaactaggaggcttctggagtgtgtcctgggaagcaagcttaagagaggacaaactgacaggagtcacctgatcactgtcctgaacacgttcacctgttatacc

SEQ ID NO: 31611 - DNA, 1633 bp, Mus musculus
gcatagcaggaaaagacagaagagcaaaaactgtatcatttcgtaatgtgatagtggtcggggaatcggggagatgggagctaagaatgtaaactcagaaacgtgcactgttgtgaattctcaagtgctcttggggatggttcgtggaggagagatggagaatgctctcaagtcgagggaggcaaggctgcaggttggcttggtagatacacttggtgtcaccgtttgggacatgttaaatatgatttgcacatttcactttggaaacacaggctgtggaggccagggtaggtcatgtccttccaaggtggagtggccattaaccagatgacacactgtaacctgctcacttatcttctttctggttctcttccttttaggaccccttttccagtaaatactttattagccaggaccccagactaagttatttacatgttcattgtaaatgcgatgtaaatgagagttctgataaaatatttttgtattttgtaataacaacagaatttctatatcgtaggattccgtggggacttgcatgcatggccaccaatccctttgagtggtagtaaacggtggcccaggaccacctggcttttgtttgtttcaacttggtttggttgtctttctatacaaatctgttacatgtcagtgagactattttcaaaggagtatattcaatttggctttttgtggctgaaaaagaaaattttaactattctacccaaggcgttctatgctctagggcatctaacggtccatctttaagtccactcccaccctccatagaatttattctctacaaagtaagtagatttttatttaaattgcaaatatcgcttttgctgattagagataacagccagtgtcagtccagttctgtgagaaatgccatccttgtttggaaccttgaagttgcttaatgtcgctctgtccctcggggggagtcacagtgactgtgagcggtgccagtgtgtgtgtcagcatggcgttgttttgagtgtggagttgtctggtgctcatgtttcctggattgtattttctgctttcttcttccaaggcagacgaagctgctgcctttagcctgacaactgtttgtcctcacagcaaatgagcttcagcatttagcactgagggacaagaagatagtgggggggagtggctctggatgcactggcatggtgcagactacacaaggagatttgaaaacagaaagcagatagatgttgaaaggtgtgagggaatatgaatggagtcagggagaaagaatttgtagaaagaaagaggtgacagccaccttgactagtccccagtgctttagagagaatccaatatgacaagcttagtcaccacaggggctggcttcttaccctggagggtcaagctgctgagatgataggaaacaacgtagaaaaacagaccttgtggcaagagagatttccattttgaactttgaggactgttggtcaaacgggaaggctcaagagtgagtttgcttcaagaagacatttcactgcaggcgagataaatacacagtgaaatagaacttcttgccttgcttcagctttttttttttttaaaaaaaaaaaaaaaaaagtgaagcgcctgctcttggtccattttctccctctcc

SEQ ID NO: 31612 - DNA, 1105 bp, Mus musculus
ttcaccacctgtgaaatcaaaagcccacgtcaccctctgtactgagggtaggagtgacagagtgtatgttccaacacagtttgtcggggtgctgtgctgccttgtggtcgtggtctcctccctgtgatctagaaggcatctgcttgaggaattgctcctacaacagaaaacagagaaggcttcgtggattcttgacaggtgtggcctccctgtgtctctcttggggcctcgctgtttatcccaacagcataaacctgagaagccttggaggatagaaatctctttagccttggctttgcatgttgtaggctaggatggcccttgccccatttgccagtctcctcttcccaactgcagagctcactgaagaggaagctgcctaccaagctaagtggcattgtgacaggccatatcgttgagcctcagtttccttgtctgtagtggaaaacaatagtgactttggagaggctaaaatgagttgaggaacagagagatgggcctctgcctgagagctgtgcctgagcagatgcatcactccttcctgcctctctgtagatgtcagagccccacagttgctttacctccttttaatccagtgtatctgctcctcctgcccctcttcaagtccttcagaagttggactgccctgcccttttccttctgaaaagatgtgactattctgtttctaatgccctgtcactgatgtcatttcctctgtggcttcatgttgtcatacagtaatatccagcaggtccatatatcttcagcctggatcttgctctcctgagctccagatttgtcccattgtctcaaaatattagcaggggactctctctggtactcctatggatgccaagatcagtgtttctcttagagtgctgtgtttgcataaagcctacatgcatccacctagaggagtggttctcaaccttcctcatgctgcaaccctttaatacagttcctcatgtcgagaagaccctcaaccataagattatgttcattaatacttcataactataattttgtgactgtttatgaattatggtatgactatccaataggcagggtatctgatatgtgacccccaaaggagtgaccaataggc

SEQ ID NO: 31613 - DNA, 1201 bp, Mus musculus
tagcttagtgttcttgtgagagtcctaacagtggaggagggagctgtttctgacttttgactgcttacggaacccttttcctcctaccaggttgccttatccagccttgatgtgatggtctctgtctggtctcactgtaccttgtcatactatgttcggttgatgtctctgagaggccttctctgttccgagaagaggtagaggggtaggggtggatctggggaagaaggaaggtgaaggggagagactggagagagaagaataaaaaggaaaaaagggagggaggcagggaggcagggaggcagggaggcagggagggagggagggagggaaggagggaaggagggagggagggagggagggagggagggagggagggagggagggagggagggagggagggagggagggagggagggagggagggagagagggaaaaaatgtgcttagcagtaccttggtagagagggacaatagaaacactggtggtgatactggtggccctgatcttgtagttagttgtctgtcactttaagatgcattgctgaaaaatccagtagcccactgttttaggaagctgggtttatggattaaaaggccaaacaaacagacaggcccttgttaactgtctctgaggttggtcacaataggtccttctagtcaaggtgactttgacatagttgtcccagaacttctgtaggccacatgggccgtcctgtgggaaatgtcatttacagcgagaccacttcttgcaaggagatgtaactagacagctcttacaaatgctactccaggtctctagttgaaactctgtgtttagccctggagtcttttttgctttgtctctggaacactcacctttctgcagcttggtagagcccaggcactgtgtgtgtgctgccctcaattccccaatacagaaggatttgaatacctaactctgctacagggggacctttactgagccattcacttagctaccaagttcttctgaactgggtttgccccctgtcctatgacagctccctgggcatcctgcatggtgggcctgtgagcatggcagagccatcctgtgacctcgtctccatgtatcttaggcagatgaaggctagtgtggaggttttgatggatctctactttttcttctaattgcaagctattgttggaggaggtagtcctcatgagggctctctagggacta

SEQ ID NO: 31614 - DNA, 1219 bp, Mus musculus
ccaccatctaggtaaagaggagccttttcatcctacaagagtcccctttgacaaccagtttagacccaaaagttctaagtggcctgacttttctctggaagacagcaccttctctctttagctgtgtaggtttcctgtgggatatgacttgggactcacataggcgacatggagaaataccaaaacgtcctctaaacatttctagatctgtccttcttagagaatcctgtgattagccaaggaactattgatcaatcccctgcccccctttctcatatctctctttctctctctccgtgtgtgtgtgtgtgtgtgtgtgtgtgtgtgtgtgtgtgtgtgtgtgtgtggtgtactacaaaggacaggactacttaagaaaaacaacaattgaacattggccactcagttcttaaaattcacaggtggcaaaaggccttagctgttttgtgagtttccccacggcaaccaggtactgggaacatgtttgggattaagatgtattcttcctctcagaggacagttatgctaggttcctgtctgcaaacataacagagtatcattagtcgtgtcagggactggttcttgtcagtggataagtctcaatttggatcagtcattggctggccatttcctcagtctctgttctatcattgtctctgcacatcttgtagacaggacacattttgggtcgaaggttttgaaggtgggttggtgtccttatccctccactggaagtcctgccctgctataggaagtggccacttcaggatccatatcccccactgctaggagtctcagctagagttgcccccatataccctatggggcctcccccacatcccaggtctctgtcgtgtcctagagatgccccaacccccacaggccaatcacccttctctttcccttgctctcctaacacatgatcttctgcctctgccctgttcccctcaccatcccctcttccacccagttctctccttcaatcaactgccagtatctattttgtttccccttgtaagaaagatccaaccatccttccttgagccctccttgttacttggcttctttgggtctgttaattatggcatggttatcctgcactttatggctaatatccacttataggtgaggacataccatgcatgtctttttgggtctgggttaccccactcagcatattttctagttccttctatttgcttgcaaaattcatgatgcc

SEQ ID NO: 31615 - DNA, 1357 bp, Mus musculus
tagatgagccccatcccaaaaagatctcatcttaaatatgaaaatatcgccaagtcttcaaaatgtctgaaatacacactgatggtctcaagcatttcaatgagggatactcaacctgcggaacaccctaatgatgtaaagtttaatatttatgtttgaaattatttattgtgatgtaatatttttgtacgtaaaatgattttattatgactgcctgtgcatgatcctcccccttgcagtcagacagctgcattttacgtactctacattatatgtagtatatgacaaagtgactcttcgttatcacggtacactgttgtttactttttacctggaaatgtgttttactgttacattttgaaaatttttgtaattatttttttaacaacctagctgacatcaaggtgctatgtgggttgaataagggtatttttggcaattgtggggacgtttcattagccaatgagtaagttagcaacatcacaggttgtaccaactgttcatcatagtctttattccgtttcatgtgatctctgggaagaattgtgctgccttggtgctaatattatatgtttttaaagtaattgtcagagtcaaaactgtaaacacttaacaaaagggagcaagaaatagattatccccaatggataaaatcacttgctagagtaagacctactatttactcttctttttagacctgtctttttttttttaatagtagctggactcttgtcttactgttgttgttggtaatatgatctactctgctccatggtgccttggactcctgtcaatcattgggagggtccaccaaaagcttcattacagagtgacactgggaaaggaggctctcctgctgttttgtcacgatatcctccaagtttatgagcagcaacacaaaggatctaccacaggtgtatggccttaacacccctcagcatactcagagaacgacaggagatcgaccaccttttacctgaaaactttggccaatgatatgacttcccttgaggctgggagcctaataccctgccgggtttcctgtggtcttcagcgtttgtgtgaaaaaacaaactggtgtctaagatgcccaggtctttctgatcttccacgaatccaccttttgttacttctttcaggaatgaacgtgctgaggcagtggtcacaagacattttacttgagaaagcctgaccaagctttccaagaccaaagagattaggaaaaccctgacagtattccccaactccacagaaatgccagagcacttggtgtttgaacaagtgtcatttttctattgttaatacatgtgaaacatattataaataaatattgtgaccacatccaaaccatagatgc

SEQ ID NO: 31616 - DNA, 1223 bp, Mus musculus
caatcaacaggaaatctatacccaccaatagactagtcattttggaaatacaggagattttttgttttattattattattcagtgtaataatcagtgacccaatatctttcaaggtacctggagtctcttccctgcccctagacagaaagtccatctgaaaccagtttttaactttgctcctagccagtagttgacatggtgaggcaggtttgccactgtaaatgctatacaaacttctggggcagttctaagcaaacaggaggattaaccatgtcaacacaataccttgggtaagcggtggcataaattatggatcaggtaggtctgatgtgtctaagtacagtaaatattctataagcacattaattgcagtgaagctgaaatcagccattctataaagctatttccagaagccctttttattcagtggggtcctgggaaactcctactcattcctagtgccagataaagagcagattaactgaagtagggtgagtggcactcattgatgcttctacaagtcaggggtttcagcatctgtggctgcatctgcagggattgcttataacctagttgcaaggctctgtgttcaactgagctagaagtggaagcaagagctagactgtgctccttagctgggctgtgggattttattccggagtttaagaaaagttacaatgtcccatgtatgattctctaaggatattttgtttacaacactggaaccttttccaggtgtatgcttgacagagcttgagataaacttaagacaggcagatgtcctttgaaagccccaacttctctgtcactgccacatactactgttcatgacatgttacttctcgagcccgtggcatgctcgcttagccagagctaactgttccaagtccattcacactctcaaaggtagtatgtcactagttctaacgtcactggttaggcccctgtgagaaccttacaagcctccttattacatagtcttgtggtttgatgaagaaaataaatctgtgttttccttctctaggttttaatccttagattatcccatatttttctaaaataaattgtttaggaaagtggaaaaatatattcatagtgagttataaaatataacgttggggatatattttcttgtatataagtatatatgtatatgtatacatatacatatatatgtatgaatatacacatatatgtgtgtgtgtgtctgtgtgtatgtaca

SEQ ID NO: 31617 - DNA, 1119 bp, Mus musculus
tgaattaggcataatatatcatatctgtcctttgagagcctctaattagctgtcaatattcctgtcctaccagatggcatgaaaagaaggaacaaaaatgaggtgggaatgactagtggtgacattcagaaacctgagtggtggctgtggccaaaggagagactttcattcccaacgtgtgttctacgagaatgttctatgatgacgtgtgtaaatccacactgtccaatacagaagccagggacctacagtagctattgaatgggactgaccagtgtaatgagtaatggattacatttcatctaatttaaatgttaaatattatctgccacatgtaacgcctgtattaaatatacagctcaggaaagacatattccaaaaccattcattctttctgtatgtgtgtgtatgtgttcctgcatgtgtgtttacatgtgtgtggagggcgcaggttcacatcaagtgcctgcatcattcagtctccatcttggttttttgagacagggcctctcactgagctttgagttcattaatttggctaatctggcttgtcagagggctccaagtgtttctgcctcccttccatctccccaggaagatgtgtgtgtgtggctttgtgcaaacataagtataagtgtctgtagagttcagaagaaggtgtgggatcccccggagatggaaagttgtgatctctctgacatgggcgttaggaactctgatcctctgcatgagaattataggatcctaagcaccaaatcacgtctccatctctgtaaacgattttaaaacaagctgagtgaggttagtgagaaacttaaggagcaggagataattagttggatgatgttgttttaatcccgtgtctgggtgatccaagcaaacacatttctgccgtttgaggaatgctgccaacactaaccttcctcccctttgaggaaacatggcaaatatactttagtatcatcctgtgtagatggttgctttaatgcccttttctgatcttatccccgaactcatgattaatggatttctgctatgatcccagttgcaaagaaaattattgtctgtcacctgagtgttctctcagccctaactcaataacatggcttcttaataata

SEQ ID NO: 31618 - DNA, 1164 bp, Mus musculus
atctgtgcccagtttcctctcagcctttcagacatggaggctgtgtctagtgtggaaacaccttccctcgcctacaacagagaaaaagagcctattcctgctctcaagaaatggatggctatataggataatcctaaagaagaaagctgtcctggggtaggagacaggaaactagcctgagagtagaaagagcaagccactgtcaggatgtaaaacctagttgtgaactttaaaagggagggtattttacacatgtataagagtctgagagtgggccagtggaattgttgaaattagttttacttgactgaagaagaggaaagggacatgggggctcagacaattaacgaggcccctcctgcagggcctgttagctgtacaatggacttggggctttatctgaagagctacaggaagccattgaagagattgagccagagagtgatatgattagactttgcacttaacaagcagtggggctaaagacagaaaggatcaggtaactcacgtagaggctgatgcaattgtttaggtgggccatggtcctgactggaagtgtgggcagttggggtgggacagcagacagattgcagagctagcaatcaagtagaattagtaacacttgaaggttaattgggtagaaggactgaaggaacacaaatgcagaggatttcctgtgtagggaggagctggtgatgtcagacaccaagacttgggctgatgggataaagcacagatgtatgttcttattttttctccctttaactattgggattataatgtaattgcatcaattcctcctttcctctatcaagatcctcccatataccccttcatgctctcttgcaaattcttagcctcatttttcattatttgttgttatatacatatatatgtatggaactatatatatatgtatatacataaacatataatcctcaatatgtttactcctcaatacaacctgctcagtttgtatgatgttccttgtatgtatattttcagagataactatttggtattggttaaccaattgtgttctcttcccaggagaaacctatgtctcccactctcagcattccttagttgactatagttctttttgtagggttgggacctcatgggctccccgggccccaatccacttgggtatgtctattgggg

SEQ ID NO: 31619 - DNA, 1149 bp, Mus musculus
gtttctgtttttctggtactctcccaaaacaggagatactcttgttgcatagatgcagtcagtggtttcttgcagtcagtggtttcttggatttggggagttaaaagtcatgtgacacaggcctattgacacatcgatgtgaggagtttaaggtaatgctgctgtgattgagaagaatcgccccagtaaagctttagcatgaagccaagcagcttataatgacacaggattctcaatgaatgaagttttaagggataaaatctttacaatgaaataaaaacaatcttaagaaaacgattaggctctagtaaaaataagctgtgttttaagagtggtttctatattcagcgttattatccttcacttatactcagataaatatgttatgctcaagctggctcatagtcttcagaaataagaatggacattatactttgatgtaatatcaacatgttgcatatacaaagtaaacacttttggtgataaaaaatattgactataaatgtcaacaaacttattttgtctttcagtttaaaaaaaattaattgtattttgtgtacatgggtatttgcctcaatgtgtgtgtgtgtgagagggtgtcagaagacctggcgttatagacagttgtgagttgccattggggactgtgagttgaaaccaggtcttctggaagagcaaccaagtgtccttagccactgagccatctatcgagctcaaattttctctttcttaatagcaccatctatgtttaattaaaaaactaaagatgtttttgaactatgtaaagatatgatgaattataacagtgagagtttagagtttccccttccctctagtctccctccacctttataattgcttctgagaagtcataatgctccttgctttccatatcataaacaccaaactcatagaggataacagggatggggaatgcttagttggcaaagtatttgtagcataagcatgaggccctgagttcgattcccagaacctacctaaaaaatgtcaagaatggtggtggcatgtatttgtaatcccagtgttgaattgggacagacagctggctcttagggctttgctggccatccagtctcatttattaggtgcatcaatggtccaagagtcatgtctcaaatcaaggtggtt

SEQ ID NO: 31620 - DNA, 1131 bp, Mus musculus
tttcccacaaacattagtggggcctaacatctgaagttactattaggtttagagtgggtcttctttagcatctaacacacaatgtactagaggctttgtactctccctaattgcttctctctacctatggagcaagttcttactgaaggggcattacttttaaaaagtctttaggatctccttggggctttaagtccctgatagactggatgtggtcttcaatacaatgtataaactcctgaaagtagggtgcttttctcattcattccttagaagttacatctcccctaagagtgtgacttctctttgaaagataaggaaattaaaatccaggaaagctagccagtcatccacaaaggaatagataaatgaagaacatctggaattcttccactgattcagaatcttaatgttccaccagggtctcaggcagcttgtgcctctacagtctcaaggtctcgaaaatagtggtatgtactgtgatagctattcttgtttgtcaacttgactacaactggaattaactcagacttccaagtggggaacacctgtttttgaagtgggaagatccacttctaatcttgatctttgaggtgggaagaattacctttaatccagatctttcgaggtgggaagatccacctctaaccacatggaagaaagaagcttttgcgctttgcctgcttgctcttgcctcagtagcaagttcattccttcataggcattagagtctgcttcttcaggattccagcatacacggaagagcagctgaagcattcagcctcgtgcactgagagcaactcctggattcttagaccattccttcaaggcagcccttgttggactcgctggagcacagcctggaagctggtctaagaaatcccatttctatacatagtgagattcattcagtaagttgttattcttagagaaccttgatcaatacaaagacctataagcatgatgggaaataggaggagaggtaggaacaggggacagaggggagtggagagttggtgggggggaggtggaggggaagactagacagaaagaggcagagaaagaaagaagaagggtttagattcacctctgctctattattcctctggcttgggaagtcactgttactgt

SEQ ID NO: 31621 - DNA, 1215 bp, Mus musculus
ctaagagactataacagcagactaacaaggcaatgctaatcactaaagataccccccgaattcttagtctaggtgtataactggactgctaatgttgatcttaggcatcaaatccccattgcttggtgggactgttttgttttgtaagggaaaaggacacagagctttcactggaaggcaaaccaggggtagtatataactaaattcagaattttccacattagtgtctttcttggatattacatgttaaaataggataggaaagtaacttagcagtcctcttgggaacagaaagttttgccattttaaaggtcgcatctgtaccccaagggaggtgtatagaaaatagaagcaggttccttccttaagctcatgatctgaatgctttgacggccacactaacaatgctgatggacaatgcagaacaacagaggttggctgagaagaaaaagcatagcagagaaatcttcgcttcgaagggaatctaactgtaatcccaatttctaaaactgatcaaagcataggagctctgtttgaagtgggtttgtagcccggagggtcagctctgtcaggtagccttacacaatccctatcccctggaggccctggaggactgaagcctagtgctttggaaagcattatcctggatactccattttcggggtggtgacagatctcgcctagctaagaaaacctgttagaggaaacttggagctaatgagtgacagacacggcaggagtctgcttttttttttttttttttttttttttttcggtctcatcgttgcctgtgacgctggactggatcccttctgaaggcatttcagtgtgcagaagcatcacctggagccttgatgccatgctgatcttccttgggaggatctgagatatgctcccagatctgcatttctccctgtctgtcaagggcagccaccatttaggctcgaatattgagacaataaaccaagaggaagaggaaaaagcaaactgggaatgactctgcattttaaaacctcaaagcccactcccagtgacatacctcctccaccaaggccacacctcctaatccttcccagaaagttctaccaattggagactaagcatttaaacacatgaacctatgaaagaccttctcattctgaccaccacattccatttcctgacctccactgggttgtggccatcatgggaattagggggtggctgctttgagat

SEQ ID NO: 31622 - DNA, 1209 bp, Mus musculus
cagaaacaagaaggttggctgccagtaaccaaacccagccttagctcagagggtcagattcatcaggccccgccacagaaccaatacatctcacctgcagcagtgcccattgcaaagcatcagcctctggatagaacagacaagctccttctgggttgtctggtccagtctgaagccgagtagatccgaatataggaccccatgcctctgggatgagggagatgtctgttaatgtctccaacgtgggaagagtcccctcccccagtgtttagcataagcccctgcttgccttctgcccagtgggagcagaggaatgaactgtggtggaggaaacctctgtcagcatattttaaaaggattgaggctccatattcccagaatagttgatcatgcactttttgaaaccataatccaggtcctaaggattgagtgaaacgtgatgacaccagtggatcttgatctgtctacagggaaatgaccttgttccttgggtttggggacagcaaaggaaagtgtaatggtttttcttgctaaagtagacccattttctgaaccctcagaaggtgtggttgtgtcggctgtagccctgagaagtggtttaagtggattactgcctagctgagccaaagtgtttgcttgtacctgtaggaccactacagcaaaccctgctgacagagcatttgtatttctgtagtaccgggttttttgtttttttgtttttttgcattttcccttcagacacaaaacttttccagtcaatcactgttgttcctgtggtactgtaataagggagagggcaaaaaaagagaaaacaaaaacaaaaaaatagaaaagaaaaccagccaatcattgtatgtagagtttaaaattgtaattaatagagcctgtttgaaaaaaaacaaaacaactgttgcctttttttttgtataaaagagaatttatgacagaagtctagctgtggagaatgtgacatgtgtctatatttctgaatatgaacagattgattcttggggatatactttattgtaaactaaatcaggtatgtaaagttgttttaaaattatataagtaatcgctacagctttagtttgttggggctattgtttccccacggagagactgctcatgaataatcaagcattcatttgcattctcgtttcttcatttatttcttgcttaacactctctctgggttgatgaaaagcaatg

SEQ ID NO: 31623 - DNA, 1195 bp, Mus musculus
ggagcataataattacctggagagaagcagcattttaatccctagttgatgtccaagcacagatggggcagtcgtgtctctgcagtgctgagcctgtacaatggtgtcattttcttcaaagccttgttgcactggaatttgccagatgtattgagaacaaggatttcaaggcctgtgataacaatacaaccccttaggctctgagctcaaggtagataattttgtggcatttactagagtcttaaaagcagataactgtgagcattgcctgtgtggcattgaatttaatttttttatttgcttctgcattaaaaacaaaacaagacaaatgctaaagctgtctgtggattacctgtgttccctttcccctgcaggagggaagggcaatggaattgggatgcttttctattaagaagctgcttttcctgggtttgagttctaggcaggccagcttacagagcaggtttgcttaattacttaggttggaactccctgttctaatggactaatggcatcttgggcctttgtcttttctgctgcaggcacaacccggtctcccagagaaggagaagtgcctggtgtggattacagctttctgactgtgaaggagttcttggacctcgagcagagcgggaccctgttggaagtcggcacctatgaaggtgagctctccagctgccctggggcattcctagtgcctgcagtggtccaggcagagcgtttagactctgggagagtttaaagagggaagaagagattaatttacctaaatatggttcgtgccaataagacataggaaagcgtgaagactctctttgcaaatactttttctcttttcccatttaagcttaaggacatacattctgtggtttgatgtggacacacgtactatttcactgaatcataggttgtcactgttggacttctaggaattgtttttatcttgaggaaatggaattccatttttaccaggagatggctttgcctggaagtgtgtttacacagatcataaagaaatatcacagagtttcctatggcagaatgctgcctggctggctggaattcagtgtgacgggcaatgtgacagctgactggaactcctggtttggtttggtgtgtttggttttggtgttgtgtatatttttaagttgactttcgcattagcatgcatgcatttacacacctgtgtgtgttc

SEQ ID NO: 31624 - DNA, 1113 bp, Mus musculus
ttgggggagcactggtacaggcatttgaaacctcagagcccacccccagtgacacacttccttcaacaaggccactcctaccctaacaaggccacacctcctgatccttctcagagtcccactccctggtgattaagcatttgaatacatgagcaagtgggggccattctgatttaaacaccacaggcagcaacagccacagcgggttctctaatctcataggagatttatttgttggagcatcatctcacactgtcttcatcccagaggaggaaaccatagttgatactttctgtgtatactgttcacatttgcacacacatttcatcctgggtttcctcctctaaccaacagtgtttcatgtagcccaggttggccccagactcctgttctcttccttgcattctccaagtactgaaagtaagtcatttgcaatcacacctggcttcgctcccttaatgtttaagaaacattcatttatgtggtgtacatgtgtgtgtaacatgtgctgcatatgtgccacagcctgtgtgtggaggtcagtggacaacctgtgggacttggttctcatcaccatgtgggttccagggatggcaacaagtgtctttacccactgagcccttatctcaccagccctttgaagctcgggtagtgggaacctactaccttctcttcagagagagcggatggtcctgtggtataggagacaggcgggcagagaagggcatcagctgcacttactagaaataagagaaacatctgagatcaagggaactgcagccttttggatgaggtcttttaagggcagtgggatggagctgataggtagaccatctacataaggttctgtttgttttggttttggatattgtttgtagggctgggagttgagcccaaggcatcatatgatatatgtaaagcactcttccattgaacttttctccttgccctgtacactttacccatgtccttatctataaacttaggatggtagcattgctttagagattatatacaagaaataaaggacttgttggctacatctgagtagagacatctatttctgttactgtcatcgcttctcggccttttggctacgatcaagtgtatttc

SEQ ID NO: 31625 - DNA, 1181 bp, Mus musculus
ggaactgctgcagaatgcatggtaactgtgctatccggggaaaatcagcagcttgctctaccatctcccatctcacttgtctttcctttcccctttcctttcctttcctttcctttcctttcctttcctttcctttcctttcctttcctttcctttcctttcctttcctttccttggtgttctttctgggagtatttgatgtaatgtgttgagtagaatagagaaaagcagatgtatgtctcttatttaaaattgcaggggaagctctctgtctcagtattaagtactgcattagttagtactaagtactggcataggtactggcctaggtctctccaagataccctccctctgaccagcaggtatgaatgctagtgaaggtctattgtaagccttctttccattctaatctagctatagtctgacaaaagttggtgtttgttgcaggatatttgatcacactgtgaaccccaagactgagttatttatgcttggccttgaactaactctagcaatcgttgtaatcttctggctcctcctcattttctgactctttctgtcttcacttgtgtctagcttgttctccctctgcaacctgtctctaaaactctcctggtaaaactgcttccctctttctttttttctgctctaagtagcctttctattctctcctttctcatgagagttgggcatatcctattctgtcagatctttctctgattcatcactttgtccaccactcagtcagacgtcgctttcaaacatgggtgcttccttctgcaagctaactttatctttattgtttgggattaaagacatgtattatgatcacatctgtgttccatctagtggatgtgctaagggatgagccacaccacaaggagaaagaaacaggttcttctcagtaaataccactaccctgggattcgcactgtgatcagatatcttgtaacagattatttattttctctttcttgctttttttaaatcagtattagaatttctcaaatgttttttccatgatcacaaagtatttgcataggttttctttattgagcttttgagaacaataatcagatttatcaatcagattattattgttattattattattattattattattattattattgttattattattattatcagctccctgcgcgagtgcaggcaagcaa

SEQ ID NO: 31626 - DNA, 1158 bp, Mus musculus
tctttaattgttattaatattgtctaagttagggttgggattgatatgattcaacaccacgcgcatacatatatatatacatatatatatagtgtatgtaaatatatgcataaatacaacctgctgagtcttttagtgttacttgtatgtatgtttctgggctgaccatgtggtgttggataaccaactagggagcttgtccctgaggaaaactattcttcctctctcagaagtcacgagttgcttgtgggcctatatataggagtagggctccaagagattttccccatttcatttgggttgtcatctgaagctggaattattcaggttttgtctactaaactcaagggtgtggtgtgttcagcaataggatcttaccatcaacttctggaagtcgctgataataacctgtaacatagctctgtcatcgactcaaaaagaattgacccattctcgttctggggtttttatttggtagccagtgattacagggtatgtgtacatacatgcatgcatacatacatacatatgtatattatcttctgtagtgtttccaaaaggaatttactgttagctcttgctccccacattccctcatctgcccttcctttctatcccccactccacttgatgccttctattccacgttttctctctttcctctctctctaccattatagtccatctccccttgcttcaaagaatccctgctcccatataagcctttactagtttcctaacctgagtgggcattccaaatgaaaacacacatatctaaagcttaaaagctaaaatatgtattttcaagaaagcaagcgtatggtttgtctttcttcatctgagttttctcactcaagatgatggtttccagttcagtccattggcctgcaaatttgacttttcctctgttgagtgtttttccattgtataagcataacacattttcattatccgttcatcagtctgtgatggttattcctggttgtcaacttgattacatctggaatgaactacaatccacaagtggagggcacacctgttgtgatccagatcttgaggctggaagacacaggcttctgacccaggtcttgacatggagatcttgaggcatagtggccatgaaaagctcaggcccaggcaaggtactacacaccttta

SEQ ID NO: 31627 - DNA, 1156 bp, Mus musculus
ttctttcttttttttttttttttttttttcttttagatgaatttacccgacagtagactcagacttagtcttgggacaaatcagtaaatgagacaggaaaaaaaaaagggtttgcattgagggagctggtagtccttttgaaacagggtctcactatgtagctgtggctggctcgcaactctctatgtagagcaggctggcttcaaactcacagagatcccgtctctgcctcctgagcacagggattccaggcttgcactaccacttctgattgatagtcatcagaacatatgtgatcattataattttataatagaaaatacactgatgaatgaagacagaatataagtgacttcattaagttttattagccatttttccccctttttacagtgctgggaatgatagtcatggccttccaaatactttgatcttaagctacaccccgtccttttttttttttttttttttcctttttaagtgaaaaactttaaaacctaatgctttattccttgagcatttcagacactgtatttcaatcatagtcatctcttctcccaacccctcccagatctgcctctgcctcaccgcccgcccaactttgtgttttctctctgtaccatgtctgttttaaatccattaagtcagttctgaggtagcctgggtgtggagtgtggcccttccatcagaggtcacacatcaaagaaaacggactctgcctttcccagtcactccgcagtaggggacttgcctgcctccccatttgttggagatttgtttggcttgggtttgcacaggttttgtgtcttctgtcacaattgctgtgagttcttacgtgcatatgttctcttgtatacaaacaaagataaaacaacaacaaaaacccaaaccgaaagtaaacaaggggaaaaaaaaacgccactatttccttgtaataatacatccttcttggcccttaaactattcctgtctccctgccattaagatctctgatccttgagggggaggggtgtgatctggatgtcccatttgaactgagcacactgaagttccttattctctgtgcattgggcagttgtattttcagtgttaattcctctcttgtgtaagaagcatccctggtgagggtggagaggcagacacactgatcttaggg

SEQ ID NO: 31628 - DNA, 1206 bp, Mus musculus
tccttggcttcggctgctgtaagttgctataggctgagtggcttgaataacagttattttctcttcctcctagagggtagaagttaaatattaaggagtcagtgtgtttgccttcttctgaggccggtctccttgacttgtctgtatggaagtacattctctctgggtcctcacatggtctttctttgagcacatacatgttcaaagccctaaggttgttgttattaggacatcagccatattggattagggtctacccatataatctcattaactttcattgtatttttaaagaccctatctgtaactagacccactcattcttggaattctcatttccacatatgaattacatgtgcatgtaacgaaatgaagcttgtagtggagatttgaccaaacatcaaatagatccaaattcaaagttccaagatgcagatcattttgataagtctctctttttagaaattgctgaaagcaacacttttacttttaaaaccaaatagtttatttgatgaaaagtccagtgatcatattacagagcttagtgattaatcctcacagttagagacactttcttgttcatagcatcaaacctgaagttctagccatacataggatgtagctgctgcatgatggatacttactgagtgatggtgttttattggaattgagggcacagatgagttttgggaattatcttcacaagaggctatgaaagtggatggctacatcaagtggagtgagttataaaatgaagggcagaagctaggtgtggtgaatcatgtctgtgatccagcactgtggaagacagagccacaaggaccaacccaggctccatactggccagcctggcctgtatgcagttgtctcaggaaaaaaaaaaaaaaaaaaaaacttaaaaagaggcaatgaaagttttatacttagggtgtagtacacacacaacagagaaatttggtcaaaatggggctcaaaagtccatgtctgcaggtgtcagggaagaccatattgaagatgtggctattgtttaggaaataagagagctggatattaaaagtcactggttccagctaggcagtggtggagcatatgtttagtgccagaacttgggaggctgaggcaggtggatctctgagtttgaggccagcttggtctacagaatgagtttcagtacagccagggctacacagaaatcctgtctcgaaa

SEQ ID NO: 31629 - DNA, 1199 bp, Mus musculus
gtgtaatttaattgttcccagactttcttatattattccttagaacttgagaactcatacaaagggaatatatagtaaatagtctctagatacagagaaaagaatcatcgtaacaaaagctttagtgaggtgaatagacgattctaaaaacctttaaaatcttagcagaggcatggactgcgtcagaagtttttactctctggctaattaggatgttggtgggatgtgatgagttggatagacatattctctctctctctctctcttttttggtttttcgagacagggtttctctgtatagccctggctgtcctggaactcactttgcagaccaggctggcctcgaactcagaaattcacctgcctctgcctcctgagtgctgggattaaaggcatgcaccaggatagacacttcttaagaagcttctaaattttcttattttacaggacctagcacacagtaaaaacttgacacacagttgactggatgaatgcactttgaaaggacagacctttctatagtgggaatgagcaggataatgactttatgttaactgatgatctcaggaggaataataatagatgctgtgtggtgtgtggctctgtgtgtgtggcgtctgaggaagtgcagatctcttttgagttgtaagtccatggggacagctgtctctatttttctcaggtgatttataaaaacaggcccattttactatgcctgccattttacaatttcttagaaatgctacttttcatatctgttttcaggctttctcatttgggcagatgtattttagagtttgcttacaaacatttcccagacatattgttgatcatcgggtctcttcagttaacagcagcttcttgggggctgttttcgtacatttctgattggcagtttgatgaatgctgtaggtcttcacagatgcagagatagagaagtgaatccagtggaaatcagatagagctgggacagttcacccaagatgaattcataagggctgggggtggggcttgaaactgtgcctgggacagttcatccaaattgaattcacagggtttagggtggggcatgaagcagcgtggctgtagcttgcatctcaagtaaggtcagtgttgatttttgtgccgcttccccagatgcgcacacattcacttgagcttgtatttcatttatttctctgaggcattctgcatagaac

SEQ ID NO: 31630 - DNA, 1241 bp, Mus musculus
ttagtgtcttgtaattgccggaggcaagtttatgtatcttgtcacagatcctccctcccatgtgttaggcacagagcacatgctcagttcctgttagtcttggttcaatttcttagctgtctcttactttaaaaaaacagcactgtgatctttttgttctatgtactagttcatacactgagtgtaccatttctcttggtaaagtggaatgaatgggtgtcagggtcagcagtgggttgctctgtgtacccataaaccgcgtgaacaaccgctctttacactttgactttgtagaccacatggcgcatggaggtcctgagcaccttcaagtccaaagactaaaacttacgcttagaacaagaatattcagtctaaagctggatgtggccgcgcacagctttaatctcagctcctgggaaatagattcagagcagggtgacttctgtgtttgaggctagcctggaatacatactgagatcctgtcttgaaacaaacaaataaacacatattcaaaataagaccttttctgtaatagtatattcaataaagcacaaaaatagtctttaaaaattacccgagttattgcataacaggattttcaggggttgtacttttagttgttggttttgttttgtattgttgttttggtttggtattggagacaggatttttcttcataaccctggctgtccggaaactcactttgtagatcaaggaagccttagactcacacaaatctgcctgcttctgcctcatgagaattagacgtgtgtaccaccatgccaagtagttgttctggtttctattgtacaacctggagtcacttggagaagaggaaccactctctattgaagaaatggtttgtggctctgctgaaaggaattttcttaattgatgattgatgtaggagggtccagcctactgtgggtggcaccatacctatgtagacaagcaggctgagtttgacccagacaccacaccagtaatcagtgtgcctctgtgggttctacttcagtttctgcttgagttcctgtcctgacttcccctcaatgatgggctgctatctggaaatgtaagctaaataaaccttttttttttttttctttcccctcttcaagcttcttttggccatatatagtgtttatcacagcaacagaaaaggaaatgagggcagggtgggatacaactacaggcatcttaaagcagcaacagtgcactgtggcaaacttctggctggcctg

SEQ ID NO: 31631 - DNA, 1195 bp, Mus musculus
cccaatactgcctgctattggcaccgtctcagatcctggttagtgtttatttttcaaagttcccgttcctaaaactctccagtaccacacccatcccaattccgtttgctttaatgctataaacctacgtattcctattacctggtgtgcatagcaagcctcctggggagcagcccaggcgggttttattcactcaaaacactaggctgttgcagtcttgataagatttgatcaagtctttgagtgtttaatcacatggacatgtgtgattatttttaatagtgtacaatatattactgtcagtcataaaacacattgaaaattaattgcaaacataagtcagccgtgtttagtcatttgggaaggctgccaggagcctctcttatgaggggtctggctgtgggaatcgatgggaagtgatttctgctgagagaaaatgtgttgtggtagcccattttgccaagaatctggtcatctgtggcttaaaattaaaaaaaaaaaatcgggccatttgtcttgtaaaagctgattttgtattttctgcgagcatttttactggaactgcagttgaactgggtgtttccatggatcagtgcttggtagtgaacctaaccaggctcgctatgtggctggtgtctatctgtaagtgaaccagccctcctcccttcatccctgcctgtctgttttagccttttaatgcctttgttaggtgtttctttatcatccaaacatgggcatcttagaaggctcgggatacagtgtcttctaatagttagaaagctttaaatgtaataatctaacatgataacctgtatggattgagaactacactgacatttatattaatggcatttttagttctcagaaactttttctttcgtcctttaatcaaggaaaaaaagattcttttttacacatttatacacacttattgaatttctttgctgctctcagtgttataggtcatgccttatgtgccctctgatcttcttagttttatttttgctcatgtttccagtttactatcatcatcatcatcatcagtgtgtaatgtgcatacagaaaagtgaatgagctgtaactgaacagtgtgatgggctttcaggaactgaaacactgccaccccctgccacctccccatccccaccctgtgctctcacgaccagcacccagtttctgcgggtctctggctcat

SEQ ID NO: 31632 - DNA, 1239 bp, Mus musculus
ttcagcagatagggttatgtattgacaaaggagagaattgactggagggtcatttgtagccatgtactctatttaagtaccttccctcagtgaggacgtagctcaggaataatttgtcttaaaattggtataaacagagtatcattaatagtgtcagggattggtgcttgcccatgggatgggtctcaagttaggacagttattggttggctattccctcagtctctgctccatcccctgtccctgcgtttcttgtggatgggataaatttggggtcaaaagttttgtgggtgagttggtgtctctgtcgctctactggggttcctgcctggcaacaggagatggcctcttcatgttccatatccccattgctgtgagtcacagctaaggtcaccccctttgattcttgggtgcctctcttatccaggtctctgtctctccctggagatgctccctacctccccacccctggcagttgctaagatttccatgcagtctcatggcaccgatccctgacactattaatgatactctgttatgcttccagacaggagtctagtatggctgtcctctgagaggctccacccagcatctgacttggacagatgcagacactcacagccaaacagtggattgagcttggggactcttatggaagaacaggaggaaggattgtgaacctcagacagggataggaattccacaggaagaccaacagagtcgtcacttggggctctcagagactgaaccatcaaccaaagaacaacaatgggctggccctaggccccctgcacatatgtagtagatgtgcagcttgcttcttcatgtggatcctcaacaactggagtgggggctatcccaaaagctcttgcctgtgtgggggatatgttcttctagctaggctgccttgtctggtctcagtgggagaggaagtgcctagtctcacagagatttgatgtgccagggtaggaggatgcccagggggtgccccccaaccccgctcagagggcaaggggagggagatgggggaaaagattgtatgtgggggaggtgggttgaccaggagagggacagtgagcaggatgtaaagtgagtaagttttaaaaaaaaaggtataaacaaaagtgtttcatttctcagaatgactctggtggcctttgtaatccataagaacaaattttcctcttgatttgaggatgagacccaagaagataaaaacaccaacttgttaacacttgt

SEQ ID NO: 31633 - DNA, 1119 bp, Mus musculus
acttagccttctttcctctgggcatgctttctctcagtgatactgacattccgagaggaagtgagggctggggaggcttgtcacagtctgccacatgctgtgtttctcttaccgttttagttaaccctgagtgatcacccttctcctttcagcctggcatgccctccagtgatagctgatgctgtgcgtacctgctgcttttctgggcccacatgcatgtcctggagttggtatgatctgaggatgacgattccacctctgaggtgccatacttctctctctggccctgaacttgaaatagctatttccagatttttcatctgtgtggcgatatatctgtcatggcaccctgggaggtgtatgggtcatgatttgaacagagggaccaggtgacaggacagtgaggcttgctttcatttggttgcaaaactccttagctaagcatcccctgggaagggcacaatgggaaacagtatccacatagagtcgtgtctgtaagaacagtgtctcgcttctctgtgagttatattggggagttatgtatttggaggtatgtatgtgtgtgtgtgtgtctgtctgtctgtctgtctgcctgactgcctgtctgtctgtgttgtgtgcatcttcaaagtctggttttaagaaccattcttgcttatcttgatgggcaatctatttcggtaatggggttataatagtgctgaagatactggtgtaaggttcttgcacttcttagaacagaggtgattggagatcattgtttaatctttctttcaagcatcctctggctcgtatgtgcagggagtaggtgacggccatagctaagtccctgtgtggaagaaaggagcttcctgggtttaggttttcctgtttgtttgtttcctctgcaatatgtttcaagtaacaggctagaactggctcagaaccaatgtgtttttgtcagggccactttggatgggtcttaacagtgacaacccatttgctctgaagggattttcatttttagtgtcagcagcgaaatgggtgtctagcagagggaagcactttaaacagttaactaaactgggggcctgtgtagctagagaccgcttccccttctcattcacccatccctttttg

SEQ ID NO: 31634 - DNA, 1166 bp, Mus musculus
gaataggtggcttcatgtgtctgctgagagttaccaagtgttaagagtataataggagagaggaggctagactgttctcgagtgtgaactcgagtctgccatataagatcctgccagtaaccagcgctggagctttaggcaagtgggtagatcaattccgagataaattttgttatctacaaatgggagtaatttaaaccacctcttttaataattactttttattcttgtgaaaaagcatcatggccaatgcaagggtttatttggctctttggttccagaggtctaggagtccatgaccatcatggtgggaagcaaggagcagcagcatagagcatatatcctgatccatagataccaaaactcaaagcccacttccagtgacacgcctcctccagcaaggccacacctcctaattcttccaaaacagttccaccaacttgggactgagtattcaaacaggagtatgtgggcgctgttcttgaaaatactgtaacaggacggcagtgcatttgattctgtactatgtacaggtgcacatttgagttgtaggactcactgttagcatcagtctacaaatgtttctgagcataaggaggtttacatttttgtttattggacacccagccagggtgtagggagctggtattgggacacagatagcttggctttctggcattgttatattagcaaacctttgagcaggatgtcgcttagtgcctgtaacttttgtgtaaaaagtaatgtcgttactttacacaaggctacaactctctttcagagaggaccatggctttttctgcaggttctctcctccatcccacttactgtagatgccagtgggcccgctttttctgttctcaaggaagtgccacagcaatgattgcttctcaaggtttcccctggtatcctgagaccggtgatctttgcttgcctctttatttatggttttacatcaacaagttgagaaatttttgaggagcatttcagcacaagtcctgggtgctctgtgagatgactcatcccaattaggctgcagcctgcctgatggggattctcttgtttatcagtatagttttttttaaggtagattgctggcatagcaatagcagccattgctcagcaaggctcatgatgactgatcccagcaccttggagacagaact

SEQ ID NO: 31635 - DNA, 1210 bp, Mus musculus
ttgatttgtgctctggagcttaagatccatggtacttccagaccggtgactttaactttttggtataatttgtgctgataaataagtgccatgttaaaaaaaaaaaaaactgggaagatacagaattttacgaatttctcatgtgggtagctaggtgcacctgacttcttccttgtgagatggacttgttaattttctgcatgcacactttctttccttcctgtttttttcttcttcactctgcccccttttgtccttttagagaatgtcccttttattctcaacaggatggtttgtcaaagtcctcaccatcttctagatggggaacttacaacttgaagttaagtcagatgaactcttccagatttgaaaagaatgggcctaagttattcagagtctgttgaccttgggtatttaccactatttccttcaaaagtgtgctgggcctgctgccaaaatctgtgcagcactctttttattaagaaagtatatatatatttttaaatttgctgttaattgtgtttggagtaggcttatgaatcgagggtcagaggatagcattgtagagtggattccctgtcaccaggcaacccaacactcagactgaaatgctcccttcctctcccctcccttctcctcccttccttcctcccttcccctgcccttcctggaggtctcatgtagccaatactgaccttgaacttcagatactcctgcttccacctccaaaatgctagatttacaggcatgcaccattacacccagttttatgcagtgctgggtcggtcttgaacccagggctttgtgcatgctaggcaagtactttactgacctagccatatctctggtccattggggctgtttcttctttttcttttatagcatgtccacataagaaaggacttttcttttggcttctgttgttagcatctgaagaaatgcctgcccagtgcgtctggcggtgggcccagggactctcccaggggagtctacacaaccagttcccattaaccttcctcgcacatgctcatatgtaggtcagagtgattctcagaattcatgaaaagaaagttacctgtcaggattgaatgttctggatgctattgttgtgcatgtgtttcctgttggcagccactcaggaagctgaggaacttcccacacggaagatggcttaggaacaggaagagtgagatgtgtggtccctgatgga

SEQ ID NO: 31636 - DNA, 1197 bp, Mus musculus
ccttggggttagggtgcgcattggcatataggtgtttcatgtgtgctgtgctatctgtcatgtatagacaatggtatgtttgagagaagtgtcattaaggcctagctagatagagaaagcacttgctatgcacatgtgcagacccaagtttggattctgagcatctacatgccaggtgggatggtgagccacctccagtccctgaactctgagcaggaagagcctgagcatctcggagatagggcggtgagctaggttaaccctttggatggactctgggtttaactaagagatcatacctcaggtacaaggtagggagcgatggaggaaaattttaggcatcagcctcaggccttgacatgtatccacacatacgtgctctcctgaacacacatatatgtctatgcacatgtgaaaattcaggcacaggagtaccaccacacatgcatacatggcaaaattgtcattaggtgatttcttgctgaataaacagggtacagagtcactatgtgataacattttaacagaacctgtgtcatatgcaattcattcttgaccagaatgtcaacaagaggcatgtggctatttaagaaaagtatgtgaatgtaattcttcaaggtttttttaaaaaaaaaaacttgtttatttgcgtgtgtatgtatgttatggcacatttatggtggtcaaagggtaacttgtgggagtctgagctctccttcttccatgttggacctgggtattgaacttagctcactaggttgggtaataagtgcctttccccactgagccacttctctgagcctgtgaatatatttcttatgcactatatgactatataatttgcctttataattacgcacacaaatgatagcaaatacatacatttgcatctttcttttcgcagatggtagagtttgattctgtataattgaaaccttgaatcactgagctctgagcctcatatttgagggggggtgttcattatttttagaatccaggaaatacaaaggaactggcatgtgcataggaataaaagccgtgaggcagaaaataccgtcagttacctgataaccatctttttaccaaggaaggagaaggccgcacttgcagtgtggctcctgatggagctgcgtgccacttgaaggacacacatggtgacccctggggatgagtcacccggtgcagctgcaaacttct

SEQ ID NO: 31637 - DNA, 1161 bp, Mus musculus
caaactcaagtcatcaggctttgtgaaaagtgcctttgcccttgagccatcttcccagtgctccttactgttacttagaaggtacggatgcagacattttcagactttagaaaggtgatgagtttattctgttttttcccccctattatcttgagcatgtgagattcttctctgtcatttaatgaagtacagggggtagaacactgacactgaattacgcactcatccgttttaagtgtttactttgaatcatgatcttgctaagttgcccagacttaggtagccaaggctggattccaatgtgggtcaaggctgcttctttgacctcctgagtagctcagattgtgatccttgctaccagaacctggggttcttaactgcatttagaacacatgtacctaccacacttttgagttttctgcagatttgaatcttatagttggtatagctcaaattgtcaacacagagggatacagacctgtctgaagagcatttagctgctttaggaaactgtttcctgtttgctgtgacgttcagatctccttctcatgcaatatcaggatctgtttccttcaggaactgcacaaagtaaaagctggggaattggtttacatggcagtaggtgcacactgatatttggaagttactcagcacagaaggccccagagtaccaaatacacacagtgcagaaaaggggccaacttctctttgactgctggctgtaaattgacattaatttatatagagtaagtaagatgaaaacaccttatttgaattatttagagattgcctggctattattcttgccccatttaaagtttacttgaaaagcatactgtgtaaaatcatcagctgctgtatcccttcagtatctacctttcacctgtaccttcttaatctgcaggtgaaaacggaaaaacaaacaaacaaacacacaacagaaaaagctttcagtgcctgcatgttttctcccatatcaattgaactctttctgtttatcatgttctgccgtacttggaagctgctgtttatgtggtgtgcagcacacacgtgtgcatgtgcatgcacgactgcctgcatcgttggaatgccattttcaggtaacaagttcctgaaaatgggctgtgggcacatgatagaaccaactcactggattccact

SEQ ID NO: 31638 - DNA, 1181 bp, Mus musculus
aaactccctagcaaggtagcaacgtacctgtgacccgtatagtaagaatgacttctattggctgataaacagagctctgggctggggcctttttccaagggatgattctattcattgagaaacaaagcccagtattaggtcctaaataattaggggattgagggggttaaggaggatgcttgctcctaatagaatagctaaggctcaccacgttgtcagacaccatttactgcagccttccaggtgagaggctgccattcatttccttccttgaagaaagcagaagtctggctcctctaatgctttctgattaaaatgtataaagtgttacaaaaatatgaatcggtaatgttgccagttctgatccactataaatacagcactaggtcctacacttaaaagttgggagagagaggagtactggtgagaagcagagagaggagacgtctacattgggaagaacaaggaatcaaaggacctggtgatctcccaagtccatgttcagcccgacattgacctatcattccttagtttcaggtctgtcctgctaggtggtctcatgaactgtccgaactctgtgctgccctagggtgttaaccttgctgtttgagagtaagaccattgtcacagtttaaaggcaaaattgaagcaagctttaattaagctggccaggttgatgggttctctctgggtttctagaaaatggccatgagtcattccttgcagaggcttgaaaaggcaatcccacaaggccactatatttcccatcaggtctagttcaggacaagcatatatcctgacatatttcctgcctacgtacctcctgcctacatccaatcaggggcaagcatacatcctgacttatttcttgtctacatatctcctgctcacatgtgatcaaacacatcctcttgttatctcccaaaaacaatagcctccagcctttcaggaagtatttgtccttgggcaaggggcttacaagttagaggactttttgtttcatagatctgccaggcacagtaatttaaacttaaatacgaaatgttgcctttcacaagggtccaaccttccatccctccagcatgggattcctgaagagattttagtctttgggggtcccttgtgttgatagtctaataactgaagggagggtgtaaatgtatctcttcacctgacaggac

SEQ ID NO: 31639 - DNA, 1177 bp, Mus musculus
ttgtgatggactgttaggatctgtagctctgccccgtggcccgagatcagtcaagatcactctaaaagaaagctaggccacactgagcttgggcctgtgtgtcgcaccccccacccacaaaacccccactcccaactagcttctgaggaaaactgtggcaaacaaaggccttcggaggttttctgaaacatgaatgcaaactcaaatttcattttgctcccaaaatgttattacctaaaatcttgaaaaatattttcttttagggttatttccacaaggttgttaatctgaaaatgatccaggcctaacaggcctgactttctgccccttgctttgggctggagagtggtggctgaggttgaatggtggtggaggaaatgaactcatttaatattacacctaccattgggatatgtcacctcagagagggatgctatgtcccacagccaaggcgaaacttttaaagtcgtccacttttaaaaagagcagcatgtctgcaaagtcacaaatgtgcattggccatcaccctaaccagggttgtctctcgagatggatgctattgtgacatttttctcctctctgtttccatagctggcacttgacagtcgtcttattttcctttccttgtcgtagacactgctagctcaagtgctcctgtgttgtgaggtccttgtctaaatgaggcttatcaggccccgtgagtcttgcacagcagagacaaaacttcgcctgttcctggttgggagaggaatgtggctggttcacctgcctccctggatacacctgtagggctggttcccctgcagacaccttactgctgaatctgtaactcagccagggtttgctctcccctggcaactcagtgtcaatagtgacaggaagcagagggactgaggtttctgtgttgtttttttttaacctcctgcttaagtcccagatatgtgtgcaatctctcttactctggtgtggtaaagtcgaaactcggcttatcactggcctgagagtctctgggaacataactctagataaggtgggaaaaaaatgccatagaaagttaatctttgctcacaaagaacactgctctctttaattggctaggctgtgactaggtgagggggtgggtgtgagggaagccttccatccctcccgtgggcagtttggaagcaggaaggagtcg

SEQ ID NO: 31640 - DNA, 4999 bp, Mus musculus
cccactgttctctagaaacatcttaaataaggaaagaaattcatgccaaataacgaggccaaaggttagtactgtgagggaagatctcaggctccagcagtccacttgctacttaagacataacttcagtccaagcctgagtgacacttggttacagacgaagatgcgatgctttttgtgatgtagcagctgtcttggattcagatgttttggggcatcctggcagggtgttttctcttacctcatttcttatataaagtatggtgctccaggaagggttagaagtgacaaggctgtcttttgggcctttccgctcttttatgtctagcctatgcttcataaagaagattttggaaattggtctctgggtactaatataattgctgagtcaagccctgatttttcagaatgaagattattcttgccaagagttgcaagttggacagcaagaacatttcagttgtttttgggtgaggcagaaaattcaagttgacatttctcatggataattgctgttttttaaatagatacttcctttccaaaccattatgaatgagttgtataagttgatgcaactatgcaaaataaccgtgcctctcatgcttgttggtttgtcactgtcagaacctgggatggagagtttatcacgatctgttactaaagccagccaagatttcccccaattgattagtgtctagtgtttgggatccaaagtgtgccagggttggtggatatgttcagtagcatatctgtggcctgacatttgcaagattaatccttttgtcctagacatttttttctctttccttctctcttggatcctcggccctgtagggaagccatgtgatgaatggcccacggggtgagaggctcaggtgccctgctgtgtacagctacttcaggagagctgtgggtagtcactgcaaagatgtgaaactgaagcacagtcagccagccaaagcctcactgttggattcctgactcacaaacgccattggataataaatattggttatttgaaaccagcaaaaccagactcatttggtacacagcaataaataaccattatagacataggttgcctaattgatctgccccccatctacctgtttccatcggtccatgatttcagttgttgtcagagtctgcagtctctgcaactggtcttgctcagcaggatgtaagaaggtgtgctctgggatctatgctctcaaggtaagagggagcatatcttctatctttctgctgatagagatatagtccaccctatcatttccctagtattaacattttaaaagtaacttaatgtttttacttttgtgatctttcccttgtagcattctttatactaatcctgaatatgggactgtcagcatttctttaagccatatttaatataaaccaaaatgtaaaccatttagataaaatgaagtaagctagcatgtattttatgacatccttatttatgttacatcattctctagttggattaattatcctcattgcttacattttattctgattatatgaattttctgaaaataagaatttagggaggaaaatgaggcaagctaaaccagtaagtcctaatgctgacagagtgatttcaggatgttgaatttggggctaaaccactcatttgcattcctagtcttcatcttctcaaagtgttatggctactacatctgggttttgcttaataaaagtaagatctagaacagttaattattgcagagtctaaaaatcagtaaacgttggagatcagttttaatctaggcctctgagctggatgtgtgttcatatccccttggaagtgactttttcacatataaagtactgctaacacgtgttaatgcaatcccaaggatccagtatgtgcgtatatctgattaataaatgtttatcactcagagttgcattctgggctgctcttagtaccatttctctcatttgtttttcttcctcatcctcctcaaaattagcatcttttctttaactcttgaccttagcaagaatacctgagatttcaagctgaatggagattgtgagggaaagttgttgaacagtgctgctccagcctggtaaagattatacagtgtactgttcaggacagggtcacgtgagaaagttaatagaactaccttgtaatacatttataaattaaataaagagtatgttttatctggggcgatttggtattcacatctgaaaatgggtaggactgtcaatggtataatagttaggcagcgaaggttactgtgcactggtgttagtgtctctcagcagcagcagttaatggtgtgaacggacaggcgtagctctgtccacatctcccatggctttctctgctgcagtgtgtgttttctttccttccattgggcttttgaagtggggcagaaagtgctttaatgtggaagctggcagtgtgagagattctttatgctgctctctctgttggaggggagagcctgtgagagtctccaagtccctgtccctctccccccacctcccccagtaccatgagcaaggtgcttttcttgttgtgacaaaacacttgacatagtgactagactcacactcagacgatatatagaatttcttatagtgtgggtggctctatagtggtggtatcatatagccaaagacttcctatggaccaggagtgcataaagaatgcctgactggaaggagggctaacagactccccaaagccatgccccccagagactccttccctttatccaggccccacctattaaagattccacaaatttttagagcagagcctctagctagagatccatgtgttgaaacccttgtgggaaaaacaatagactaaccccataacacacaatctcatctctttggtttccttcttctcctcttgctagatcttttcccctttgccttaaattctcctctgttggatgggatatgctggagtatgaaatgatagttgactgtgcccaagagaaagctatattgaacttgggtaggtcaggaagtttgttcctctgctggtgagatagctcagtggataaaggcacctctaccaagtacaaacccatcatgtaaacaccgaacaattaaatggaaagcctcaactattctcactcagtggtccttggtctgaaggacaagggaacacaccatgcaggactgcaggaagtcaggatgcagcagacttcctctctggcaggaggagatgtgcctgatttggctgacacagttggcagggctctcctgtgctctctggttgttcatctttgattcctttgcattgcataaagaccacggatttgagttgggtgctgattatacttcctctctgggcaaaggtcttgaacagtagactggtttgtttgcttccccccacccacccccaccccggaccgcccccacgccccaatttatgagaggagaacaccattcaaggagactgctgaggcctgcagtgcttctgaaacacagtactggtttctctttaaataagatggtctttagtaggctactgagttagagaggtgcagcgtgtgttttctgaaatgcaaaactccatccactcaaggccacaagccatagactggacccttaaggacggttctggagcagtggttcttaaccttgctaatcctgtgactctttaatacagttcctcatgctgtggtagcccccaaccgtaatattactttattgcttcttcataactatagttttgctctgtagcctattgagtctgataagtaattcatccgcatccacattctgtgtctttatctttagataacagctggcctttctgtgattgtagagtataggtgctcctaaagcatgctgtagtatttactctttgattactctgttgttggcggagccatgaaccactgtagagacttagtgcattgggcagctctttggaaggcatgctatgtaacaaactgcctctaaggcctatagcgtacaagaaccagatgatagcttgtagctgcagttttgtagggtagagataaggttttacttgttctgtgaatagaaaagtttgagcaccaagctaaatgtcagtcaaagtcctttcttggtactgcagtgtaagctgagaagtcagtttggccttcctaagtctgcgtctgttcctaagtacacctggcatctgtagtgtctagagatggttttggttgtccggactgggatgagcaaaagtggaggccagagatgttggtaggtaggcatgctgtggtacccaggacagtcttccacatcatagaccatgaagtcagtgattcctagctttagaaatcctttttgctcccgacaaatgtctgtaattgacgatcagggagagtgagtgccatgcttctcagcgtggggaagaagctactggacagggcgaggtgaggaagcttgcggccagatgtggccattggcttgggttctgggaaggtcctcagtacctgactctgtcacctaattactttgttagggttcagccttgtctatgtgaacctcagagaacagatcacttacccattcctctcagtcacgcctcctgtgaagttgtctctactgatgtgcttcctgcctgctgtacatgtgaggtgtcctcaagaatgtccagctcgggtgaagcagttcatcctggcacactcgccaaggcaccgtggctaaagtccacctaagccccacacgcctgtgagtgcatcatacaagtagtctggttcagagcatccacacagttatatttactgcgtgttcttaaaaggacttcacgtggaggattaaagaattccaagttcacagaggatacagtgagaagtctctaacttctcgacttaactagttctcctgcgggaccctgcagctgttccatgttctggtgattgttcagccacatccacgtatgtgtctgtctgtctctctctccagttaagtatagaatatatagaataatatgtatgcacataacatagaaatatgcttcctgtgtgtgtgttttaaagaa

SEQ ID NO: 31641 - DNA, 1122 bp, Mus musculus
cccctgctgtaggagcaggtcagaatatagtctgtcatgactagcttgcccagtggttcctcacttatctgtgagcactgtgtcacgagttcatgctagtcagttactctgtgcttggagcaggctggctgggacttagcaaggcaggaatggcattgaccagtgaagcttgagacatgttggagctggccgtgacagctttgctctgtggtgtagcccttggtgttgaagtaagagagcttgccttatcaacaaaatcacatgtgtggttggtgtgtatgtcagtctttcagcactcatgtgcttaatccttaacttttccagttttgctagtggtgggatgatcactgagaacgtaccagtagtttgtaactggaatcaagacctgggtctgacttgctcctgctctttactgtgagggttccagtgtactttcttttcttcctctttgcacttgggtggcccttctagtcttgccagccttcctgctccctctgtagtctctttcccattgaccttggtcctcgaaccactatcacacacacacacacacacacacacacacacacacacacacacacgtatatgtatacacacacacatatgtatatatatgtatatatatgtatgtatgtatatcctcctgaaatatattttacaatatgttttttgatcaaattactttgcaaattttagtctagaaaaatttgtttaagaaagggcagctaacattccctgacattctttaaaacaatcacaggactgttaatataaaaagcagttatacctggcaacccatgtggtgtacataaatattcggcacaatactcatacacaaagagaagaacaagtcattaagaaatgaccctggggctggagatgtggcccaagcgtagttttatgcctagaatgcacaggacttggatttgaccctcacaactttgagaatttttttttaaagcattgtaacgcagtcaattcacttaccatgcttgctcatgtactgttactgcatgctctctctgcggtctgtgcggcacatgtggccaaggcgggagatgagtgtggcccaatacaagctgtaaagttactgaatattatgacggcttttcgtgtctgaat

SEQ ID NO: 31642 - DNA, 1105 bp, Mus musculus
ctaacgttgttgctatcttagcacctttctggaaatgtgttggttgatgtctgtctacaccagggagaagccaaggcagcgtgagtcatcagaggctcacagttgcctctgtgtttgttcagggcctgtgtagtctgtgtgagagttgaggactggggtagacaatctccttggttcccggaagcttgtatgttggtggaggaacatgctgaggtccctgtacctcccatgcttagcacttgacctggcaactcttggtttccttcttcgtcaagagaaatggcagttttacatcttctctatgcaagggactggtctttgtagaaaacaaaggtaaactgaacagatccagtcactgaggtggatgtaatgattgaaattgtttgttggctcattcttttatgtgtgcaagttatgctaggctttttgcttagatttctcccacgagttcagcatccgctgtttgtgcacttatagatccctctattgaacattgcagggctgtgactgctttacagaggtctgtgacttcagctaaggagtttttgctatcctcttgctgtgtgccattctagtgggggaccccaggcatgagtgtgaaagagagcttgggagatggctcagtggataaaagtgctttgttgcgggaaggcctgagtttgactcccacacacctgtgtgaaaagcttggaaggcagtaaatctgtaattcctgccctggaggtcagaggcaagtggatcctctctggccggctggcggccagccagcctagctgtaaaggctttcaattcagtgaaagcccatctcaaggcagtagagagtgatagaggaacacacctgaagccctctggcctccgagtgtgtggagtgtgtgtgtgatgtgtgtgtctacatttaccacacagtcatgtgtgcactcctctgagctgggaacccagattaggttaagatcataatggatcaggatctgtttcattccaaggtgttggctcttattggctgcctggctggtttacctgatgtttccttgctgtgcgcatgtgcaagtgatacctggaccacagaggattcttacctcatggagtgagacctctcatctagcat

SEQ ID NO: 31643 - DNA, 1168 bp, Mus musculus
caaattttgattaaaactgaagaataaattccaccctgattttctgaacccattaggactccttaaagggattatatttgcaaaacatgatgaaattagttcttgatttcaaaaagattgtggactggtgatcagtcctatcttaaaaagaaatgtagtatccaaataataaagagtgaaatagtaataccatgtgccagagtgacctgagatttttttccacacagagaaagtggattttaggtcattaaaatatattaaaataggtttgattaggagcagagtatctatcacgtttactcaaaggcctgggtaaagtgcaaagtaaatcttcagggtctctctgtttctctctctctcttctctctctctctctgtttctgcctttgtatcgttgtctctgtctatctctttcatatacagacatgtgaatactgtacagtagtaggtgtagagtaggaggagaaagtcttgatgctctttaatcgtgtgttatctatgtgaacctgggacttggtgtgttaggcatgtaagtagaccattggcatagattgttttcacagttattgtttctgtcttctctcgccgactttcaccctgcctctggaattacaatgtctttgaagaggattcttttatagccatcgccctgagtgataaaagatcagaatgaaaaggcactagtaaaatgtatcatggttttatccccatttagagatgattctatcctctgttaagaattaagtaattgtgagtacaatatgtaagtgtactataaaaccacttccattaactgtttccaataatgggaacacatcaacactaaccccatgaagctatgtgccttaaaagtttacaacctcaattttatgggctttgaggctttttgcattagatgaaaggaatattacgctataaaaattggcaccttatgagcctgaagttttcgcatcagcagcgttctaggaaaggcaagggtaaaaaaaattgtttcagaacatgatctataatttttagaagttggcattatcttttggctgtggctaaataaggaaggcctaataggttagtcttagtctggtgtctcagtttctaaatatacatgctttattaaaagagtgagtggattttatcgtttgttgttacttccacaaatgtttatagcaag

SEQ ID NO: 31644 - DNA, 1202 bp, Mus musculus
tttaaaaatgatattggagaggaaaaaaataattcaacaagtttcccgtatcctgtgatgtaattgttttcttgtatcaagtcccttttaaccttgaaattatgagccaggtcttcattatcctgtagctagattgccattgtggtaattaatgtgccctatgtccaagttgtttggaaaggaggtgggaaatgactaatgagaaaggagaggcaaccgaaggtaggaatgggcagtgagggccacttgggtaactcccgtttccatggaaaaatggaattagcaacaaatgcccagtctgtgcagtagacatgcactttatcagttcgttttcttctccttttgtttctttgtttttgttctacaatatttttattcttcacgggttgtgtgcatagtgttttgatgacattcacccccccaccccagaaagatttgctttctgttcccatgataaaacacagaccaaaaccaacttgggaaaggaaggatttatttcagcttaaagttcacagtccctcgttgaagaagtcaagggaagaacttgaagtagacaccatgggagaaagctgcttactggcttgcttcccctgtttgcctgtacagcccagggggcactgctcacatgagtcatctcgaaaatgtcccacagacacactcgtagaccactcttacaaagacacttcctcagttgagggtccatgttcctagatgactttagtttgtgtcaggttcacggaaatcaagcagaccatccatgccccttacatttggtgtttatgcttgaaccctgagctccgtccactctgactgatgctataatgttcaaccagctggttatttgtctctcatgctcagggtgttcaaggtgcttctcttaaacatgtgaatgtggactgattgctggttgagtagtataagtttgcgtgtggagtgattccatgctgtcttaatttccctgcaagtgccagtcgttggatgcaatttacctggctgggtaaatggctcttcctgtgctccttgtttccgtgagtatcaaggatccagtatcaaaggtagtgaatcaaaagcactgagtttgaaaaaagagcccacccaggacatgtgaatcttaatcagcacaaagttatctcacagatcttcttttgctctctgaaacatcttaaaaataggctccagctcctgcctaccagccgtatcct

SEQ ID NO: 31645 - DNA, 1180 bp, Mus musculus
cagtcccaccttactgtaggctttttattttaaccaatcagaaggtgatggagaactatgtttttaaaatactaaggtaggagattcttagaaatacccaatctggcctataatcagatctctgccagttcagaaatcagctcttgaataatacaaggataatctttacacagtgcacacaaacatcctccaataccatgagactggggagatggttcagtgagtaaaagatcttggcctgcaagtacaaatacctgagttcaaatcctcagcactcagggaaaaatctgagcatggtgcatgcctgtaaacccagaattggaggccagagagctctctggtcagcctagcaaaaaacaaacaaaccagcaaacaaacaaactactactaccaccccccctcctcctcttcctcctcttcttcctcctcttcctcctccaatgagcttctggtttagtgagagatcctgtctcaagagagtaagttagagagcaataaaggaagacacacagcccttctctggttttacacttacttgcaggggcacatctactcttccactccctcatgtgcatatagcacagtcacacaattctcagtgtctgtctgagcctgtcctctctctctgcacctcacccctctataagatcgccaagccaaaaaaaaaaaaaaaaaaaaaaaaatcctaaacaaaatttaagaactcagtctcgttcttcatttgtgtgtctctattcaaatacgcaaatgtgttttcgccaaacagttttatgtggtagccttagatactcctcatgttctggtaccacaggatggccagagcataaacaaatgaaaaagcttcaatctgggattgtcaaggcttggcacttgctgaaagtaagtctctctagtttgttttagtcatatgtacacattcatttacaaatgcatatagctatatataaacacatgcatatacataatgtgtgtatgtatacgccacaaatgcaaaattccttacttggctttctggcaaaatttcagactttaaactccttggcaatattctgtgttcaaaggtgggattttgtttttcttcctgtctattgctggcagtaataggtttttcagactgtcgcaagttacttctgactgtccagcattatttgtgtaataacaatgacctgtttagatagct

SEQ ID NO: 31646 - DNA, 1209 bp, Mus musculus
agaaatgtctccataggattggactgtaggcaagcatttgggcattttcttaattagtgtttgatgggggagggctcattacccagcgttgtagatggcgacacctctgggctggctggtgatcctgggttccatgagaaggcaggctgagcaagccaaaaggagtaagccagtaagcactacttctccatcacctctgcatcagctcctgcctccaggttcttatcctgtttgagttcctgccttgacttccttccatgatgaaccgtgataaggaagtgtcagcaaaataaacccttcctccttatggtgcttctggtcgtggtgttgcaacacagcaatagaaacccttactaagacagacgctatctacattttcccttcctattgtgtagtatttgcctgtgtgatgtgagaatgtgtgtgtgcactattttgcgccagtgcactatttcccatgagacaggggtttactgactgtagctagactggtgtctggctggctacagtcattcagtccttctgtcttctgttccctgctcctccacagtgtgtgtgtgtgtgtgtgtgtgtgtgtgtgtgtgtgattacagtcacttgtgcatgttttgcttttcctgtaggtgcttgggatccgaatcctgattttggacattggagcctggaagggcttaaacagtaaagggaagtgcctgataccatcttgttgggctattctacagagaagccaggattccagcctttcctccaagagtagacatgctgttagaacttggtgaacctctggggcctgttctgcagtgccattgttacatggaagctgctattaccctcgatgctttcctgcctgcataatgggttgctctgtattacataattgatgctgaacaccagctttgctgtgctaggctgaggaacagactcagtgtttcagaccagaggcttcgtcaatatggtttttctatcaaggagccaagtaagggaagggatgctacaagatcaaaacggtgcagtaaacggtagtgaaagccaatgcagacttaagactcgcgtggatttggtttgtgtgtccttctcattgttgggcactttccatccctctgtacccctgtcagaatggaacattctggtagactgtctaggaattcagtttttagataggttagtttatatgtaatttagaacttcatgtgtgagacagaactaagg

SEQ ID NO: 31647 - DNA, 1143 bp, Mus musculus
gggcggctgccagccaagagacagtgttgacacaggctggcgatccctcaagcactctttgtgttcatgtgcctttttcgctgtacttcctcttcctgcctttccatttgcacctttctgctcatttggaagattcttcaactgaaagttctctaagtttcctctgggtctggaagtcacatccactaccccactaccctagactcaataccctcttcttcatggttccagaagtcctgtgtttgagacattgcttctgtcctccttcctcttcccccatttgttttctttcttcttctatttcttcttcgtcagcattcatgtagcccaggctgacctactccatacagagttgaggatgcctcttgatcccaagttctgagactacaggcatgcaccaccacaccaactaacggggcacacctcattcatctttacagtggaggccgtgtgcattgtctgcctcaaaatcatttttgaactgaactgagtttaaggaagattgggtaggaagatgttggattccattgcatatatatatatatatatacatatatatatacacacacacacacacacctgtgggattaaaatatttgatgagtgaagaaacagaaattagattttttaaaaattgtttaaaaatatcaattttggaagacatgtagcttgcagtaatgaatccttcattagagccatatctcttattgtgtgtcaagaaaaagcatcattatcttgagctttcagagatgatgttgcatgtcagtccactccacagcacatgtatcatgtcacctgtgtccttgcacctcagtactgaggcatacatcggtgctgtgtgctatacagaggagggtaccaaggaagagtttgtcagtgttcataccaagagcaagctagttgcttttgtaaataaagttttattggaacttgtacaagctgttcattcacatgtcattgtctatggcttctttatactaaaatagtgtggttgaaccattgtatcagaggctgtgaagctaaagagtccaaaatgtttgtgactagtgtttttgacaccaaaagttttgtaactcttagagctattagttttggaaaaagtaaaatccctttttgttatatccaagttatattaaaatccgt

SEQ ID NO: 31648 - DNA, 1441 bp, Mus musculus
ttagcaaagttacatgaagcagactgcatagacctaaagccttctcctacgttagcttcaggcagcccagagctcatggaagacgccatatctactgaagcccagcacttgcttgtttccaatggccacctccccaaggcctgtgactccagccctgaatctgtgccactgaaagggcagatcactgggaaacggaggggaccactgctattggcaccgagaagctaggcttcatctacctcagctcttttaaagcagtcgctacaggaaagaggtaggagaggccgtggaaagcttgtgtccagacgtcactccggacagtccgacttccgtgtggaatgtcagtcagtcggctagaggagtggcatctggagctcagaaacgtgagagactatttgtgtacaaaaggcaggaaaaagtatttgataccactgtacataagagttttcagagatttcatatatattatatatcttttacagagactattttaatccttagcgcatgggtcccgcttttggtgatattttcacattaggttgctgtctaattttggagagggtcaggaatcgttctggtgccttaatgcacagctggaattcaggtaaacacatcagctgttgctggcggttggaaaggagggcatcttggctgtgtggcacttagtggtcagattcgagtgcactggccagacctatgcaggcgtggtgttggcagcctcactgtagagcagggtgcacgggtctgtagttgaggacgagattgagagctgttaatccaccaaatgcaatggctcagaacaattaagcactgcctttcgtctttctttgtaactcacttggtaaaagcaaatgtcttgtctccttcagtggttctttgaagcttagtgaggcggaggctgccagtgttggtacctgtggattttccaatagtgagggttagctctgcctccagggcccgctaagttctgctgagcaggcctgtccacgctgttccttaccggtgagactgggcttggactgtacaagacttgagtcctagacctgggtgtatttgcactttggggccctgttgctagccatcttgtgagtgccaatgtataatgcagtaaagactacatggaaacacaaactcagtccttaaaaccccaggagttgaggggaagtgttggcacagtgatggcctgtgtcaccgtgtagtgtcataggccatcactgtgccagagcaagcacgctgagaaggctagtctccatagttgatggttaatgttacttccacaaaatatgtgaatttgctgcttctgagaggcaatgtgaaagaggaagtattactttttatgtacagagttatttatttatagaaattttggtacagtgtacattgaaaacatgtaaaatattgaagtgtctaacaaatggcataaagtgtctttaataaaggt

SEQ ID NO: 31649 - DNA, 1129 bp, Mus musculus
gccctaaggcacctctttgtttcttatggcagttaaaagggtgttggtgaggtctcagttctctccttgctctaatgggcccccctcttgtctttccccagccttgaattgtatataataaccctgccatttcttcttgctttcccagccttctgccctgagaagactttagtccttatcactggtaggcaaaagaaataatgaagaaccagcttgcctccactttaggcataaaagctctcttagaataaagataaaccaggtccattcctgtttatgattaaacctgtttctcaagcattgggctatgccccctgtaaccttaactacaaatggttctgtgctgcctgtttcaggtatggcaatcatgtctttgtttcaaaaagctaagaagcatcctgctaccctccctttgcatcaaagggttgctatagctaccttgttgcgaccacctgttgttatgcctgccttgcaaccctgtctttgtttcaggaatcatgatagctaatctgttattcttatgttctgctcctgtaaccctgctggtttttttgtttgtttgtttgtttgttttgcctgccaactccccatttggaaaccctgtacccgtgagctataaaacacttgtcttcctcacatccagggctgttctctaaaattccaatttagggtgagacagctggctggccaatcctgggtgcacctctaaaataaagcttgctttagtttgctctttcctcttacagtgctcaggtttaacaataaaagcaaagcagtagggcacaggctggctctcatggacttggcacttatagattaaggctgctgtatctgttgggaggctcctgggagggccctaggagctcagtaacaactggtcagtgtcttcttttcctaaggaacaacatctacctgcagagaaagacagagaaaacagataatcatcatacaagggccgggtactgtctgagtcccttcatgttgctgatgtgtgcatgacaggaaagactctcagataacgagtcatttgacccaaggttgcttaccctgtctgtggtagcagagtatggcatagagaaagaggcatcagaggttaacaaaagagccaaagccagttggcaaagccact

SEQ ID NO: 31650 - DNA, 1119 bp, Mus musculus
gtggaaactaggtaagaatatggaaggggaaaaaaccaaaccaaaccaaaacaaaacaacacaacacagcccacagttgacacaccagtgcttccaaattaactgggctcaagtcggttctcccggaccttgcggtcttcagagccaaaggcgggtgcaggagttgtggtggcttagcagtggtttaattttagaggctctagaaccacataacattgtgggttgggaagagagagagaaagcaagccctttggaggctcctggaggacatgtgcagctgcttccaagccacagctctccactgctcacaaccctgaggaaagcccatcagggagtgccctaacccggagtgctggacaccgagtcctctataatcagagggctatttatacagtcctctatgaaaaggcccttggatcacattactgtggtggcttgggggtgcttgctactaagctgctttgctggggccactgccctacacgcttcctggagagggtaagggagccctgccttcaggtatttatggctcagctctgctctgtccatgctgctgctctttctctcaccctgctgtgtgcatgcacaagaacaggtgcagagggttgggatggctgtgacgtgaaggaagactgaactactgaggagtgtttgatagactgcggctgttagttaatagctaatagctgttattgctattagtgctgactgataagtatttcccatgtaagtatccacagcctaaacttttagatttatttctcctggatcctgccaaagccccatgactctggtacatgtattatttacatttttttttaaaagaggaagactaaggttcagcaaggttaggtggcatgctgaggatcatttgattggtacggagtagaagaatcgctctctgttttttaacaatctgttgctgtatgaccacatgcctctgacattgtaattgagtgtactcctgaaggactggtgtgttactcagactttggacagagctggacacacactcatctttcacccttcttgtcatatgcgactattaacttggacctccatatccatggatttgtcatctgtggattcagccaaccactgattgataattgaaaaatg

SEQ ID NO: 31651 - DNA, 1172 bp, Mus musculus
cagtttatgtgtatgttttgtgtgagggtatgtgtttctatgtgccttggacatgttccccagcatatgtggaattgctggggcatatgaaaagtacatggtttggggtgggaggattcctaggctgtttataaagaatctgtaccatttttaaaaaagaaaagtagtatgatttcaggtaaggaaagtttgggctgtttctcaggtagggatgttcctctcaggcttgtcttcgggcttagatctcttggagtcttctggtagaaatacaagtagaaatcacaaatgcccattaactcataaaggtaatatcccacagcccatggtgagtgagaaacactaaatccaaaatgtatttgcttcttgtaacttgtagcttagcaacacagtgcttggttgtttgtgttggttgctgggagctgtggcttgcctgcagagagagtaaggatcagaccacacatcactactagcctgggaaaagatgacattcaaaattccaagtacagctcctactgtgtgtctctggctgttgaacctccacaaagtccaagaagagtgactgtctgtacttagtggcttgcccctgtggcagcacatggcagtggttactgtggggaccctcggtatctgagtccagaggggttcacagtgctggtctctgccaggacagactaggggagcttgcttttctgtagcctgctgaaatttgctatgcgtctgcacccgtctctgggtctgatcatttcttctgctttggggcaagcctgctttgccaaccgactggctataaatttaggtcgaaatgcagaaagcaggctgtccaaaggtaggctggataattgctctggacaggtttacaatagggaggtgtgaagtgcttggtggaggcaggaagctgggggagggggattgaacttgagcagttcagggagacggtctgacaccactaattgaaaactatggctctggtggcttctaattggaagggaaaccagggcatacagtggggttttgttgttttgttttgaagcaggaaagcagagaaaaaaaccactcactgagttactgaggaggtcggtttgggatcttttcaaatggtattgtgggctggaacctgtattttaaaagctttaggaaattgctttggatttttaagtgtgagctttcctcta

SEQ ID NO: 31652 - DNA, 1169 bp, Mus musculus
ccttcctgtctgttccctggggtccccttgggcttgatccactggggctgggtctgctcctaccctcgagtttctcctccataaatggcacaagttagttgtggagtagtgctactatgggagaaggtgacagggggcctggctagctctgtcagtttaggtgcacttctgtgctgctgggattggggttcgttgggaacattagatttctgtaaacaaagtggagtagaatagcattgttattcttaaaaaaaacaatacaaaacaaataaaaaaccaaaaaaacctagacctttgagtcgaatcttgctcagctatcagtaattagcatctctagaactattagtaccttccagagaaaggcctagcttgagtagtctgcgtctcatttgagcttttgaatgtctttcctaggacacagaagtagtacagcagtagcttcagtcatgacatttgctgttttaaaaagcgaaaattgatgacacaggctttaactcacacctgtggcttcattgcagaaaactaggggctgggtatctgaccgtcttgaaggagagaagttgattcttttctaacaagaagactgtattcttagagtgaggggcttgggtcttcacattggtcacttgggcaatctgctgtgggagttctgaagccagcaaagacccttctgctactgttgctgccttgaggatttttctcttcttcagtatctgcttcctctctggaattcactactgaaaatgcctggtcttagagtggggctgaacagtggctctgtcagttactgggaggtagacacactattgctctctgctaagatttttatctattaataactgaggcagtttggggacattttggggttttttttgcatacttaagatggaatattattattattattaaataatagaactatgtgggtagagtcagagaatgttctcaagtgttcacttgttggaagacttgcaaagccatgtgtcaggggtgttctgaggaaggctctccgttcccaagccacacttcctggagaggacagagtgctcttatttgtactttctttttgtcacaagacctaccttggcttgcccttccttggagcagaacttgctggtcatttttaggctttcagttgcctacaagtgacaattcacacagcataaata

SEQ ID NO: 31653 - DNA, 1179 bp, Mus musculus
accttccctgacacatacacacaccaccaggccttctctgctgtgacaacctgaaatcctgaaccacatcttaagttatttctgtcaggtgttctgccatggcagcaagaaagttaatatattaagaaagcagacaaggctaagcaccccggttcctacatgatggaagaagagaacccatttgtataaagtcatctgacctccacatgggggctgtggtgtgtacccacacacatgcacacacagtcattggcttagttggagggcttgcagcacaagcatgatgatgtgagttcaaatccctagccagggcgtgaaaacctgtaaccctagcatgggaaggagtggagaaaagcagatctctgaggcttgctggtcacaaacttcactccagattcagtgaaatatggtattccaaagaaataagacagatggggttagacagtggggcatccagtgtcctcctcgcttctgagcccaggtacacacaagcactaaaaacaaataaataaatttaagtgtagacagcatcctacaactcttagcaatggtcacttggctcatgcatccacagcaagctgcgagaattaatatgaattgcaggacacactgttcatcaacacttcaaatgtgcttttggccccaggttccttcccagactacacctgcctgagtttcacttaaaagacagaaagatagacagaaagacagaaagaagggagggagggagggaggaagagagggagggagggagggaggaaggaaggaaggaaggaaggaaggaaggaaggaaggaaggaaggaaggaaggaaggaaggaaggaaggaaggagaaaaatgcaggtggcacgaggctgagggaaagctctgttttagggtgtttacctggcatacccaagatcccaggttccagggcccacaagattcacagtagaatatacagcatctgtgaccccaaatgtgtagacagtattagaaattattattattttcgtatcacattacagtcatcatacatgtctcaaaatatacttttaatgtctacatttcagagtaatagtagctataacccaggacctccagcactaggagtggtacctcatacacagtgtccggacacctcccagatcaatcgttaatccaaaaaaaaatatcacagagacttgcccacagaccact

SEQ ID NO: 31654 - DNA, 1062 bp, Mus musculus
gagtgaaagagaagtacaccttccagagatttttgccaaatgtatacgttttcctctaatggaagatacatttatcgagaaaattcctcctcagtttgcacaggccatagtcaaaagttgtggagaaccctccaacaccagtggctgtacacagaggcttggaatgactgcttctgaaatgatcatatgttttgatgctgcccacaaacactcaggaaagaagcaaacagtgccttgtctagatatcgtcacaggaagagtgtttaaactatgcaaaccaccaaatgacctaagagaagttgggattcttgtgtcaccagataatgacatatacattgcaggaggctacaggccaagcagcagtgaggtgtccatcgaccataaagcagaaaatgatttttggatgtatgaccattccaccaacagatggctttccaagccgtccttgcttcgggccagaataggctgcaagctagtatactgctgtggtaaaatgtatgcaattggagggcgtgtttacgaaggtgatggaagaaactcactgaagtctgtggagtgctatgatagcagagagaattgctggatgactgtgtgtgccatgccagttgcaatggagtttcataatgctgtggagcacaaagagaaaatctacgttttacagggtaggtagcaaaaggagtcttcatcaaagggttgcatgccaaggttgggtttcttaataatagcaaagcaggtaacacttcctagtggttgcttcttcctaaccataaactatgctagaacattctcttagaaaatcaaggtcaaaaacatttaaaatgttaaaatattcctaagttcccgaaatagtcagttctctgtttttgagttatgtttggatctcaaagtatttttaaaaacataataaggaatactttatttcttattatttcagagcattttcaaataaacaataaaggttaatcacacctggctatttttgctcttcaataatagaatcaagagatgtggcaactactttcttatggaacttacgaatgagtttcctgaagctgcactctt

SEQ ID NO: 31655 - DNA, 1150 bp, Mus musculus
agtaactgactcaatatcaattccattcattgtcttgaaatttgtctttgcttcataacaacattcacataaatacatgagtgacctacaagcacaaatctaaacaattccatatgctattttctagtcaagtaccacacatgtatataatggtttggtttggttgttttggtttttggtttttcgagacagggtttctctgtatatccctggctgttctggaactcactttgtagaccaggctggcctcgaactcagaaatccgcctgcctctgcctcccgagtgctgggattaaaggcgtgcaccaccacacccggctttgtaatgtacttttaatggttaagttgtatttgatcatgttgccagccttactcctcccaggtcatatgtgccagtgcatgttggctgtaatattactgtgattttgtgtattctaggaggcaaatgtttggatacaaccaaacatgaaaacttacatatttgtttcccttttcttttttaggggaatttttcctcttctatgagcctcaaaaagactactggggatttttaacccccatgactgtgcctcgaatccagggcttagcagctgtgtacaaagactcaatctactacatagctggaacctgtggaaatcatcagcgtgtgtttactgttgaagcctatgatatagagctaaataagtggactcgtaaaaaggactttccgtgtgatcagtctataaatccatacctgaagctagtacttttccagaataaactccatttatttgtgcgagctactcaagtgactgttgaagaacatatcttcagaaccagcaggaaaaattctctttaccaatacgatgacattgctgaccagtggatgaaagtgtatgagaccccagatcggctgtgggaccttggccgccattttgagtgtgcggtggctaaactctatcctcagtgtcttcagaaagttctttaaataagcagcaggccaaagcacgcccctggcatctcatactgaggaagctggcttaggaaatgctgtcgccattgaagaaagctaacagagtcttgtattcagaaatgggtgctcataaagactgtggtgtggagagggatttgattttaccttcatgatattttcagttcagtcaggaaaggg

SEQ ID NO: 31656 - DNA, 2315 bp, Mus musculus
gggtagagacatccaaactggttaacgtgactttcttttaactacgggtaacaatatgaggcaatatcatttatttagctgtgatctctaacacagagaagcactaacctagatcctcagtcttactatttatatctatttacatatatatttttgtgtactgttttcaagtgtacgagatttaaatgtgctgtcagcagacggaagggaaactcggttttcagagcgaacttttagtccgattgttccatgtaacttttaagttaagctgcaaggttaaagtggcagttttctgtccataactttttcaagtgctaacactgtctcattttttaaaatcccagaaagggctcagatttgcaggtgactggtgctcgtataagttcattcatgtgtagttagatcaacttaaatggttaccgagtctctgtttatctttcaggttagcatgctagttccatggtcctggcactttaccttgtgattccatgaggtctgctatttgtgtgataggatatggccgttggccattggtctagctggattcagttttacaattccaagtttgcactaacatgggctgttttgttgcccaaactctctttccatcctctacctttccagtcattgttggcatcgtgaaagttaactaataatgtgaagttttaacacctacttataaaattctgttttctagaaacaagagtcttggagtggtctaataattaagtggcttataaggttcatattatggttacaacctctctatttttttgcactcaacagtgatgaatatttttatgttgaaacacttgtagctgaaggcgatctagaaggaaggatgagtgagtgaacaggtcaaaggtttctgtgctctaggtactaaggcgctgttcatagtgaactgataagtttctcacagttagttagggatattaacataaactccttttcacctaaggcaggtatttaggttgataacatactcattactatgcctactataactgataaagaatattacacataaggcagagcctgtcctcagtcaacacattttctttaagagactcaatttgattctcttgaagaaacctggcaagattttgtattggaatagaaaaaagtcttgcacaacgtgtaaggtgatagatactgtgaaacaaatggaaaatattgcctcttgcatcacatacctccttttccagaaactttatagactgcattacaaaggccctacaaggagagagttctcgaagcagttcaagtggacagcattcacagattgttcatgtgtcctccacagctggatgcgtggcttctcctaatctctttgtaaactttgtcagccaatatttttttaaacctctctagttgtcttatggttttgttttttttgggtttttttcatgctgttttagggttatttctgtgaattttttgaattatagttttgtattgctaatgagagggaagagaatttttacaagagatatccatgtaatttatttttgaaagctttgttgagtatctaagatttcctgccactttgacaatctctgtatttaggaaaattcattacttgaatacatgatgtagaacattgagttagcaatgtacatgtaccgtacgatatgtaagagaacaatacactgtggctaattctatactagatttattctgttggtctgtacaacagttggtccttttgtcataactgtgtctattgagggaatcatttcagaatagtgtatcaaagccaaggtttagaatttgctacaggagtagaatatatattgaattttgtatgaattatttgtttacattacatagctgggatattttgccacttttaaaatgactttagaaaaggtcctaggaaacttaagattagtgatgtgtgtgggtttatgtgtagaaattcaaggtacattctcatagtctgaatataagtaaaaggcacaaaggctacagcaggattcaaagatctaacaaatgccaatcccactttaactatgtttctgcatttgaatgtacacagcacttttcctatatagttctatacaaagaaaacagaactaggtataactgtgttgtaggattgaagaaatcattatttatgtctgtctttgtttcttgttatcctacaaagttgatgtgtaaacatcaagttgatttcattggtgcatgaggaaaagtggatgtgatctgtgaggaaccagagtcccatgggaagagtttaagatggcattcaatattcagtgctcaggtatgtagtaagtactgtagtcctatggggcaaatgtgtagatatt

SEQ ID NO: 31657 - DNA, 1536 bp, Mus musculus
cttactgagcaggtgcctgagaaacattgtgcgtatgcatgatctggaagaatgcttatttctcattttggagtgccagggacaatacaggaagtgtctttctaatgagagttcattaaagtgaaaagaagaggggctgaaaatgtcagccgggcatatctgaaaagccagagcttggcagtaaaaagccacatgtgttctacttaaattgttggcatcaaggagaccgggcatcctggaattgcagttgtccaacttgactgggtgtgcccctgtcaaactaatttatcaattcccattgttcccccttctaggaactaatgtgcaggaggctcagaatatcctcaagagcagcggactccccatcacgtcagctgtggacctggaggatgcagccaagaaagctgttgccagtgtggcaaagaagtgatgctctccctggctcccatgaagaagggcatgtccctgactactgtgaaagcaattgttttctcactgggaagggacacacacaaggatcatcatgtgaaaaatattaactctgaactttctcaaatacgttatccagagtgcctaaagctgaatttatactgtagtcattgtttaaaaaaaaaaatcactccttacaatttcacatcttctcttgcccattcagtagcagggtctaccagctctgggccacagtcagtttagccaaatagtgtgcatacatacagtatttaaagccagatctaggttcattcacaagggcatttattctacattagaaaattttacaggaccctcaagttcagacaggctgatatttaacatagtggcttccagaagggtacagctaagacacctgagcttctgtgaccagtggcctccactggcccctaattccagtacattaagaaagcccatgaacatttctaaagtgtggcttatattgggcatcccgtgttgatatatgtacattgcacacattttaccctgtgccttaatgttgaatctactgtttgcctcacactaagttactaccagaagccttagtcatgggtgtgaggtggaaggtttcattttgtgtcagagttgctgaatgttaatctatttcataaagagtcacactaatgatctagctgctggtagcggccaggcttttccctcttgtcccctccacctcacatctatcagtttgccacagaaagatgagagatgccattggacagaatgtgaccttcctaatgatgtccttttttgtgacaggaattttcttaacttgatttttttgatttaattttgataaatttatagtcctatacattttaaataaaattgtttttcagtgctacttagcctcacagttcttgtttctgtctgttatctgttcttgtgaagacactagcctctgtgccagaggcctagctctagttaagaaactgcagttgacccggattgttccagcgccacagtgccttgccatgtgaccatttctgtggtggtgattcagtgaagggctaacatgtacacattagacacaagcccaggaatctg

SEQ ID NO: 31658 - DNA, 1122 bp, Mus musculus
tctaaaggcagttagcctctttaagaatttcatgttttaagctattggtgtaatccctgccctcctggaggtagaggcagggagattcgaggttatttttctttacatagtaactttgaggccagtgtggctgctgtaagactctgtctcaaaatgtagattgcttgcctaatatccacaggcctgagttggattcccagtaccacctaaaatccctatatttgggaggtgaaggtaggaggtaggtggatcaggactggctacatatcaaatgagtttgagccagtcattgactatatgagaggtcttaaaagaaacacccccccccccaaacaacaaggaaacatacccctccaactccccccaccccccttttttcaaaaggacaaaagtgcatccaatgcacgatgttgcgatgtgggcattagtgacacctttcaaaaccgtttcttttgttttgggccagatttagtaatattaattctattagtaaaatgtagtttacttaaattttcatcacctcaggttgtttctgttgtcttcctctccttggttttgtgtgtgtgtgtgtgtgtgtgtgtgtgtacttgctgacctagggactcactaacttgcctaggctgctttcagatagactctggaaccaatagaagtcttgaacttgtgagctttctacttcagcctccctagtagttgggattgcaggcctgtaagctagttttcaattgtctttttaatataaaagttaagcacaccaaataagcatggaactcctttcaaactctgtcctcctccagtccagctgtcactgcactttccaagggtcctcctggcagcctctcacactcagaagagatgtgagctctttttcacattcatttgtcacttttaagactccactgaattacccagatggaatgcagaatgagaagaaatgccacgttattatgctgactgcagacacaatgtgggaattctttatgataggcccttactcatgtcttactgctttatttattccagtgtgctaagcacggcagcttggccttgtttctctccaggtagatgaggtggctggaaatagtactacctgttttcatttgggaagcttaaatgttttta

SEQ ID NO: 31659 - DNA, 1154 bp, Mus musculus
ggatgggaagggggtggtaagacaacaagtgcagaggccctgaggtctgacaagtagggaaggtccaaatcatgtgggtatcacgtggagttcttaagagcttagtggttgtgtgacttgcacaaaattgtccatctattataacaggaaatggctgggtttaagtcccaggactctgaattctgtgtcccacattactatgagaagtcagaactcaggatggcctcacagcttctgagggtatagttagcagttcagtagacatctaacagtctttatagccccctcttccctagtttgttgagatcgggtcttgttgtataggtccagttgcctttggccttgaggcaatcttgcttgaacctcctgagtgtcaggattatagacatatacaggcgtgcccagcaatacttcctggtagataactccagctagcccttcaggtatgtaggtgccatgaaaccttgtgtcatgatctcgcaatgagtggctgtgatgaatgcccaggaacccatttttctctgttgagtcttattgtaaatagagatctctctgtctgagacagggtctcatagcccagggtggcctcaaactcttgttcatccaccctctatctcttgagatgacaggcatgatccacctcatccggctttttgtgatgctaagggtcataccgggtccactgtgcagaggcaagcactaatctcagtccaggtactaaagactgtgtgtagagctgcctttggggcatttctctctcatgcctgggtgaagttcagggaagctcgtgtcttaagggatgatataggcctttcaggtctaactttggggtttccactgtgtggttctctttgaagcccagagggctgtgtattgtccaaggaaactgcttacccctgtgcctctgcagttggctccttcagaaaggaggagcagcgcagccatgtgcttcttctggcagtggagacagatggatgcatggttttatgtgatgttcacttatttgaaacggtctcactgtgtagccctggctgtcctggaactcaatatgtagacaaggctggctttgaactctgatcaggcccaacagagatctgcctgcctttgcccctagagtcctgagatcaaaggagtgtatcacctgcccagctatg

SEQ ID NO: 31660 - DNA, 1177 bp, Mus musculus
ggggagcaggaggagggggaggctatagtgggttttcagagaggaaactaggaaagggcatttgaaatgtaaataaagaaaatatctaataataatagtctagaaaaagactgggcagggtggcacatgcctttaatcccagcacttgagaggtagaagcaggcagatttcggagtttgaggccagcctggtccacagagtgagttccaggacagccagggctacacagagaaaccctgtctcaaaaaaacaaaaaaacaaaaacaaaacaaaaaaaaaaaacaaaaacaaaaacaaaaacaaaccacaaaagaaagaacaaaagaaaagaaaaaagaaacaagacaatgtaaatattctagtatctaaccaaatatgcttcaaaccaatattaaccagaagagataagaaggaaaacttcattaaaggtaaaagtcaccacagaatattacagttctaaatatatatccacatccaaccattaccaccaaggagttggggactgtgatgagattgctggggcagaaccccactgaggtggaactgcaggacatgattaatgaggtggatgctgatggcaatgggaccattgacttcccagagttcttgaccatgatggccagaaagatgaaggatacagacagcaaggaggagatacgagaggccttccgtgtctttgacaaggatgggaatagctatatcaatgctgccaagctgcgtcatgtcatgacgaacctgggggagaagctggcagatgaggaagtggatgagatgatccgagaggccaacattgatggagatggccaggtcaattatgaagagtttgtacagatgatgactgcgaagtgaaggcccgggcagctggccatgcccattctcctgatctcttctcgcgctctcctctcttcagcactcccctgcgtaaccggttctagcaaacagcaattgattgactgagaatctgataaagcaccaaaagatttatcccccccccccaaaaaaaaaagataacaattctgtaggtaaaaacctagattgtcctccaaatccgtgaaaatggatgatagcatccatcaataggcagtccatcaagaaaaaaaatgaagggagaaagtctagagtaaaataatataaaaagggcctaatagatgtttacagaatattccatcaaacacta

SEQ ID NO: 31661 - DNA, 1403 bp, Mus musculus
cagggtcaccatccaactctgggagaacacccgaagtttaccaactactcttttgatgtagaagaattcatgtaccttgtccttcaggctgcagagcatgtactgcagcacccacagtggccatttaagaagaaacatgatgagctatagaagtgttgaggttgtttccaagagtgttgacaccctctcacagccatagactcacaatcagaggagcagaacagcctgtcatatcctactgtaagaggaaacatgacgttttacttctgaatatagctcaggctgaccttgaactagtgatcctcttgcctgagccaactgagtgctcaccttacaggtgtgccccaccatgcctgtctacagagttactttttgtatatgaaagcacacctccaggagatgctaagtcttccatgtgtttattgtgtctttgctatttatcaaaggtatttttgcactgaaaaaggttacttttatagttcaaaggtgggcagatgcccattggtgtggcagagctctcctgtggggatgcaaagttgtcaacatcggtggcttcagacttgatatatgtgtttgttaactgtaatgtgatcttgattccagagtgtcatggcttcatctatttggataaactcatctatttggataaactcagaactgttgttatttgccattgtatgttcataaatatggttgtagggtctgggcacatggcttagtgtagaatgctggccttgcatgtatgggcctctgggtttaatccctagcaacaccacacacacacacacacacacacacacacacacacacacacgtctaagtctgtgattctcaggaccaaactataggactacgttatagaccagtaattagtcaactccagattccgtgcatcaagagcctgacaaagatcatgctgttgtatttattaattttgtttctatatctcatttcaatcatgttctccccaaatgtaatggcagtgttgataagagcctgtcagaacattctgtagtaccatctccactgacgcttcagccgtgaagacccttcatgctgacttggcatgaagtcttagtttccatcaggccagtgtttgtgagcacacacggctgtgtgtatctacctctggcagaatggaagtaaccctagtctctgtaaaacactgccaagtagccacatgaagagaagacactttccctgtttatttgttttttgatttttaaaataaggccattaaaaacacggtagacctgtgaattatccaatcaaaacaaaagccccaagaaagtggcactgagcaaacaggatgcccagcagcaggcttcccctggactgcctttgtttcttactgctaagcacatagctcaacagtcagaaaccatgggtttgttctattgtac

SEQ ID NO: 31662 - DNA, 1233 bp, Mus musculus
agtcaggttgtgttttagacctgtaaaatattttgatagattctattacttaaaattgtttaattgcttttatcacagtccttctttattcttttgcttcttttgttcttttgctttttgtggttctggctaaggtaaaaaataatccaaaaatatatggaaattacagaaagagtaataaatgttagagtgtatgctgctgaggggagcctgctggaatctcactgtttgactccatgtgtccaggacgtttgcacgccctgtgagcccctgagccgcctcacctcagctgttgtgtctactgtaatagtgtggatgagcttgtgatccggtaatccctttgttctttaatggccccaagtgacaaagccaaatgttagccaggagtgcttccttaatggcaagatgaacatccacattggctgtcttgctggaaattgatagcttctactgtttcaggcatccactctgggtctcaaaactgtcttccccacgagaaggtaggagttcaagtaaaaaccgtaaattttagttacattttaaactctacttcagatcacagctgtgagtagccatcttgcagaatggagaaattttaggggtaattcaagtgaccttgtttttatcttgtgttcttgtgtttctgttgtgggaactcagatttgtagcacgaataaatgttcttttggtgaaagtaacagtcataaaattaagtttttgtattttagtggtaaaaagcagcctcataactttttgctagctttaaaatgttttaatattcaggggcaagatgataagtctgacagcaataaatacatagtgttaaaagagacaggaaacctgaatttcaaaattgttggcaagcatttagaactggtagtttgggaaatgtaaaatactttttaaacaaataatttgggaatgtggcagagaaaagattttgaaattaaaatttcctgtattctagattttataatatcaacattaaatatttttcttggttcttaataacattaataaaagcagcccacttaaaaatcttaaaatgttttcaacttacttatgtataaaatgacatgcaaccatttatatctgcttcatctgtaagtgaatagctgatgttcacactgcttatgttggctagaatatacttagacctttcagtacatttcaagttgataaggggcactgaataaatttcttgtaaataatccagtaagtggcagaagactt

SEQ ID NO: 31663 - DNA, 1640 bp, Mus musculus
ccctgtgagtggaggatgggacacttcaacctggggattgaactcaacaagcagcgaacctcagagtcccccaacagcctctcaagcaattacaaagccagttcgaaggactgtagtagatgaatctgaaaatttcttcagtgcctttctctctccgtcggatgcccataccattcagaagagcccagtggtatcaaaacctccatctaaatcccagcggccagaggaagaagtgaaaagcagcttacaagaatcgtcatctcctggccagtccagagtttctgagacagctgaagtgagagactccgtgtgtgtttctggagagacttcagccgtgggcactccctcacctgtacctgaagacaagcatgaagaaacggcaggtgaagagtctgaggtgaaggtgcccactgtgagattgaaggcgtctgaaaacgtagttaatgtaaacacaacagaagatgtatctaccacatccactcagtctctcacggcagaaacgaaggatatggctttggaacctaaagaacaaaaacacgaagacagacagagcaacacaccttctcctcctgttagctccttctcgtcgggcacctccaccactagtgacattgaagttttagatcacgagagtgtaatcagtgagagctcggccagttcgaggcaagagacttcggatgcaaagtcgagtcttcacctcatgcagacgtcatttcagctcctctctgcgtctgcttgtcccgagtatagccgcttagatgacttccagaagctcaatgagagttgctgctcatcggatgcttttgaaagaatagactcatttagcgtgcagtctctagatagccggagcgtaagtgaaatcaactcagacgacgaactgccaggcaaaggctatgctttagtacccataatagtgagtccttcaaccccaaagactaaagtagtagaatctactgaagagaatgctgaagaagaggaaggaaacgagacattagttgcgccgtctgaggaagcagaattagaggaaagtggccgaagtgctactccagtgaactgtgaccagccagatatattggcttctcccacagcaggaagtggcgggcactctgcctctggaccggccactgagcagtgtgaagctgttgaaaaccagccaaaagcaccgccagagaaagaagatgtttgcaaggtaactacagagtagaagagggcattggggtatgtttcagagttacagatgttttcgtggatgtgtggtgatttgaaaaagtagatgtttgatcatttaattgtagcagttacggactttaaaatgagtaattatgttaaattacttgaagttcttgcaaagcaactatggtagacttaagtagatattatataaaagcttagtgtttccattttccatctgtattgctgcgtccttatcactttaacattctttgatgctctgttcatctttctgacagtttgcaaaggactgtttaagtcacaatgtgttctcctgaagatagacatggaatatcaatctgaatgttaccacttttatatcaaagtgttttgcatatgtatcctatttatgggaaattttagattttatcgttttggttttatatgaatactgtagatgctttcctgtg

SEQ ID NO: 31664 - DNA, 1407 bp, Mus musculus
ggagataggatggatgcctttgtgtggctttagctagccttgaacttgcttatagcccaggctggctttgaactcagatttattcataattaaatatgaccaaattgtaattatttatatctctatagtagaattgatggcttcttttaataaaaataatttaaaatccaagaaatcaagttttaagacatgtctgaactataaagctataacttgtgcgttatgtatgtgttattctttttgttgaggtatttattttgcttggtctaatgacacttttctattttagaactgggactagttgatggacaagaactggctgttgctgatgtcactacaccacagactgtactattcaaacttcattttacttaaggaaaataaatctgcacataatagaaaattcatagaaataatatactttataaatgatatgaaattgaagagcctggaagatgaggcagaggggaacatccaagaaaggaaatttaattggtgtcatttttagcattagtgtggctagaatttgacttttatatatatacatatatataaaaaaggactgactcttttttaactttataagtttctcttgaagactgaactttggggttgggctagcaagcattttcattttattactatggaaagctatgccttcaggagagattatgaacaagtgtgttgcttctttaaagcaggacaaacactgtcttgtgtgtgagtttgttgtggtcaaagagcatattcctcagcgtgtatctgaaatccacatgtgtagaaatgtctcctgggatggaaatgaggagctatgtctgaagaatagtaaatattcacagcctgacatctagagtatatcaaacataggcagtgtcttcattgctactcatataattgtgactatccatgtgtgtattaattattgcagaatttaacttgtccatgataatttgtaaacagtattatagattcatacctgtgcatgaaaatacaaaatattttcatgtatttgtttgcaatgccacagagaccagtatgcacaaatttaaaccaagacatggctgttcaaagaaaattaatgtttaaacagttatcattgatgcttttgcactatttattaataaaattgtacattgtctttttattggaaaacttaaagtatatcaataatagtaaataactttatagtgatgtagaaataatttttaaatgtttaccagttattatttccagacttttattgcgcctgagttaaatttttaaaattttattatagtgatttccatagtacagactaggttcactcattctaactagtaaatgaaatggaatgacttaatttttatagtcaagtctctctcttagcatgcctttttttttcttcaaaaatgctaaaatcaaagtgga

SEQ ID NO: 31665 - DNA, 1099 bp, Mus musculus
aaaaagatataactagggatcgtttttaagaagtttttaatttatttttattttacgagtgttttgccttcatgtctgcatgtataccgcacgtgccaaatgcccacaaaggtcagaagagggtgtccttttctctggagcttggggtgtggatggttgtgagccaccatgtgtatgctgggaatcaaacctgggtcctctacaggagcaacaagtgccttatctgctgactcatcctaatggtggttttcctgttaaaaacaggctcttaatttcatatagtaaaagtaaatttaaagtgtcaaagttgaaactctgaaattataaggatttcaatatttgtaattacatctctttcataacatgccaggtgtgtttcttatcgttaattgacctcttttgtgcctacaccaacaactattgtgtggtttgttgccttattcatggttcttgtggtgatcacctggattttaatatgtctttctatttgttacagtcactccagttcttgttagatacatgtaaagttctagtcattggagctggtggcttaggatgtgagcttctgaaaaatctggtaatatatatgtataatactattctcttagagataagtaagttcttttgctttctgtcgtataaagaatgtcttcatttcatgatttttttctcttgaacatttattaggtaaatttagctggtaaaattctagacaataaagtatgtaatattatttgggaactctaaaagttttaagtcatatttttctttgctttttttttgcttccttttgcctagtgctaatattctattgaactaaatagcagaatagagagtttatcttttaatgtgtaattttaaataattatttttttcttttgcttctctaaataacccagctaggtgggttttagatcattttatccaaaatgacacattgaggtgcagcaaaaatcaaagcctccctcgtttttcctgacgtatagtgaggttcctgactctgatccaagtcctcacttattatatacagtgctcttttttacagaagctctgcatgaactaagatggtggtttttgatgaccaaatgataataaatgc

SEQ ID NO: 31666 - DNA, 1422 bp, Mus musculus
gggggacctgatgccattggccgctgcaggcatcagcgctcacgtgcataaacccacagacatagacatacccacccacgattcaaaaacagtagaaattgtatttatttgacattatttgatgctgtcacttctttcagtgatgttcatccacgcatccctgagacttcgcaacctcaagaacaagctggaaaataaaatggagggaatcggcctgaagaaaactccgatgggcattatcctggatgccttggaacagcaggaagataacatcaacaaatttgctgactacatcagcaaagcgagggagtaagcacagcccgcccagtgacggggccccgcagcaggaatccggttgcactttcccccttgttcagacccattttcagtctgtggtttttaaacagaaggtgcacgtcttaccacccacctctccaaggcatcatgcatgcacaggcccactgctaagatctccgatatgacccatagaaggcctcagaaactgcaaaaatacagacccactctcccgttgtgtctgaagtgtccggtgtgcttttgaaaaagagtgtggattagacggccacagtgccatcttatcgtagggaagaagtccctgtagagcctggaggcaatgtggaggacatgaagatcagttaaagtcgaggatgttgtgtgtcagcctgtttctaatgctgtctgacatcccctccaaaatcccctaagactctgatgtgtcgggtatgttagtttagcggtattatttttgttgttttaaaaccagaggctatcacttgggcacctgtttgatgtgcagtggaaactgggtcagccagttgtttatattttgtttacgaatatgaaggtagctgtttaggacaatgttttgttaaattttgtaaaatttttaaaagggttagtaatatgctttcaccagcaggtgtttcttgcaaactaaatgtcaacctcctggggtaggggtggggggtggggggatggttacaactctgtaacttctgttattcttgttaagaataaatacaatagaaccaaacttgagttctgtctatatggcacatttttcgttactacaacaataaaagggtgtccaagataatgatatttgaatggtttagattttttaaaagattttttattgcttttatttgtgtgtgtgtgagagagagagagagagagagagagagcgcgcatttagaaagaaagaaatgagcatgtattttattaattccttaggagatcagggagagcaaccacagttgagcttttgagcctgcaaagcttccctagagaaccaagccaaaggagtttaaacagctcctgtacctcaaagctgttgacagtacgcatggtggccatacacttacataaatagcactggagttaggatggcgtgagcctttgcat

SEQ ID NO: 31667 - DNA, 1182 bp, Mus musculus
atagaatggtgcaaagatttttttttattgtcctggttgagaagaatgaatgaaggtagggagaggccccttgtggactgatggtcttattctagatcaggatacaggtgtggttacctagatgtcaacacttaccaaaatgtcattactatatgtgaattatgtcgttacacatgaaaatgtcaatgctatcggtttactgtgacgttgaatcccagggaagcaggagtgacaggggatgacagaatgatcaggagggtaagaagatagacaggcatgcatgtgatgtgtaaggaagtcagcttgcttagggacaggctgatggcatggtctcccacagacagcttaggaagtggctttgcgaaatcacggtgctctggagagtgctggggtcaggggttggatcagtccttacctgtcatgtcttcagaggcccggaggactctgatggaggctaaggctgaggccacggtgacctggctctgcagctgtcggaattttgcaagacatcaccagagttcctctggccatgacagaaagcctgtgctcggatccagggtggagcacacctgaggcaggcatggggtctggcggggctgagctgtggctaaggtgaaacccgacaaagccaggatgacgaggtaacagtctggtctccaccactcactaggtaagcagctctgagacggtgacctaacctctctaaacctcagtctgcctagagttgattgaaagagcccccggggccttccctagaggaggctgtctctagacagttctcacacacactgctcaacttcctgcaccttctgtctggccataggaacaagtctcctttgaagatcgaacagtccagacactcttgagtgagggcaaacaggcccaggagcttaagtgctgaaagactgaagcagtgatatgattgcagccacagagtcctgtgggaaataccaagggcagtcacactgtgtcaggagggcttccggtgaggttgagacctgctcactcccagtgataaccgagacaggaatgcgccatgttgaagcttccttcccttcttgtctcagctcttcaaccccctacctaggctttgtaggaacatgtccccaaacatgcttatccttaactcttcgtctcagggaaaacccaacctaagggcattacgtgactgccgccccatta

SEQ ID NO: 31668 - DNA, 1156 bp, Mus musculus
catagtacaaattggttgcttgcgcaattagggtttaaaggaactctagatagccactacccccaagataggttgataaaattcttaaatgtgcatgatatgatatttcctaagatgacttccttacagcctttaaataatgctctattgatttttactgatggctcctctaaagggcgagctggatatcttattagtaatcaacaggttatcgtagagactcctggtctctcggctcagctcgccgaattaacagcagtactgaaggtttttcagtctgtgcatgaggcttttaatatttttactgacagtttatatgttgctcagtcagtgcccttattgaaaacctgtggtacgtttaacttcaatacgccgtcaggatctttattttcagaattacaaaacatcattctcgcccgaaaaaatccgttttatattggccacatacggtctcactctggtcttcctggacctctggcagagggtaatgatcgcattgacagagctctaataggagaagccttagtttcagatcgggttgctttggcccaacgtgatcacgaaaggtttcatctttctagccataccctaagactctgacataagatcacaaaagagcaagcgagaatgatcgtaaaacaatgtcctaaatgtattactttatctccagtgccgcatctaggagttaatcctagaggccttatgcctaatcatatttgacaaatggatataacccattatgcagaatttggaaaactaaaatatatacatgtctgcattgatacttgttcaagatttctttttgcttctctgcatacaggagaagcttcaaaaaacgtaattgatcattgcctacaagcatttaatgccatgagattgcctaaacttattaagacagacaatgggccatcttattccagtaaaaactttatttcattctgtaaaaaattcggtattaaacataaaactggaattccttacaaccccatgggacaaggaatagttgaacgtgctcatcgcaccttaaaaaattggctttttaagacaaaagagggtcagctatatcccccaaggtcaccaaaggcccaccttgccttcactttatttgtcctaaatttcttgcacaccgatatcaagggccagtctgcagcggatc

SEQ ID NO: 31669 - DNA, 1182 bp, Mus musculus
ctttctttttttaaaaagtcattcaatggaataagaaaaaaatagaattttcaatgatttctaaaatggttttgccattttatactacctgtgttcccagcatggatggtcataaaaatcaaaatataggccacctctacaaaatggctgaagatgttcggtgatctctagtgccaaagaatcagccaaaggtttaattttttatataaaaacttgcaacaaaatccactaactagtatgtgaattctttaagtctttaagaagaatagaattatatgtatagcaaaatcattttaaataaacttctttatgatttattatcaataaatttttggttttcatatgtattttatatgcctgtataacagagtcaagtaaaaaacttttccctttccggcggtgacaacctccctacgagaacatgcctctcgcaaaggatctcctccatccctctccagaagaggagaggaggaaacacaagaaaaagtgcctggtgcagagccccagttcctactttatggacatgaaatgcccaggatgctataaaatcaccacggttttcagccatgcacaaacggtagtcttgtgtgttggctgctccactgtcctctgtcagcctacaggtgggaaagcaaggctgacagaaggacactccttcaggaggaagcagcacttcagcccctggttgaagatgagtgggaaccttcccaataaacacgttttggatatataacaaaaaaaaaaaaaaaaacagtttcatgcaaaaaggaactgtaaataggaaaaacttgaggagctcttgtctaggacctaagtggatataaataccactatagcagattaactgtgctaaaaagaaagggacaggtactttgaaacactactgacatgcgagccacggtattctgtatttataacccatctccatgtgactttacaacttacaccccattcctgttacagtaatactgactacccatacctccatacacacccccacacaagcttcccgttatctctagcaattgtttactgagtcacaaccacagattgatactatatactattataactcaatattacatactgaattataataaaagtgaattctcagaagcatgagatggaaaacagagtagatcagtaaggatacaatcctgaatgagatggaaaacacagtag

SEQ ID NO: 31670 - DNA, 2519 bp, Mus musculus
caagaaagactacttttatgcaaggtcttgtgttcaaagagagctttgcaaatattttgtatattccactatcacttgaaactgtttttcaacacatttaaggtgtagtattaataggttaacaaccaggctttctagaaaaaaatacttacatatgtatttctagggtattaaaataactatattcttgaagattgatagccatagcatttaccatgcccatgatggtcaattcaattaggatttatttcaacacaccggctagattctttttaaaaagagaaacactgtattggcagattacttgataacaacattttgaccaagtggcaacattgtaaagttagtgtctgtgcattgcttacttgcataaccctatgcaatatctgtagagttacatgtatcaagtctagatgttttgtgcaggtgatacatactggtacaagccaggctgcctaatggaatttctcagtagcagcctacgattgaatcctgtgtggcataaagcataccctttcagaatgaagtgccttaaaaatctcagcagtctcttttggaccagcactgactgaactgtaactaggagaaagtttcaagatggaatctggagtgaagaaggaagacgtagcgtggtgcctctgtagacattctaagagcttccaatttcccttcagatatttttaatatgaaatatattttactgacagtgccaaattctttcatcaggaaacctttctcaggagggttttttttttttaaagtgtttaaatgtcaaatgtgaattggtgatgggtgatggagagatccaagagcagtgattgtcagatgtatgaatggatggccttggtgagattcgtcaagtgcgcggttcccatgcatgttgggtaatgcaaatctttggaaacactgatgatgctatccagtcttgtagctttattacttaagggggtagggaaaataagttcccattctttcaactcccttaagtgtgtgactcttttcctagaatagaaatgcaaatgtgcatgaaaagataattgtaccatagtgttcaccgatacaatcatagcattgtctgtttttctcttcatatttatgtggggggggggtgcggggagggctggatgcagaagttgaagattgcaatgctatgatgctaggttttcttagctgattctgacattttctttttttccttttttaataattgaacaaggtttcacaaagttgactatggccaaggcagagcaactttctaggaagctttgttgaaagaaagtatggcatattgcaccattaccttggcttgtagcctctgagcttgccaccatgggctttccaggcaccttcctcctaagacacagctgctgggagaggcaggcaagcaatttagaggtgacaacatagggaatggttttatttatttcttttgtgccagccagaatgtggattctttcagggactggttaagccaagacgcagtgtttttgctcactgtttttaaggagagaatgaatgatccttgcctctcactccccaacccctgggtgcagaattgtatctcagggttggacctccgtttagagtgctcaaaataccaaaattatccacctgcctctgggtaaggtaacggaaataccaaaccttctgactttgccaaaaactgtgcaagcaatctggtcatacccagagcatgatgcagttcagtttggttgtttgtaaacaataaagcaataagaataaacaaaatgcacaggacattaaaagatataaacaaagcacaaaggaatgtaacttgttaatatttctgaaaaaaaatgcactggggagaagttgatgttgataatagtataaaaattacccaacttcttgacaaagacaacaaatgactgtctcttgcagacacttgctactgtaatgtcaataacagccccccgctgttgggtacagcaatactttctgtatggtccgcagcactgtatattatgattgatattaatgtatccaatgaaataattgaactgttgttcttcatagcctcattaaagcatttggtttttcacattgtgttgaccagttgtgtccagttcatgcctgttttcactgatgtagatgttctcaaagcaatgacaacatatcccttcctctcagctcatgaataagaaattgctagaaaagtataattgccaacagctctctgtttagcttgtgtcattcgaagatggcacttttttagttcgaaacatttttgattactttatgacttactctcaaatgagctataattatgtagtatttcccctgttctgaatttggggagactttgaactcccagacgccaggaatctactttagatataaggggtttatgtaaaatatttcagggcgaggcagctttattaaaaaggagagaaattgtcagagaaacctttgcatatttactgaaaagatcctgggtttttaaaatacaaatttataataatgaatgcttaatatcccagcccgccagctccttttta

SEQ ID NO: 31671 - DNA, 1883 bp, Mus musculus
gaaaagaaaagaaaaaaaaagatcccaaaggctgcaccttacacctgaaggtccccacacggggacatgacatcctgccagtaagagaatgaatgacagaaaaggaaagagagaaacgcacgcgcgcacactctagggacatggcagattcatttcacaaaaacagtattgggggtgggatgggggactgttggaggtttttcttttttttctttttcatagcacccaccattgtgagtaactgccaccacattctctcagcatcaggaaacacagccacgaaagaaacagaagagaataaacaatcctcaatagttagactgtcacagtggccatggaagatcttccctcctataatcaggtgaccaggaccacaggccctgtgccatcctcacccgcacaggttgctctgtttgcaaaatgaccaaaaagccagcatggtgacagggctaagtttgtacagtagttcagacctgctcggtggcattcatctgttttaatgcaaatgagacttcacattgaacttgttatgggagttaatgaggactgagctcagcagacgctaatgtgtcaggttccagtgtgctaagtcggtactgcagcttggtctgcaatgtgagcaccacacccaccaccccagtagcacagacttcacggaagaggacaccaggtagacagaccagggcccacagaatgagatggctctaggtcaatatgccctcggcccttcaaacccctccacatttccgtctgcacccgcttccctggcatgtatttatctggggctgtagcttttgtttgggtttagtttgagagcctttcggagcttaatttatatactttgtacctttttttatttctaaaattaccaaagatattacgcaaaggtaaattattttcttttatactttatctgatgaagccaaatatcctcttattgttgatcaaaggaggcgaaaggattcagaggcaaatgatgaggtccaggctatttgccaacctgagggaaattactgcccgtcagcagagttcatttagcagactatgtaggcaatggaaccaaagttttttactttttttttcctgttttttttttttttctctttccttcttttctctacctgtagagagaccaaaactaactcctataaggagaaaatccggggctactgcagagaaaagaaatcaagacaacagtattatagctcctgtggaaagaatgggctagcatctcaaagaaaaagaaatgaatgtatgatgctgaaaattagtatataatcgaggagacacttaggatgaattcagagagaacggagaagtgtctggccgctcgaggccacttctagaataaagagatttttagaacattcgtacgccacttttgtttaagggctgtgctctgatcactgcgttaatcttggtttatcctggcatttatcctctggtttccttctgctttttgttgatgttttgttttatttttttcctatttcagattatgatttggtcagtgtttttcatttacacacaaaaaaagctaacattcccacccactcataagcttagagtagaacacctttggcaatgacttctgaaggtttgctctgctttctatagaggggcggtctgtggttattcatgccccctccaccaccaccccacccatcttttccaggcagcttcacagtgtgcaggcagtagccaggccgggtcatgggaagggggccctgtgcttctaaactgagtggttgctggttagatatacaaaagaggataaaactctggtaggttagttcattctcagcatgtgtagctagacaagagtaaagataacagcatggggactgttagtacgcacacctcagttcaaacctttagggaat

SEQ ID NO: 31672 - DNA, 1316 bp, Mus musculus
tggcctcatatggcccctaaccccttgggctgcaggcagtgaaaatgtccagcagtcataggaagtttcccaccgtctttgaaaaacttggttttggctgtggttgtggccaaggttaccctgcctccactgggcggcatctctgtagcacctcttgtaggttgctccaacaccagcgtcagggcaatccgggtgttcccctaagcctgtttctctctctttctctgtaggcaccccatacacgtcaaagaagaacccctcgaccccgaggaagctgaaggccctctgtccttagtgacaacagccaaccacagtccagattttgaccatgacagagattacgaagacgaaccagtaaatgaggacatggagtgaacctctgggcgggccgacccccgagaccgaagattggggaaaaaaaagcaaaacaaatttaaaaaaaaaataaaaaaagaaagaaaggaaaagaaaagaaaccacgtcaaaagttagcagtgaaacccgccctccgtttcttgtacagtctggaggattttcgctacattttgacaactctgaaacgtgttaactcttagtgccatcaagaatcccatttgggagtatttttgatttttctactttttgttgacaaaagggatttgtactctgtgcattggatggacctgtttggtacttgggattttcctctttgagtcaacatcagtgttgtaaattcgataaacggattcacttttagcagcagactttgaactgcagcttcgcccggctgatgctgggcgggcgccgaggacacccgactgagctcacgtacctgcgctgcagaccaagccttcgcccgagttcaagactccagtggacgacctttttgcacagcgctgcatgttgataccactgcctttactcactttggtttgttttgtttttgtttttcgcttccagttgggatgggggaaggcctttgtgtgtgtattggggggaggggttaaaaataattatcccaaattttttaatgtattgcttttttttttttcttttactgtttttttttctttctttctttttttttttggcttctttaccattttaagttctgacctcaggcctccatttgggcccagggcctcttggaggcttcgcgttttctgtaccttgtgatgaatgttaataggcgtttttattatacagagctgaatgtcatttctcgtctgtagttttctggcactcattccattttcctatagacatcaccatgtttctctcaagtttaaaacaaaacaaaacaaaacattccgttttggtctttttccaaaaaaaaa

SEQ ID NO: 31673 - DNA, 1172 bp, Mus musculus
aaaaggaatttctctctctctctctctctctctctctctctctctctctctctctctctctctctctctctctctccctctccctctccctccctccctccccccctctctcctctttttatctttttgtcacttcccagtctctccctgttctcctttctctttcttctctctttcttctctctccttttctgtttctcctcagtggtctttctctctgttttctcacctctctcttttttctcctttctttccccttctcttttctccccaccctctctctatatagtaaccgtgtttctggtcaagttatggaaaatccactatgcgttcaagcactctttagccagactcttcatcaggcttcggcattaacaaatctgagtctgaggccccagaagatgtgaatctttattagtcataatgagtggctgggacacaacctcataaaaagcactggtagaaaacagggggttaatatcatgagttatagatcccgtggttgatttatgctcacatctgacccctgtattttctgtcttgagcaccaaggaaggactgtaccatttcttcagtctggactttaacaacgggagaggtaggcctgatgcaacatccaagctcacgtctatttacttactttatatatttttttactgtgtgtgaatgagtgctatatacataggggcacgagctgttctgtgtgtaaggtcagaggttgatgctaggtgtcgtctttcttctgtggctctccacgttctttctattatcaatttacatttggcattttgtctgcctatgaatgtgcaccacatgcatgagttacagttgtaagtcaacatgtgggtgctgggaattgaacctgggtcctctgtaagtgcggtcagtactctaagccaactaagccatctctccaggccccgtgttatttcctgagacgggctctctaactaaacctgcagcttgctggtttggttgggctagcttggctggtgagtttcatggatcctcctgtctccagtgtctggattgcaaacttgagcccctgtatctacctggcttttgtgtaatacttgagctctggcctcaggtcctcatgcttgcctattgaactgtccatccatctctctaatccccatgctcacactttagacagttcctaataaacttga

SEQ ID NO: 31674 - DNA, 1102 bp, Mus musculus
tatactttcttcctgacagtaggccctgcagtctttttgtactggtaccgacttcttttcttccacgtgtgatttttttttttttttaaataaaggctacactggttttattcatgcaaagtttcctagagaccatggccagttttctacagaggctatttttgacaacctcaagtggcattacctttgcgttgcagtgaaggagagcgagctaggagatgttggagatggaagagagggacagagttgtctaaagtcccctcagaactgcaggccacagggccaggtgagctgtgtgccttgtttggggggtgtgggggacttctcccagtggtgacactgaactttaggagaaaatgcgaatgggtaggaggacggtcttatttgagtcacttaaggagcaaggtctggggccctgtgtaagttattataaaacaatgcatcagcaaacagctgctctgtagaccagtcttggatggaaactttctgtgagactgtgacttttaaacagtaaaaagtgttttggatagtaatgtggagaaaaaaaaaacagtattgcatgtgtttgtaccgattgtgatttgcggatggggtgggctctggagggcagaaaaatacaggtttgtttgggttaggggtttgggggattttcccccccaataaaaagttaaaatacttttgtggaaatggcttgtgctttgataagcccagttttactctgtattatgagctaattttccctctgaagacttgtctgtggttaagaagatatgggatataacggtgcctctcccaggagacaagcattttcctgcggtgtttgctaagttaggtggtgctgttctactcatggctgttttcaatgattaataagaaaccataatttaaaatacgatctctttgttagacattgtcacttgacaccgaaggacttcattgcaagtactgtataatactttttgcttaaactgctctgtttttattaatgtaacttgcgttttgaagatttctatctgtacttctctttgcattacacaaatataccagtattttcactctggagtggctgttttgtttttgaggccaaatctcttaggtctgt

SEQ ID NO: 31675 - DNA, 1555 bp, Mus musculus
tttttacatgagtgttggagagcaaacctaagtctttaggcatatgtgcaaagcaccaagcaccctagctactgaaccatctccccagacccatctgtagacccatctcttcttatagggacactagtctcaccagactaaaacctgttaaaatgtcctcagtatgatgccacctgtgctatggtgtgtgtgtgtgtcccgtgtaggctactgtgtggtattcaatctcagtgcagtggtatgagaggtaaggcctccttggggtttggttcaagggagtgaggtcttcccaaatgtgtatcaatgactttgtcatagcagtagggtcggctagctgggaatttgcccttttctcttgcgtgaggttgtcctctcctactgtctatttccaccacgataggcctacaccagatgcagctgcatggactagaatttcagaatcacgcttttccgcccactcccccctccccccgcgtgccgctccggctgcaccgagctcgcttccgcgctgtcaggctagcgccgccgtccccagccatcaccatgatcatctaccgggacctcatcagccatgacgagctgttctccgacatctacaagatccgggagatcgcggacgggctgtgcctggaggtggagggcaagatggtcagtagaacagagggtgccatcgatgactcgctcatcggtggaaatgcttccgctgaaggtccggagggcgaaggtaccgaaagcacagtagtcaccggtgttgacattgtcatgaaccatcacttacaagaaaccagcttcacaaaagaggcttacaaaaagtacatcaaagactacatgaaatcactcaaaggcaaacttgaagagcagaaaccagaaagagtaaagccttttatgactggagctgcagagcagattaagcacatccttgctaatttcaataactaccagttttttattggtgaaaacatgaatccagatggtatggttgctctcctggactaccgtgaagatggtgtgactccattcatgattttctttaaggatggcttagagatggagaaatgttaacaaattggatctatcacctgtcaccataattggctgctgcttaccatccatacaacaccaggacttaggacaaatgggactgatgtcatcttgagcttttattttgaccgtgatttatttggagtggtggcattgtttttttaaggaaaaaaaacatgtcatgtgggttgtctaaaaataaagtgcatttaaatccaaaaaaaaagaatttcagaatcacacccatatcaactcccctttataaactgcccagtgttgggtttgaaaatggaccaagactgtctgctaagaccctcatctccaaataaagccatattcccaggtaccagagaatgagggcatgagtgtgtctccactcctgtgcacccccaaggcacagggcctatcttagccactgttgtattgctgtgaaaagacaccatgaccaagtcatcttataaaagacagcatttaatagagggcttgttgacagtttcagagagttagtccattg

SEQ ID NO: 31676 - DNA, 1205 bp, Mus musculus
ttagaaaagtcatttttcatgccctctcccacacacacttgtgggatgtttgggggtgggtgtgggggtagaaagtatatttccttcagtattcgagttaccacagctgaagttattttgagtgtcttagtgtgcagatcatcgcatagtaaaagaaagatcagagctacagaatcattgagacttggaagaaagcaattgtgtctgtgctcccttaagataggctgtagatgatctgaaggaggaactggagaggtcttcaagcatttgaaagccctcagtcagcccttgctctccacagagctcactaagcctgtggtacccagatggagtgaaacagggtgtctagtccccaaaccccaacctaagactggctcttcaacctgctgctgcttgtggcctgccttgaggattcagcctgagggactccttgtccggttctgtgcttgagctcacactgaagggaagagtgcatatggagtcttgccttgttgaagaaacgcttacccaatggttcctgtctgcatttccatcatcgttcaggtcttctgaaataattagcatggggtaaatggtgatggtgctgatgtttgccccaagacgacctaggtgtagaaaagtttcctgttgtcttcctccgatgctttttgtggtacttgcaggcggtggggctccccactgatagtggtactggggacacttgggtgaatggaatctctcatgtaacttgtctgagcactaggcatcaggaagagtgtattgacctcatgacctgagaggctgaagctgctgctcagctaagttgtcatggacaccaactatcctgaccttagaattgcttgccagttgagcacagtgtggtaagtcacttgctgagggaattgtacaaggccagaatggtgttaaaagtcacaagcagtgcccggaacaggacagaaagaagtgtcttgttccttgcaaataaaagcaggacaaaagtagagcctttctggaggtaggctggtaacttcagccaagtactgtttgctagtcactgagggaaattactgcctaatctaattgcccagtggaaggagaaaggctctcattttcccaaaaagactgtactccgtacctgggaatacaagccattgtggggcccaggcaaatggtggagtgaaaggtatgcaggctgtgtggggttggggagttgggcatctttccac

SEQ ID NO: 31677 - DNA, 2626 bp, Mus musculus
gcttgccgtgggcatctggctaccaaggaatttcgtaccctgacagttactcttgacacttttatgtattccattgttttatatgattttcctaacaatcatttataattggatgtgctcctgaatctactttttatatatatatataaaaaaaatctgctgtgcacaattttccatgtacattacaactggttttgtttctgttttgttgaagagggttgggaggggggagggaacttttatttattgtgttcacagactccatcctgtcagcatatcctcttaaatttagttctttcttccagctatactctgtactatcagttttgatataactatatatataaatataaaattatatataaagggttatttgaaaccaatccatggcaacgctggtgcttgatacactgtgaagtgaatacaacattgaacagttgacacagatctgggacagtcccttctatgaaagtgctgaaatatcattaaaatcagtcttacatgaagtatgttccaacctgcgtgggaacttgactctctcatctgtctttagagtactggataatataaaaaatatattttttaaacaatgtgatctcaaatttaaagactgctccagatagcctgcatttgcaatgggctaattgacaaatgacaagtggttcagttggagggctttgaccattcggaagtaacaagactagctccagaatgccaagtattcgtgtaaattatggttacatgttaacattgctgtttttattaagcactcatgagaatatggtgttctgtatctcgaattccggcctttttccagacctctgctcacgcctgaggtatatctagcagctgtcttagttctagggttgcggtagtgcatctttgaatccacaccacccagggaagcagtctacatcctctgtggtgttgcagtggtggattttgtgatcatggcctgttttactcctcctcccgtaccccgtcctccaaatcctcaccctaccaatgcagttgttagtctttcttcttaaaacctactatggctcattttattaaacaagggttgtcaacctcacatccagacctgacacagagatcttccagtctctggagtcagttcttagttccttgtgtgggaaaggatcgcaggggtgcatgggcgagttgcggggaaagctcacttcccaggagagtgaatgaatagtaggtgttctttgttgactgaactcttgaaagcttttcattttcaccattttaggggtaggagataatgaaagaccactgataatagtttatcatcccatcccaagtctcagtgactctgctttgctcttagattcagggtatctctcctatctgacttagcttcatgtccaccgagtttgtagtgcttaagtcacattaagcatgtggtgttaaccttcctttagtttatcacactcaaggactcataggagagcgtgtaagggaacaccgactcttggtggtaaaagaaccgggtttgcttaataaaagaatttctatgtgtggaggcaacaagttaagaacatattaacagcttgaattgagtagccaacaggaatggttccattcacatttacattaaaaccagtcattcgatgcgccggagtctgtccacaaaggcagtgctatttgtcaatgggctcctgttctcgacgcatggacaatgctcccctctttttaaaacagtgcttgtgtctgggatgcaagctgtacttacctttttaaatacctttttaaagtatttattaatgaaccaaaggaaaccaggtgctttctgtaagcatcagaatatataatacatagtgatttgactatgaattttaaatccacattttaatattagtggggtattgcaaagacattccttctaaagttttaatattccttttattaagggtctcagggagggttaattagtcagccatatttattttccagaggtgtaaggaattgctaagttttttaattaactttttaaaaaaaaaattaaatgccaccaaattcatgtggattgcactgctctttgaaccaataagtgttggtatgcactttgttcagaaacactgtgtactttttcaaaacgagtttcatgtaaagtgattggaccccctagattagtggaaaaggctgatttaccagctcctcataggctactaattcattcatcgctggtgtcttgggttttcagttttgcctccatgataaattaaagaatgaggagaggtgaagggagggaaggaccacttcagaactagtgaacttgccttgaggtagaaactgcagtggtggagtctaagcagtcagatgttcctggccgccctgtctcggctgtcgtgggctgcgttgggatagagaggtgataggtgccacacaatgccatcctcaggcatgcattctggaaatggaattcctattagcttcctgcatttacagtttgccctgctatagtactccgtaggtaaaaacactagtgtagcttacaaagagacattaagaggaccagaaatacttggtattcagtggcacagaaagaaagcagattaaaacaaaaagcacagtgttaaggcttgcaagtttcccgtgcgtttagtacatgatcttt

SEQ ID NO: 31678 - DNA, 1204 bp, Mus musculus
agctctagctctgtatgtagaccaggctggcccttgagatcttcatctgcctttgcctcctgagtgctgggaataaaggtgtattccaccactatcggcttcttacctttttattttattttgggtcacaactaaattttaaacattttaaattagaaagaaaaaaaattattttgtatgttcgtgtgagtgcaggtactcacagaagccagaagagagggcattggatcctctggtaccttgtcaggtgctgctcgttttgtgggtgctatgagtcaaactctggtcccctctacaaaagcagtatgagctcctaacaattgagaaacccaacttttaaatcaagcattagacacattacagatttctgcctcaagagctggaattcaagaaagacaggaaccactgcctgactgaaaacactgattttttttttttttttttccccttcgagacagggattctgtgtagccctggctgtcctggaactcactctgtagatcagactgaccttgaactcagaaatctgagttcacagcactgcatctgcttcccaagtgctgtgattaaaggtgtgcaccaccactgcctgctaaaaacactgatcttaaaagacttcctactgtggaagatcttttgatgtcttgggttgtattgtgtgagtgtgaacctgtattaagtgacatggtaactgggattcagaggtgtgataacatccccaaataaagcttggggtgtgtatgcacagttattagttattcaaaacataaaaagggaaggatttatttctcagcacaaagaattgttattttaaaagtttaagttggggctggtgagatggctcagtgggtaagagcacccgactgctcttccgaaggtccggagttcaaatcccagcaaccacatggtggctcacaaccatccgtaacgagatctgacgccctcttctggagtgtctgaagacagctacagtgtacttacatataataaataaaaatctttaaaaaaaaaaaaagtttaagttgttagagtgatttggtcatttacacattatatacctgtataacatcattatgtttcatgattattccaagagtcaaaagtattttttaaaaaatcaaaatcattttgaaaatcataaagcataaaaattggcattgaactccttaagtatgcctatgctaatgatgttttattggttctg

SEQ ID NO: 31679 - DNA, 1209 bp, Mus musculus
agttggttcttcccattacttttgctgtgtttccctccccctcccccccagccccctggctttgcctaaagctgtatgtgtgcttgaccactagaaacccaatccctcgtggtcactgaggtgaggccagctagtggtgcttcatgttccctctgtaaggctgaaggccatgcctcgagcctctagctacaactctttgtaatcccatggccggggccttttgctgtcataaggagacaagcagctctctggtgctggcagttctgggctcgtttgggacggaagggctggactggcagaccccgaagctcacatctccgagccctgagagctagaggtctatcgttctgagcctcagctgccaaaggcttatatctctaggtactaagattggaggcttattggtcttggcttaaaccaccagtatctctagaactggtagtgattataatccttgcctttcagaagtggcagcaagggcctgaggtgtcatggctttcaaatgggccttgggtgttgggaccttcatctcctacagtgtctagaccattggtccttggtaacaataggatccctggtatcaggtttatggtctatgagatgttggcctgtacggcttagcatgaccctgggactcatagagtaccatgggttctcatctctgacttcacagaagcctgcctttccccagccttagctctctgctctcttttgcctctacctccattacccctcactccctctgtctcctctgcttcttgtttgtaccctagatgttctctagacccctccccttgtcccctgctgtagccagggcccctgtggccactccaccagcttttaccatcttatgttagcacttcagtccagtatcaaaactgggcccaaaaggccaatcaggagaagccttttgttaaactaatactgccacatgggaggagtctctcccaccaaaatgtggaagcggagaaggagggtggggatggcaagagtgtttgctttggttagggcagtacttcatacagatgtactgtattggtgttcataccaatcatggaccttcctctgggctactaggggaaaaatctcctctctagcctggatgaaaacagttcccagacttcaccaacacttaagatgataaaaagaggggctggagagatggcttagtggttaagagcactgctcttcctgaggacctgggttcaa

SEQ ID NO: 31680 - DNA, 1187 bp, Mus musculus
agttcggaacagattgttcactatcaaagttgtaccgtcagttcagatgatgcatattttaagttgtaaagtagtgagtgcgaaattcattacttccttctgtgaggaggtaaggttcggtccagcactgagacaggtaccataggagagtcttattctcccaagattaagagtggaccagcagccttgtcagcacctcagctcagagctgcttataaagccaggaagcctgtcctcaccctccctcatcagatccaagtctgagtccataggcacgcctgtccccttacgactctaagtgatccttctacacttgtgggttttcagtcacctttgtgatttgttgatgcagtgtgaagaattctgaagtgtgatgaagtgaggcgtacgagaacctggcttgtgtcggtgatctaggtttacacggtttaaccaaaccgccactgttctttctcattgtgtgcttttgttgtgtaatgtactttatggagatgacttactgaggtgacttttcacagacctggacagacgttcatgaaatcctggtgtcctttggaaggagagttttgtgctatccactttatcgtcatttcaagctggtgctgaaagcctaccgagacactataaagatactgcaactaggtaaggtaggcttgcagatctgggcattagaagttgtaaatttttagtaagtgaagatgcaatcacgagttttgctcttttctatatgtaaataatgaaagtgatcaggtcccccacccctcaggatataaagggcacgctgaccttttctaagaaagggaggataaagggagaagtgtgcagcatccagagcccttcacactgaacattccattgctcattatgtttttttggaaccctataactttctaggcactgaggtcatgtggatccaataatgaggatagaaaattctcttctccagtgagggttacagctttgtcagagataactaaactgacagttccagtacagagccccagatattccgcctgagaagtacagtgattgttaggaggggacttgtttccaagacttgggaaagcaaggacgttccaaggaacggcatcactactctcaagactcttgactgccgctaagtttagcatgaaaagtcaatactttctgactataagagtatggaaaattccaggcttcaaaacaaa

SEQ ID NO: 31681 - DNA, 2263 bp, Mus musculus
tgggagttgtgctcaagcattagcttgctgtctgtagaatgagtgcttcggagcctgacatgaaaccatctcaagagcccacaggtcccataacattcggttgcttttctgaacactgtcaacatcacatctgtctttctgaataatcctatatgccgcatggcactggtgtgaaacatcactgtactggaagaattagtagaggacttcagtaatgtacctgagctaaaatgaccgaggcgttaggggtgcacagaaaccaccatgatttgtataacattttgaagtgaattaatatttttgaacatgcttcttcaacagccagtgttatatttttcagatcaacacaaagcacaatggttactactctataaactcaatattttcaaattcacatatttaaagtcatgcaagctgcaacttccctgtcagaattactggctgccaaatttatacctgtttcttcagctgtactttttgatatttagaatttttaaatttctgtaaagtaggttttgtagactgtaatgtgttcactgcctttgtgaagcggtatattgtataatttcgtgtgtaactgaatgcttgggctttcaatacagtattcatataaagcaataaatattaatgttatgaaatattggagtacatttttatcaaaatacaaaatctcttttttagtttcagacatctgaggtacagggatggacctaatagctgatacaaacagtttctcacactttatctatcctaagcttcgggtgatcagagggaaaccacaaggtttgcattttgactgcttagacgttactatggctaaaaagatatttggctccgtttgttcataaagtaatatgctactgactgatgaccttcaggttcacagcagctggacagtagatttatgaatctgtctagtaaaactgtcgatttactgtacccaaaggggtgaaagtcaaatgtaacttcaagttttttggcaaaaagattaaaatgaagcaaaatttaagtgtgacattcatttgtaatggcctgttagagttgagggattgacagtaagagcagattttaaacattttaggtttagagtttttgagattttccttaggatatttatgaggttgttgtcaataaacctgttctctaagctcctgtgacctttgatagtctttatttatggtgccatggaccatttacaaacaagtcagtttgctgttggttaaaagttgaagatttcgcatcatgaatagaggtctgtggctttatttgtaaacttgcaattgctatctttgcaaggggaagtgtatttctttattaaataaagtacaattaataatggtgaatgtaccaaaatgacatcactcaattctatgagaggtctgcattttaacctatagtttaatagctttaatatttattagctattcctatgttgatcatagatgaaagttgttgctgtttatacagatacacgtaggatactggtgaagggtctctagggcagttgtaatattcatcaccgtgtgaggccatgttcagactgtggatgcattggtcccttggaagtccatttccacacgtggtgttagatgcacttacaggagactgcaggaaagtgtcagttctaatgagcactgagtcctttgtgagtgacagaatgagacccaagagggagggtcaagccgtcccgtggctgaagtagctggctctttgatgttgaacagattcctaaccgggttctcctttcccaagcctaactcagatctgggcagtgctgatggtgctgacagaatacacatgacatggttttgccacccctcccttttaaaaagtgaaaacattttgaaaactctataaagttctgtacatgtagaacagaagtgagtagtgaaaatatattttgaggattagtaaacttaatccacttaattgtcacaactccggtctttcccatatgtagccagagcaatggagttacaactctggctttcgaaagctattccagaaaccctgccccagaaagtcttaaagcattgagatccttgtgttttattttggcagtgtagataggcatgtatttatgcatttgtaaaatcaatttttttcaaataatgtatgtaatgtactagcttaaacggtactgggcagagcctagagctactgcgaggattgaatgtgaagccggtatcgcgggtggaaatgtacctgcagagctacagcaaactattccgggtagtgtttcaggctgcctttgagcaggagt

SEQ ID NO: 31682 - DNA, 1190 bp, Mus musculus
agtggagggaaaatacacccttactctcttagaaggcaatattaacaagcagctttttttcaaatagcaatggtaattttttacttgttaacctttttcataaagtgtttaaatttccaaaagatcttttattaagcatactttcacagaataatttgtttaaactatattcatataaaagaaggttaaacacgctttttttctgcctaaaacacaaaatgcaactgccagtatgtatttttaatgggtccctattttgtaatgtcacttcgctgaatgtgtttcatacaagtcaccattcattcatacagcttatatcagttggggtttcaacacaaaccagccaaagtctggttggtgatttgacacacacacacatacatacacacacacacacacacactaaccaaactagcagcatttctagtcgggatatccatttttaacatttttatggttaaggttcccaagaagagtgtcaaggttttaacagaaagcaaaatttcctgcagctttgtggacgcttaaagcatgtttgcaaatattgccgcctgttggaagaatttgcatgtacagggaagtcgcggatggagacctgtttgtggagttttaagtgctcattgttgtagacctttgctttgtagattggaagggacagacttaaccaagcaagttcacaggatcatgattagttacaaacatcaagtaaaatgaagttaaaataaattattattttctatttgacctgctctgacatgggtgtttattttgcactgtcggtcctctgccctttcttggtttatatcaccggctgcctcttttaagtctttcagaccatcagattcctccattcaacctagagacagatgacaaaacaaggactgactagtggcaaagaataggggatcaaagataccgtatccccctgggctttggtggcccacctcccaggaagctccaagctagcccggtatcctatggtgaggaaagcttgtgagcaagtgcatctctgccagggttgtgtttaaaaggcaagtgctttggtttactccaactctactctgcccatcttaacaaacatcttgtccagctttccacctctgagatgtgtccatccaccaggcaatggctttctcagcatcgcagatgtcactaaagtagctgagcttggagacaggttcccttccagg

SEQ ID NO: 31683 - DNA, 1147 bp, Mus musculus
caactgttatttattttcctttcttgctccccctccaacccccaccagtccctcccacccacccggttcaccccacccctaggtttggaagacacagggggggggggcttggttataactaggaaaatagacagaataggaaaaaaaaatgatttttcaacttctcagttctagctgtcatgcctttccattgcacacgggtgtaacagaaacccctttctgattgcatttcccggaaacttaaaaagagactatttgtaatcataattcagattaaaggagagcctgtgtagggactagtacctttagatgacaggtttggaagttaagagactgcttgcctggtctttctaaggatggaaaaaccacccattcctagatcaccccctagtggcccctcatgtctgtgcaaaggaaatggcaaggcttgtcctagctctggaagcacagcagcctattgcctccctccagggtggaactagctgtcatgtgacacctggttggaagcaagtatggaaaaacttgggctggctttactgtgcaactccacctggtctgtctgtctgtctgtctctctctctctgtctctctctgtgtctctctctgactctctgtctctgtctctctctgtttctctgtttctctgtctctctctctctgtctctctctctctgtctctgtctctgtctctctctctctcttgtccgttcctgccaccagattttgctttgttttgagacagggtctcctgtaagccaggtgggtcatgaattcactttccagccatagataccccacctccacattctgagtgccagaattatgggtgtgtactaccataccccgtctatgcagtgccgggaatagaagttagagctttgtgtgttctaggcaagcagactacaactaagccatatcgtgagatttttggagactgatgtaagtttggcttaatgtgtccagccctggatccgagtaaaggatgccgtcccaggaaataacttgagccaatgccttgattgttctaattagatctagtatgatagaactctataacttcccccaagttactgacataggaaagttcattaaaaaaaaaaaaaaaaagattaaaatctctcagtgagaaacttctcacaaggcagaa

SEQ ID NO: 31684 - DNA, 1189 bp, Mus musculus
gatcttaccaggaaagtcgtcctgtttatagccaattcctgtccatatccattagcttccatatcatacctactgctacatgtctttaactttgtcacattataattaacaaaatgaatcattgtgtcgacttttcccaaggttcaacttctcaggattttaagactttaatgttctgagtattaagacccagagctcagtcagtttgagaaatgccaggcctagtaacaagataatgaacaagaaaacagaaaatatattaaacttagtgttggacatttttactgcataatcacattaatacaactacattagcatagagaagttggatttaaatttgggattgtagaaaaaaaaattttgttctgaaagagtagtaaactcagtgctccaaggtatgctaatcataaaacagatagtgacattcctccacccacccacttcctgagttcaaggagtattcattcaaagaaagtcaccctgaccataaccggaagctgcaatgcaaatgtgctattgttaggggctcttagaaactgtcttgagagttaacaattaccaggtattccttgtgacacccgtgactttgtacttccttgtgactcttatctggtatttttggtattttccaacaacgcccttcccacctccttgagttgtgttttttttttttttttcctttaaatacccccttactcagctacttggggcgccacagtcctctacccctgcatggtgtataaccgtgggcccgagagcgctcttgaataaaaatcctcttgcaatttgcagcaagaccgtttctcgtgggtgattttggggtgtcacccctcctgagtcagaacatgggggaggcctcacgttgtgggtctttcagttccagtattattttgcttctaaaactgtctaaggggaactaattatttactttgtgatgttggttctcttaagaacttctttctagttcccaaacactttctacaaatagtctgttcttggcatcaggcacttagaaacagtaggacaaaaacttcccaaaagaataaactttacccatcatttgttcttacacctgctagtaagccccctactgtcttcctttggctacttctgggtttttttggatctagaaaatcaatacaataataaacgctatgattatgactaagaatttagaaagtgaatataa

SEQ ID NO: 31685 - DNA, 2070 bp, Mus musculus
tgatatatgtgtatagtgggttacagcatttgcctaccaagttcaagagcatatttagggaatgagaaagcagtataaaacataaggctgggttccaaaatacttgctttttagtagcttggtgccatggattatcctgttgagtctatgtcatgacaggataggaaaacacagttgaaataatgggaatggccatggaacaggataggggcaccactgctctaaatgatgaagctctaaatgatgaatgctccagaaactgggttggtaagcacaagatagaggcaaggcagtgtaattttaaaaggactttgctcctttcaattttccttagcttgtctgagatactgacctgtacattttgaacatattaaagagtaactaagtattctgagcagaaatagcagcatttggtgtagttgcacttttgatttgatgagcctgtgatgtgctagatccctttaactaatgtatatgtccattttgcattttatttgcaaatataagtgaacagtatatatttctaggattataccatttaggaaacaggtttacataaacataaatatccaaatctattctatttggctgaattatgtcaaagtaatcaagtagaatactgaaaagtgtaagtacgtaataaaatgcaactcaagaataggctgctccttaatgtcattttttcaaaagttctacttgtgtttcattcaagctgctgtgatggagtggggaattatgcctttactgctgcagtataatctgatgatccatggactgtttaccattactttcagataggactgtttaaaggaatcttacacaatatagcagctttgatgtcactccatctgtgcagatgacaacagcagaaactccatagtttaaaatccaggtatttactgacctgggtgaagtagattttgacacgcccttttatagcacatcaccttatttgacttcaagaaaattcaaaatccaaaagctgctgtttacttgtacagtacacagatatctatgagcagctatgcagtaagtaactatgtaagctatcagaaagctaagccatatccatctaacttgtaaaataaacaatgtgttcactatctgtggcacctgatataaaggcaagagtctcagcacaagccctcctgttattcctgcaactttctgaaatcagaacaatcctgttataaatagatgctactatggactcattcaggaaaccactaagaaaacatagtttctcttcaacagttactacattttaagatcaacagcactgctccacaagcattgggaaattcaggaggtagacttgagcttagtttttctacctacactcatgctggttttggggtctcagtaacacaggaggggagaacaccagccttaccaagacttcccctgtttcatacagggctcatctttaggtcttctttatgtaacttagtagttcatctttttccatccggtaaccacttttcttccactgttcacgcaactgctgtagcagggccccaatttccttccctgaagaaatacccactttcctgatgtcatgtccactcacagggaacggcgggacagaccactgctgcatctctttgagaagaccatgctctccttggtacttcagcagctcacaaacacgggcagttgcatctggttccctagactaaatgacacagttttatcacatactaaacactcacaatttcattctactatttaaatacttacatcaaatctacagtgtgaaaaagttacttttctctagttagtgagaactattttctgctcagacctaatacatacttacgtctatcacaaagtcttggtatggtttcaatggttctgaactatctgttgctttaatcaagtctttcctgtttttaactataaataaacccaggtttttctcctcttttgaaattttcaatctcaagtccaattttgtgacatcatcttgtactttgaataaagaagccaaaagagtcattggttttggtgaaaagccttcaacatttttactgactttgttaaattcttctaaatttgcattagcaggta

SEQ ID NO: 31686 - DNA, 1204 bp, Mus musculus
acacacacacacatacatacacaaacatgattcttactttatggtagcctgctgactagacaatcacatggataaccatggaaggttactgatattttggggggtgttataagtggtggtggcctttctgtcatatgtaggtgctacttctaaggtaaaagatactggctggctgactctttgaatatgctctgctgtcttttgccaagcgtacagcacacagaatatcttaagaaggcatttcaggagcagctcttccttcaggtagctctgagttctctgtaccaggtatttttgtgaagctgtaactaacgtaagccctaagccaagggttccaggatctcttacggcatgttatctgttatagtcctattgctataggtaccgctgtgcagctcgaagccagaacacaccagatagctctgcatccaacctgggattccgatgtgcagccgaccacctgcccaccgcagactgacagccaagaggagcttttccagattcaagaaggcgtttcttactcgcagctggcctcccctggaaatctgaactgatctcatgtaaagtattcccatctacggaggattccatgtccacccagtggccaaaggaactgtctcgcgtgaccaaatggctggcgagtgtcagcacgtgtgctttattgtgtggtgtatctttggggatcatcgccatgttttactttgaaagccttttgaagaggagagagccgagaaccaggaagtcctggccagactctgccacagggtcagaccctggagtccagcaccttgtctgccttgacctctgtctcctcatgaaatgagggatggtcaacgtgatctttgaggctctctccaactctatttgaactagcagattctattcgaactagcagagtgtattgtgattgcatagtgagaatttatgacagattattttttagctatttttttgccatgtgtgaatcttgagtaatactaatcatataaggcgagagttatcttacatattattttcagaaaagggtggggtttgagtcttttatattcatactgcactttgttctttcaaggaaatcagtgtcttttacattgttgtgacaaatcccattgggacagcgaggggacacttaagtttggagttctgaacacacaggaatgcctgtggagtgactctactgtcctttttcttttgacattaagtg

SEQ ID NO: 31687 - DNA, 1122 bp, Mus musculus
acttaagtcctggctttaaaacttctcaaaaaaatgtgtaaataaattctcagtcaagattggcatggcttttattagggccttagtttgtctacagaataagtattgccaagttctaattcatctgaaagcttttcatcagcatagctacgtctccaaaaaaaaaaaaaaaaaaaaaaaaaagggatttaagggtccagtcacaaggaacatgttttttttttcagcagatctcatgatccctcttagggccttgctaattcttagctgccttacctggaatgagacattcttgcttagtgtacttccacttgagctataaggtacagcagggcagtgttcctattaatgttgccttctatgaccctgaacttgtagtttttctcagaaggtatctcagcttattgcagggagtatttaaatggcattggcatcttagctgccacggctttgtttctgtctcctgttgtgacagtggtaggacgtggtcctctgttcgagccacatcttagaattatctgaggaaggttttcagttctatagatgctctggactgatggtcgggaactgtttttgtttgtttgtttgcttgcttgttttcagagtagaatctcactgggtagttctggctgccctgaaattcgctgtgtaggctagactggccttcaactccaccgccctcagtctcctgagtgctgggattgaaggtgtataccattgcacctcgctcagcactgacgtttttaaggcttccaaaatggtttaaaaattacattgttttgtttattaattttgcgtgtgtgcacttgtggccatctttgggtgaggccagaggacatcttgatggagttggttttctcctttcaccatgtgagtttcaaggattagactcaagtggttaggcagaaccagaaggcatttttttttttaaaatcccttacaaaaaggagaaatgcatgcttattggagtcccactgggagtgtatggttcagacccctgcagactaatgtctgttctattttgagtgcaatgccttaaccattgggccaccctgctgacaaaactgattcttcttgctagtgggcctacgcaccgacttgactggtggcctggtcacagag

SEQ ID NO: 31688 - DNA, 1160 bp, Mus musculus
ccacacggtcacccgtgcagcctgccctccgcggagtcccggagccaagaaggctcccgccggcgcctgtgccacaaacctctcaggccaggcagaccccgtgctctcaccaggaaggtggccggctgtctggagctaaagatggcgccgcccagaagctctgcgactctctcgcccgtcccagaaacagctggcactccgtattccacacggtcacccgtgcagcctgccctccgcggagtcccggagccaagaaggctcccgccggcgcctgtgccacaaacctctcaggccaggcagacccccgtgctctcaccaggaaggtggccggctgtctggagctgaagatggcgccgcccagaagctctgcgactctctcgcccgtcccagaaacagctggcactctgtattccacacggtcacccgtgcagcctgccctccgcggagtcccggagccaagaaggctcccgccggcgcctgtgccacaaacctctcaggccaggcagacccccgtgctctcaccaggaaggtggccggctgtctggagctgaagatggccgcctccttccctcttgccccatccctactttggagcctctgaacaggtgattttcttaagggtcttcttaaagtgttgtctttcattactccacaaaatagggttcttgcactcccctctgttgagatttgaaagtctaatcgaatcaaaacataatctcgctcatcctgggttttcatcaatagcttctggctctttcttcgccacggggtagtgtcagttgccggagaagcaacatagttttaactctcactctgtttctctccacccgttgttgtcgtctctcctcctgtgaagtgggtgatttttatgtagaaaaggtccagtgccacgatagcctgggtctttctattaatggaaggtccagactgagtctttcttcccttcccccaagaaaacgatgtgcttccctggagacaaccattccgtgctctgcttttccctggagggctgctcctactcctctaatcaaggctgaagcatttccggtgctctctcaatctactgttaacagccatcacctgccggaggatctgctgacagcttggcaccagcaggcctttgtgggcttcattgcctgtgcttaagttttttttttcta

SEQ ID NO: 31689 - DNA, 1144 bp, Mus musculus
ggtcatttccgttttagcactgagtaatactttggagagacccaaatctctatccttatctctatcactctctgaagacatacaggatgcattcaagttttgccagttgtaaataaagctgctatagacacccataagcaggttttgtgtggagatgttttcagcacctttgggtaaacacttagaaacatcaagatggcttctgttgaaaatcgtcttcaacggtgtactccttacttagtgcatccagcctcttgtcagatagaaaccatcaataatttagtaaagtgtttggttccagtttactcatttagtgagtggcagttagtgacttgaacccagagcctcaactttgaaatcacccttcagtttctttttgactgtgttcagttccttctcattgggatgaactatgttagcaggtggtttgatgagacctgcaaatagtgaagtgtttatttccagctgaaagaagagtgtgtgtgtgttttgtttatgtatgtgtgtggaggctgaaaactgaagttatcgtcttcgaatttgctttttttcttcacattaatttgacttatggtgtccttttctcctctaccagaggagccgtacaggactgtgactcagcccaggaacggtgggacagtcccggttctaaatgtgactctgaatttggggtttcaagtggtgattttggcctgagtgtaatttcagcaacagtcacacgttcacagcataaactcatctaaatttatcagtcactgcatcgtaacaaatccatgtctcattccgttctctgttttctttcctacaagaatattctgcactcctgagtaagttctgagtagcattggactatcctcaaattggccaatttattaattcatcttgaaaacttggaaaaagatgcttcggagtggatgttctgaatgagatttttcttttatttggcaggcagagttatgtaaatacaaagatagtgtaactgaagtaaagtaattctaatagggtaggcgatcggatgatgagtttcaacaatgctgaggacgcactacggcagatgggacaagaagaactaaaagcaacagcaaactcagggcaggggtcaagatggagctaaaggaaattcctgaatttattttatattaaa

SEQ ID NO: 31690 - DNA, 1099 bp, Mus musculus
acagagaaaccctgtctcgaaaaacaaacaaacaaataaacaaacaaaaaagaattataaaccaaattggaaattgatcttcaatcttttaaagtttgttcatccagttcgagagagttaacaattgcttttcaaatttcccattaaggaacaccgactgtgtgtgtgatcagggtgttgtgacatcatacttgctttctccagaatgcaggaaccatcattcctgtctcccctgggagtgggcttgtgtccaattgcattcacgtctagaacctcagctccaaataaatacagctgaaaggtaggatacagatgggccatttgaggcaagaatgagcctagacactgttatagttcaaggcaggaagggaaagaaataccattgtctggtccaggacacacatatgtagaacttttaaatacactaaagaagcagagctgcttcctaagttacttgtgcccaaattatcttccctctccactccgcgtcctgaggtgatccatctctcgggcctgcatgactatggaccggacagtaaccagcctgaccagggccatgagtagtgctaggtgcttttctgcaccaggagctgcggaggtggttttcttttctccatgtcctctgttgtcaggagacttgagagtttagcaggtgacatcttcccctccattttcccctcctttccaatctcttcttccaggatgtgcatttcgagcagcaagacaaggtagattacatctgagtgtctacatttgaatcctgcctctgccactcatgacccaggaaggtatttcatttcctactcatctgtgttggtatgaagtattgataccagtaatacctatttcgttagtctgctgtgtaaagtgagttagcacatggcgaactcttaaaccacacttgctaatgtcttcagttagcattacgtgaagatgagaagtactcttgtcagttcttccctgagtgacagacgagtgagtatctcaccctcattatttttgctcatcattattctatagtagagtggtaagacataacagagctggttgccaacagaatcgttcctggttgaacttcctgagatgctacaggttggag

SEQ ID NO: 31691 - DNA, 1195 bp, Mus musculus
acttgggttactatgattgctttatgtattgaaccatttcactagccccaaaagtcacttatttgtttgtttgcttgtttattatttattttgaggtagggtcccagtttgtagccctagctggcctggaactcacataggtcttcctgcctctgcctttcaagtcctgggatcaaaagtgtgtactagcacaccttgtcaaaaatctgttcttgacaaagtcaagaacaatcttattcattgagtttcagtgacatgggaagcatagtgctaagtagatagtagactcatcttacataatttataattttgtcatgtttgaagcgctgtgagctaggaattatacattctcttatagaaagacattgagactcagagagtttaagcagtgtcataagttagagtcctgtagcagagctcgtattggtaaatggctaggatatcattgtctcacggtgacagtccttctcactcttccgctctacattgggtgtctgatgtctcactggtgttgactgggttttcatgggacccttcactgaggacacctctgtgcttcattgtgcctgccttgtcattttcctgctcagcccgaggatgactgggaaacttaacctcaccctgtgtaattgcggtcagaattcaggatccttgacttgtgctcatttgctattcctgtcccttcccaaagggagaagtgtaaggtagtgtccacagagaacagaacctctcaaggcagccggcctttgtttgctctacagccagattccttgttgttaagctctgctggcttggtaaccccttgagaatctgaggcaggctacaggtatccgtctgtaaaagcctgcaggtatacacagctttcttctagatctgtaacctgttattttagtttccttcagaattgctctaatgcaggtaaccatagatactgtaacaagcatgtcacggccagaaggctgcatttcccaacacctcttcctgttctccagcttttttttttttttttttttttttgcttcctcttctgtatgttccctgagccccactggtagcagtagaattaactagcaatattccatttaggttgaacactcagtctcttattctcagcacactgatcaggtctgcctccctccgttgacttctgtccgccacaaaaacgaaccttctctgattcaaaagtcgagtgcag

SEQ ID NO: 31692 - DNA, 1139 bp, Mus musculus
attgctgttcatcacttaaagaagtcaggactggaactccagcaggtcaggaagcaggagctgatgtagaggccatggagggatgtttcttactggcttacttcccctggcttgctcagcttgctttcttataaaacccaggaccaccaacccagagatggtaccacccataaggggccctcctcccttgatcactcattgagaaaatgccccaaggctggatctcatggagtcacttccccaactgaagctcctttctctgtgattactccagcctgtgtcaagttgacacacaaaaccagccagtacactggccattgaaacatagatgtgttcagcaagacacttttcttacatagattagattttgtacaatctgcacagatactatgtactggaggaatgcccctgtcctaagttgtgaatgtattatgacctgacccttcaggtctctcctcacactgcagttcctggttttatgtggttgatttcttctttcttagattttgattcgacttagcaagctctgcgtgcaggagagcgcgtcggtgaggaagagccggaagcagcagcaacgactgctgaggaacatgggcgcacacgctgtggtgctggagctgctgcagatcccctacgagaaggtgagggcgcgtgcatccagggtggaccggagtcccactcccaaagccttcacaattgggtgaagtaggggagggccaaagatgcgcttgtgacctaaagcaagtccacgtcatttatatgagagagagcacctcttcctaacacctctagtgtttgcgttctataaagaaataaagatctcgttcttctgtcacatccaagccttcttagatggggacttctagatctacaccagaggtttcatttgtgtgttttagctggtgttattcacctttgtccaaaacacaactaaaagtcattggaggcatgtgggactatgtggaacttgctctattttttgacagtgtcctatcatctgagtatatatttagaccaagaccaagccccgacccccccacccccaacaccatctttttttttcttttctttctttttttctttttctttttctctttctttctttctttcttttttttttttttttggttgttgttgtt

SEQ ID NO: 31693 - DNA, 1149 bp, Mus musculus
cctttgcaaacaagtactggccaagtgtcctcaggtggccctgtgctggttttcagcgctgtttcctcatgggggagcgtggcgttgtcctttgttagggagggaaagaggaggagcctccagtgcagatgctgttttgtgtcttggtcagtggaagtttgctttctgtaggctgttctgtagaacaacaaaattggttattttgaggaaaacagtttcttggccaaccaacttatttgtccagatatttcttaaaatgtacaagcacccgggcattcgtaagaagccagccattcatttaaactggtgttgagctgttaacatgtcttccccaagtgttaatgcttggaaccatttcagtgtctgtaggtacaagtccccagagtttacatttgtggttaaaagttgagtttcctctctctcttcaccagaccatacatacttgcccattataggcgtagaaaaatctgtctagtgggccatgaggattctagcctgcttcccagactgttgtagactcatgagtcatccgtctcttttgcagccaagagccgggccatagccattcctgttgacctggacagccaagtcaacaacctcttcctgaagtcccacaacattgtgcagaaaacagccctgaactggcggttatcagcccgaaacgccgctcgcagagactctgtactggcagcatccagagactaccgaaatatcattgagaggttacaggtaaagtctgaggctggaagaagtggacttaaacttgagaagtgtattttctgaagccacaaaacatacaagctccgctacacagaagaggtttgtggggccaggagtaccaggtcttttggtaaacaaaaactcccagaaggggttccacggcagacagttgatgctgagcattagccataattattgtctgaagtctatatagagtgtccctgggtggcataggcctcctcacactgtgacagctgagtctataaacatttctagggaccacttggaaacacctttgtctttatcaccctagctctaaagatgtcactagacatccattctgctgccctctgttggtctatgcagtctcagagggacactccatttcttaggagggaaattcaaaccaccattcagtgggaaggatgt

SEQ ID NO: 31694 - DNA, 1103 bp, Mus musculus
gacagcacacttgatggctataggcagtactcatctattataacaggaattacagatttctgtttctggaaattagtcagaaagccctaagtagacagatgtgtatacgagcatatccagaggtgttcatcacagaagcactgataagacaattgaaaacatgttgactagtcacaaacatgatactggctatgttaagtgtatgtgtttctaaataacactaggagatcattttgacatgacatgaaatgtgcctgaatattgtccaggagtggctataagtcagtattatggtatttattaataatatctatacattccatttttaaaaggaataatacgtggatgtctatagatgatggaatggaattattaggttttttccttggtattctatcttttccaaggtcaatttttacttagaaaatatataatatatttatatatattataagtaaaaatacagaatatatgctatattttattgtttcaattttaaaattattttctaaaaaccataagagggtctttcctggtttgatctgttaattccgtgcctcctgcccacagaagacaagtaccctttgttcgctgtgtgatttgctcttagtacttcagactgagttgctaggaaatatttaaccaatgttaaagcaacacagccttttactttcttttgtggattaaatgccacatccttgcttcctttgaaagatcctactttgcccagtaccctctaggaaactagtttcaggatacagattggaattaagcagggagaaaagctaattggccagaaaatggccccaaatatacagtactaaactggaagacattgaagagaccagctctgtgcactcattttacagatgaggagatggaggtccacagaggctcattcggcatctcgctgtaattcaaaagtgaagtggagagcccacctgctttccccataaccatcttcactgtgcagttagctaaagccacaatgaagaccaagcctttcagagctgcctagacatgggaacagaggcaacgttaattaaaacacaaacaaacaaacaacactagccttcagccatgtctggcagcatgtgcctata

SEQ ID NO: 31695 - DNA, 1658 bp, Mus musculus
gggtgggtacggctcattggttctgatttgcccactaagggtacatgtgcgcttagtacatttgtaaatactcagttttgtattgtatgtatatgattgctattctcagaggtttggactttcgtattgtaattagctctgttggcatggtgacttgtcactcctgccaaaaatattaaaaatgccttttttggaaggactacagaaagtacctgatttgcacttgaaccagattatagatttaaaagtatatgacatgtattttgtatttaaaactagaatagccagtatttatgttttttataaaactgtgcaatacaaattatgcaatcaccataactttgtaactcctgagtgtcctaagggagtacacatctttgaagctgatttgttgatactcgtgtaataaatggttaaatatcaaatgctgctgctgctgccaaaattatattaatagcgagtttctggcccctgggcaattttgtaccttgtaattatcctatggtgatgctgtttctcgttgctaatggcattagtgcccctgtatcctagtgataactccaggtctgtgaaccattcaaacagcattcattttgagaaaagcaactttagtttcaaggataattttaagcttcaaaattaatcatttaaagtgtttctttaagagagccatgttagaggctcacactttagcttgaaaggagttgatgaattaattttttaaagggaactttttacatgacgtttggaataacagcatattgctgaccagtcagtgtcatctcccgggtgaattttgatgtcacgttatagtcaaatgagttagctgatggtttctagattttcttcctctgaaccatgatgcagtaggtaagaagttattatgcgtatatacatatatacattcatatacgacaaagtaggagctgtccccttaggatgcatagctgcccctagggtacgtagctgaacactgacaatggcgttcttctgaaagagccacgtttgggttttatttctttgtcacatgatttcttttctggatgggtgcaaagtatcacaggaagtgttttctctctgtcgccttgttttgtacctgggtctcgctttactagaccgtctctgcacaaaagtttaaaaactgaaccgtatgcagagttccgaagcaagtcaagtttgtaaatgcatacctaaaaatatttaataaacgatgcagaatcctatgcagtgactggctggtggctttcatttgtcatttccttgtggcttgagaacgattccagtgttagacttttctccccattgggactgagtaaaactatagctaaaaactcatttggttgccagattaaatcaggaaatgctaacctgattttagaaaataaacaattgtttatatctcaagagaaatcagtcaaacaaataacagagggaacttcatacagaattctcctcagtgactgagtggcaccaggatgtcaaaggcacttggcatgacacggtccagaatgctctgtttagtgtgggcacctttaacttggcattttccccatgaaaggaaggatcactaatcattggatttgttggtcccactccccggtgatcaggctcctatcacagagcatttatgatgtttgtcttgtactaggctcattctt

SEQ ID NO: 31696 - DNA, 1174 bp, Mus musculus
gaataccccagcattcagcaagttacaggagaaagggtttattatggcttacagtccattgcctcaggggaggcatggcaccaggcatgtgaggctgatcctccgcacacggtaagctgagagagaagaggaagtggggccagatggagagacaggaagtagtcaaagaatggccagtgccagcaaagaaacttgactgagcagtgtctacaatcattgcctgtgattttttttttaaagttaccatctgcttgctaataatgttttaaaaatcaggacccgaattcaacccctccagattgtttgtttaaaattatttggtctatctaacaagtggtgagaaattaccaggagctccgagagaaaactccataattcattcacacagactcgacggtttaaattaggcaaacgtatcatcacatttattttagtccgttttcttctcttgttttgatctgctgtttgacttttttgccttgccaacccagattcaactgtctgtaaagacatctcgctatcacttaaaaatcagctctttttccttagctaatcttgtactcggaagaattaagacaatattgcctagctgtactgttgactcacgtgcaacccatagaaagctaaattgctttcatgtggctgattaggttttatagcaatgtccctgatgaacatatgctctttcgaaattgacaataattctatcagtttaaacattttagtctctgtaatataggatatgtacaatgcacagaagataaatttttatttatttatttttggtgggggtggggtggggtgggggtggggcagggtgttgtttttgttctttgagacaagatctttctacttagtcctagctaccctggaattcaccatgtagaccaggttggcctgaaactcaccaaaaaatctgcttgcttctgcctccaaaatgctgggattgaagatgtatactaccgcgcctgaaaattgttatataactttaaaatgcatatttgtgtcaaaggggttttattgaatagtatactttaggaaaagaaagtataaatctgcaaaagctgatttctaaaggacatagtcttttttgttatgactgtaacaaaatactcaaggctgggatgatgcataaagataagaggtttactttggcttgtgatttcaaaagtct

SEQ ID NO: 31697 - DNA, 1432 bp, Mus musculus
gccttgctttctttcctccctaattccaaaaaccacaaaggtttccctgagtgcagagagatcagcccaccctgcagacccacagagaagattcagagtgtgtgtgagagtgagtgagtgtgcgtgcgtgcgtgcttgtatgtatgtttgtatatgtaggacaataagttccttctgacacaagggagacacgagaaggatagcctgacatcagatgacagactggaggactgtagcacatctctgggcgtttccctacccagagaagagcccccccctttgatacaaatcggttggattttcatatgcttcaaaggcttgatctgtgagtcactctccagtttgggacatgggtctgtctgtggctttgagaaaaggtactttcaaaagagggctttccagagcacagctcacagccagctgttaggaccccacccttctccctttattgtggaggtgactcacagcagactgacagtggtcaggctgagctttctgctaaggtggtgaggtcgccaacactggcatgtctcggtagtggtttgggcaaatttctgcaggtcccttccccccaaccccgtctctgatgaataaagaccatgagtggagttccttaactcaggcttttgtgagtagtttactaaggaactgaaaatggtcccctttgtccaagctgagctgctagggaatcaaggtgaactagacccgtcctcaggcctctggcacctgtttctagctctcacttctacggcatgctgtccaaggaaccaaaggaggctctcggagatgcccccaaacgtcccaaagtacacagagctaagtaatcaattgctacacttattgcacagctagacacggatttcaagtgtatcctaaagctttgaaccaagcttagcttctcaaaggcctagcagagctttggcaccccaagatcctttctgtaggctatttcctcttgcccagcagtggatggagcgtccttgctaaaaagggttccatctcctttaaggacgttttatttttgatccagagtccttgtttccttgacttgctccaccagccctgcaccagctttccaaatgcactctgcttgtgttgaaattctcccatttttatttgggcataaaagttgttgcctttatttgtaaagctgttataaatatatattatataaatatatgacaaaggaaaatgtttcagatgtctatttgtataattacttgatctacacagtgaggaaaaaaatgaatgtatttctgtttttgaagagaataatttttttctctagggagaggcgaggttacagtgtttatattttggaaccttcctgaaggtgtgaaattgtaaatatttttatctaagtaaatgttaagcagttgttttaaaaatacttaataaaataagcttttttcctgtggaagagaaatggtct

SEQ ID NO: 31698 - DNA, 3024 bp, Mus musculus
gcaacaacaacaaggttttgaagccctggtctaggtgtcaccgtgagtagcaaccccattttccttgtgccttagctgcatctcatcagtccctcctctacagtaaggcatgccttctaagacttcatgtttttgtcctttcatttgaaagccagtctctgagtggcatcaaagcccaagtgattattttatcttttattacaagtctcttggtcagagagtttctttcctatgtgccttcctggcagtttgtgattagttcctgacttgacaggtgatatgtacaaagaaaggaacccagttcaccgtcgataactgccctcttgaagctcaggcaatgcagtacacatgcagaagagacctagcaccttaagtatttaatgtatcatgtgtttatttcttaatgctgatttcctaactctcactttccccatctatagatatcacacttcagtggcttattcaacactcaaaatcccggagaagctgagacctcttcttcgtcttccagtccccttggctctaaccttagaactcctgtcgttcctctgaagtacttcccaggacatggtccttcctaaacccaagaaattgcctttttcagagtttatttctcatgtgcactgctgaagatgtgtattcctatccttcatagcaaatcagctggagttgtcatgataaaagtcagcacacactaaaaggcttcatatacgtgtctagtgtgttgaggcctctttcctttctattttaaacacccacatttttgaccatcttaattaagaaaattgcatattaccattctggtctttctgggccagatttttgtattggttttcagtaaatgtctacctatttcattacagagtccagtagcttctactactggtatggacttgatgcagcatggaatttctagtgccacccacagtatttagaaaacctttaagcctgactgatgtgggatacggacatactgtttatcccatctcacacatgcatgtgaaatgtagacttacactgtaggaataattggtctgtcagagttaacagaggcaccaggtcagaatagtagcttccttacactggagatttcctacctggtgaatttttaaaaaccttctgctttctgaaactcctttgtcagcagatagcgtctggggaggtgggaggagtcacagcatgctcttttctatctgtccagatcattaggtttttttttcccccttttaacacacttttttaaagggatgggaattgaagttttttttttttttctcaaaagctttcatgaatttagagcattctagctaatgtaataaaaccctttaagaatgtccgacttcatctgaatccacgtctgttctttgtctccaggcacccaccctgtgctgctgcatgccacccttaattcctgactttttatatctagtcatgaaggtgactttcagcacaaaggacacttataaacaaattcttatttttttcttaccaatgtaaggtttggcactcttttcactggtgccactagacttattgattgtgacaactctagacctgcctgctttatctaatgtaatcatgcgcaatgtctacaggttgtttgatgatcggccacacagagaacggaggaaccaatgctgtttattgtttgctatgatacagagctgtacaaaaacttacaatgaacatattttgtagcttagtgatctccacgtacataaagggacatattaatactggttgacttgtaaattgatactcatgccgatgtagtagatagaccccatgctcccacctgcttatgtgttgctcacactgtgtgtgatttgtctcttatgttaagcagcacctatgtcaacagtacatattcagatgtgttgagcactccaggtgtagtcagtaggaagttcttttactgagtaccgttttaatttatagactgccacggccttaagaacattctggacagataactgcaccatgttgcacaggcactacttgttctctccattctcattcttactgagtaggacctgggctggaaagttctcttcttattcacggaggcaggttgcactcttcctgaattggatgggtggtttgaataaagggatatttaaactttgctcctgtagcccgacatgactaatggtcactgtgaaccatttcaaagaatgtggcaacttgcttatgcctaaaaggagggattggaaccagaatgtttaactaagcggggactgcataagttcttgttaattgacctatggaaaccttaatttgtttatgtgtctttccattgctttccagcatttcaggacatctaaaagctactaccaacattttcctgtgcataacctctgcatgtgaaaacctaacagttactgaactttgtaaatacgtaaattttttatttaggtgtggatgcattttttgtctgtttactgctcctctcagctttattcaataaacttgcattttgagggttgcattgacaattttaccttaaaatgtatcatgatgaaaagacgcagacctttggactcgagtgggaagataatcactctggaaagggctccacagactgtgctggaaggtggctgcctcagctggccgaggtgttgatgggatgaactagaaataaacttttacagtgtctacagagttggtatcatggtcccctcccttctctcttgctcggagaggattctgttacatatacattgagtggcacttggtgggccggtcctgaggagtgagtctagtcttcaccaatgctggccaggcactctaatgtcaccgaacacacactctcttcttagccccaagtctaggactttttaaaatggtggaggcaagtaaagagttttatcatccagtttctttaaaaaaagttacactgccagaaactgaacctaggctcttgcgtagtctagagaagccctctaccactgagctacatcccagccttaaaaaaaaaaaaaaaaaaaaatcaaagccataattaagaaatttcaaacatgtcta

SEQ ID NO: 31699 - DNA, 1180 bp, Mus musculus
gccattagctgagtgtcatactcatggtgtaacttctcagcacggtgaatttttaagttttcctataattttctctctctttctttttttttttttttttttttttttaattgagatcttgctatgagctgaggctgtccttgaacttgctctgtagtcaggctggcctccaacttatgacccttctgccttggcctctcaagtgctggggtagctgtttaacacccttagggtttccacaccacctttgattcttcccactgcaggtgaatctgaagacaggtgttcctcctgacagcaataatgagacctgcacagcgggggccggttctctcctggtggaatttgggattctgagccgactgctgggggattccacttttgagtgggttgccagacgagctgtgaaagccctctggaacttgcggagcaacgatacaggattattaggtgggagtccccctctgctgtcagttggttcctacagcctttggtcccctttcctcctccttccttgaagctctgcacaatacttcgtcttccctgaaccactggatctgaaaatccaacagccattggtgcatagtgagttcagcttcttcacatagccttttgcttagtgtgaagttttaggggttgatggaagataataatagttcagctgttaagagcccctcagtttggatcccttggtatattccactggaaattattgttaatagaaatgccataaaaagaactgtctcagaggcaaactttattgctttcaatataaggttctaaaaatacaggaatttaccatttccttaaaaaaaaagaaaagaaaaaacaatccagtagtgcaagcctagatgaaacatatattagattttttcccccttgagaatatttagccaagatatttaaaactcattatagaaggttttaagcattagtagtagacataataacaaataatatcctctatgtattcatcatggtgttcatctttggtagctactcatattttggtaactcagtgttgttttaagatgggtttttaacatcataaaattgtcttattgggacatattttctttttggcatctggaagtaacttggttgtttggggaccatattgggttatttataataggtttttaaaagtaatttctgtcttctgaaattcatctgcaaactt

SEQ ID NO: 31700 - DNA, 1163 bp, Mus musculus
ccctacgtgagtcaaggccagcacagaccagttctgctccatgtcactgttctgaaatccaaatgtgaaagtgctttctgtaaatgtagtgaagttttgatagtccacagaggatatgtttagaagtaggttcttgccaggcggtggtggcacacgcctttaatcccagcactcgggaggcagaggcaggcagatttctgagtttgaggccagcctggtctacaaagtgagtcccaggacagccagggctacacagagaaaccttgtcttgaaaaaccaaaaaaaaaaaaaaaaaaaaaaaaaaaaaaagaagtcggttcttgtatagacacctacaggcagtctgactgccaaagacttaagggaggagttgggaaaaagttagcgttgattttgcttcagtgacacacagggaggtagaccaccagagggacagagtgaccttccctttcacctttgcctgcgctctctggatccacagccgggaagcctgcaatgaaggagaaggagacccaccgctctacgtcaacgtgaacatgttcagtgggcagctcatgaacacctggattgactcgctgcaggctttcttccctggactgcaggtatctggcaggcttgtgttgagaagggctggggagacagctcagtgggtaagagtgttgctgtgtgaacctgcaggcctgagtttgaatcttcagcactcacctaaaaggacagtggtggcagcatggccctgtcattccagggctgggggagaggggtaggcagggcacagagatgagaagtttagtgggggttgactgttgctagcctagctccagggagtaagggggagagtgacagagcagcctacctcagccatagggataagcatgagtaaatgcacacgtgtacatatggagcgcgcgcgcgcacacacatacagaaacacacacacacacacacacacacacacacacacacacacacacacggaggggggagggagagggagggagggagagagagattattgggaaagctcctctcttctgttattcttagcattctctggctcctttggatttgggaggttactagcacatcttgatcgctctgtgaaattagtccctagccgtgcaaatctgcttgagagtttagattatttgcctgtattgtctttc

SEQ ID NO: 31701 - DNA, 2414 bp, Mus musculus
ataaatataattcagttccttggcatgtttagaaagggggtttcagtagtaactatcatcttttaaatacttactatgcaattggtcttatttatttgttaagaatattgaatgtttctggttttctttcttttgatttcacaagcattgttctatgtatccacagtgtctcgtctactgtatagaaaactttctttaagcagattatctgttttacatattttcgttaactccgtaaaagtattaaccacatgcatgcacaggcctgtgtgtgtacccccttttacctttgttccaggcacgttcacgtgcaactgtgaatgacccactagggacagtaaagacctatcaggaaagaaagcatgcccctcaggcttctctttaccatcttccccatctctccctctctctctctctctctctggttttggttttggttttgttttgttttgtttttttttggcaacagcggtgtatgttggcacccagcagttctctctcatctgggttctcatctgttgctcttgattaagcttgggttgcttcttgctcctgtgctcttggaatggtgatctgtgtctggaagtaccatggtgccttgagtgctaccagtgggtctcaggggtacaggcagacatgcaatgtattttattaagtcttaaaccctcttgacttttgggtaccagatttttcagctgttgacaaggctgagggtaaataagataatgcctgtaaatcttaccattgagtttctagactgctgagaccaaagccagtgatttgtggggctagatgaagaacactgtctactgccagacatataaagaacattattagagacaagttcgaagctgtcttgctttctgaatgtcagcaactgcaatgtatatcttacaatatatttgctgttccttccaacctgtgtgctgaaatatgggtagaaaatttctaactcactgctttggtccaggaatgtgaacagaagaatttcatggatgtttgtaaccatgcttgtgttcccaggagtagccagtagtgtccagtttggccaacatgtgaaaagttgcaaactacgtagcaggctgtcttatggttaggtatggtggagtcccattctacaaccaacaggcttgccttagctgctctaaatactgtgacagggtaactccattctcctggaagaggaggtgaccaaggaatgtttggtggctttcggattgctttggtagctgtggaaaccaggcttgtttcccagagcctcccttgagtttcttcctgctcttctactggagcgtactttttgtaattggatttctagttctgatgtctggactttccttgtcttggattgtagactctgcacatgacattcaaatacttttctgtgtgttgaagtgaaagcatgtgagggtagtgcctgcccagaggagtatctgagagcccatgttttactggtttcaataaatgcagtcgtctctatcctgtcttcccttctctctcaaggaaaatatccctcttagcatctccccaccagctcagtgaatgagtgtccactgcagttcttcactttggatcctgtagactctgcactggacatcccttttcttctgagctctgagatcttgttctcttgatgtggacaaacatagtgctggtcagagggtagggctgggccacctcaggcgcacgcgcagagtggccgagcagggacttgggaagaaggtgctgatctttgcctttctgttcctggctgtccagcacctgctctagtgcctcttccctgcaaggcagggaccccgtgtgaatcagagccggtgatgcgtgtgggccttgtggccgctactcagcggggctcagggttaaggtccctcttgagtttggatgtgaatatcctaaagctatcaagtacctgtgaaactctgcttcactgctcttctccttctgagaggtaaacaaatcatatttttaagggtattttgttttagtgttaaatagcatcccacgagctgcatttttatttattacatacacaaaaagtaaatgtgtttctataaaatacaaagtctagagttggaaactctgggaaaacttgctgagatgcacaaatgtttctctctgtgatgtgcaatatgcttggccgccatagatggtacttcatgtttaatctgtaaataagaactgtatttaaattaaatgggaaatttttgtaaaaggaccaaatgttcttttataagcatactaaggaatatcttgttctttgaaatttattaggatttttatgaataatttttattaaaagattctctttttgagttgtcactgtgtttctcctttgcatgctctgcaagaccagggaaaatcatttggagaaattctaagcttcgatgactaaaatcttcagctttttggttttg

SEQ ID NO: 31702 - DNA, 1760 bp, Mus musculus
cttaggagagaaccctaagataggaagcgttgacttctgtgaaggagtgctgacttccatggagatgccactcagcagtgaaaagctcttttgctttcgggttggctcacaatgtctgtaacttcagctctgggggatctgacgcccttttctgacttcccttagcatccacactagtgtgcatgtaagcacatacatgcacaaactcgctcatatgcacacaaaagttaattagattttaaagatgctctactgttttaaggtgttggtgaagtgccatggctttataaccaccttcaaaacctcactcttccaagttcaaagacaacaaaagaagccaggaatcctgactatggtgtctatccatttttcccaggcttctttgcctcaataattatgagcatacatgtctttggccagacagtgttgagtgctatggagcagacctttgtgaagacccagagaacgtcagggttgagagccagggactgtgcgtccacattgtgtgaggtaaactaggattattttaaattataggcacacatgtgcatctgtacatgtgagcacaggtacctgtggggtccagaggctgtggatttctcttggagctggagttgcaggcagttgtgagcagcccaatgtgggtgcttcattgtgttgaccaagctggtcttgaactacagagatccgttgatcctacctcccctttgctgggactaaagacagtcaagcactaccatgcattcctgtttgtgccacgttgttgttgttattattacaatttctaacagtttttaaaaccagacttcccattgtctgataaccccatcaccttcccactaaacccttcctcccaagcccctgtcttacttcagtgtatatgtgtcactgaacttatgtatggttgctttcatgaggatggtgtgtgtgtgtgtgtgtgtgtgtgtgtgtgtgtgtgtgagagagagagagagagagagagagagagagagagtacatgcacacgtgcatatgttagtccttctgggagtaagcccagggctttaagaagtattctgccactgagctatcacaagtaactttttgtatttttgagatccttaagactgcaggagtacaccatcatacctgactttaaacaggaagtgtaggaggggttgaagaaatatgtgggttagcctcagaaaggcctgactggaaattttgttttgtcccttctgagtgtgtggcttggatccagctgttcccttcatgtagtttcttgttcatagcacctttcctcccagggctgtcaggagggcagggtgaacttcagtgccatcttgtcagaatgtgctaatagcagcatctaaaatctttacctgtgtccttctgccatgtggtcagggaagtgcactataccttctgtcttagaatatgaggcctgagtggcgacaggtggttactgtgccctcatgccaccagcctttgtgggacccacttttcatatggaacttgtacacagatttgcagccttaccacactcacacctcagtgatgggcataagttctagttctctcctgaatgcgctgggaaaatgatcttccttgtaatcaacacttgaaccagtttgtaccaaatgacctcaagttcttttgggaaccattgttaattgtctgtctctatagtctcaggatggagagaagcgagatgaatgttcctagaggacacagttaacaggtctcatcagggatgccttcccagagggttgggagaagga

SEQ ID NO: 31703 - DNA, 1149 bp, Mus musculus
gaagagggaccagaaagcgctcctgaaagctatgttcaacaacaccagccctatcacaggcgaaggttcccaccttactacctgctgagaccacagtattccaacctccctgttcaaggagaaatgatggagggtgctgacaaccagggtgcaggagagcaagttagaccagtgagacagaatatgtattggggttacagaccacgattccgaaggggccctcctcgccaaaggcagcctaaagaggatgacaatgaagaggacaaagaaaatcaaggagatgataacccaaagtcagcagccacttcaacttcggagagagaaccctaaaccacaaggtggcaaagagacaaaagcagccgatccaccctctgagaattcctctgctcctggggctgagcagggcgtggctgagtaaatgcgtgcttaccatctctactatcatccggtttggtcatccaacaagaagaaatgaatatgaaattccagcaataagaaatgaacaaggattggagctgaagaccttaagtgcttgctttttgcctactgaccagataacattagaactatctgcattatctatgcagttttaattatttttacctaaagatgtctctttttgctaatgacaaatgtgtcttttaagaaaaaaaaaggcctggtttttctcaatagacctttaatggttttaaaattgtttcatatctggtcaagttgagatttttaagaacttcatttttaatttgtaataaagtttacaacttgacttttttcaaaaatgtcaacaaaaacgtctcatgataagtagcctctagaactatctatcttctgtactatccagagcggaatccaagacccctggtgtcctgacatctcagtcttcagggatgtcgctggggcctccagaatgttgtgaggtaagcctaccagagactaccacacagacactcttaaaaccaaaatgaaagtctttattgctgactggcaggtgcagaggaacttgctcaaatcatgcatcattgagccttacagccctttgtgttttctgaaaagacaaacaaataatacaccatggttgtcacatatcagttaacaagaagcataactaaagaagcaaaaaaagaacaaaaaagccaacaaacaaagtta

SEQ ID NO: 31704 - DNA, 1149 bp, Mus musculus
caatatccaggacagtagggttcctttagagcccagcaactgtaccacagcaggtaccaagtattgcagcataggtgaaacacaagacaaaaaccttaaaatagcctcagaaatcatgccatggatgattaaagaggaaaaagatatacccttaaagaaatctatgggcttcctctttccagacagcgctgagcgctgagcatcttttgggaaaactggcacaagcgccgcaagaccggcggtaggagaaaaccctaccacaagaagcagaagtgtgagctgggacagcctgctgccaacattaacattggacctcagtgcttacacatagtccaactttgaggaggcgataaaagtactgtgccctgaggttgaatgtggggaactttttctggggctctgattgttgtactcgaaaaacaagaatcgttgatgttgtctacagtgcattcaataatgagcttgcctgcagtaagatgctggtgaagaacggcgttgtgcttattgacagcacactgtacagacagtggttcgagtcccattgtgcactgtccctgggccgcaagaagggggccaagctgactcctgaggaagaagagattttgaacgaaaaaacaatcaaaaaaattcaaaagaaatctgacgaaaggaagaagaatgccaaaaatcagcagtcttctggaggagcagttccagcagggcgagcttcttgtctacattgctgcaagaccaggccggtgtgacagagcagacggctatgtgctcgaaggcaaggaggtctactgcagaagatcaaagctctgaaaggcaaataaatctcattcatagtgtaataaaggtgtttgctgttctatatgtaaacaaacaaacaaacaaacaaacacaaaacaatacaacaaaaatctatgaaaatagaaacaggggaaggaaatggataaaagagttcaagacttgaaaatggaaatagaataaataaaaagctcaacctgagggaaacctggaaacgaaaaattttaaagttgagcaggaacctcagaagccagccccaccaacagaatataaggtatggaagaaagaatatcaggatttaagacatgttagaagaaatggataccttgttcaaagaaaagtgaaatatgaaaaacagtc

SEQ ID NO: 31705 - DNA, 1167 bp, Mus musculus
cttggttgctctcctggggtgttaacttccttttctaggtgacagattgcttcgcataataggaataataatgtatctgagaacttactgtgtgccagacgtgtataggcacatatgtagaccactgcatccctttagccaccctgtgagaaacacatcaatctgcataaagtattgaaacaggaatatacatctcatgatgaagaatgaagagattatacctgtcaatcaagacagtagtcaataaatcatatatcatagtttatactcctttgaaaagctacatataatcactaagggtttttttaaaaataatttaaaatgtgagttacagcttgcagtatctaatatctaagctgtagctttcagaatacttggagtaactactgaatgggcattaagttttattttgctgcctataggaaaacaatactttattacgttgtcacccttcctacagagtcacttgttaaatgccagtgactgacaaaactaactagttactgacaaaactaactagtacttgctgctgcctgtttatactctgcctgtaggacttgctctgtgtactaaccctcattaacctaggtaggcacgctgcggtttctgtggactcaactgccgttcatgaaatggaaacacatactatgtccggcgcttctgtaaaggcagtaaatgcaggtgttgaaatccataattggccatgttcacgtgatcgcatgagcagtctcgttgattgtaaagctaacaccagaagcctcgtatacgccgcaccatgaggttccgaagcagtagcagggattgtggggatgctgactataaagcattggcatgcaggctgtggagagatgacactggacattggtgttgcatgtgtttcataccaggcgaggacagctcctgtacagctacttctgtacagtgtttatatgatttatctttttatttatgaaaataaaagccattttacttacaaaaaaaaaaaaaggatcccctcaagctgttttgctgttgtggtttttcatttggttgcttgttggttggttggttggttggttttggtctgttttttaagacagggctgtgttcttcttgctatcctggaattcactatgtagatcaggctagcctcatactcatagatgtctgcctgcctctcaagtgctg

SEQ ID NO: 31706 - DNA, 1176 bp, Mus musculus
ctttgagtaactaacatatggccagggtttcagaacaggaagcaccaaagtataagactccgtacaagtctgctctatgggtgttaaaataatgaatattaagggacaggttgtcatgcccaggtggggattcgagcaagtacataaggtttgctgtgtgcctctgttaactgtcaaagtggaggaccagaaactgaagtggagcgttctgtgtagttacaagaaaaatcccaaagacttggtgtttactctgaccgtttttatattgaggtccctgacaggcacaactagagaactcttgttgtgcacccaggctttgggtagcagctgggtgcacaacccctgaatacattgacattctgtcgctgttgtcattctgcactaaccaaagaaacccagctggtgtgaatgccaggtgaagaggcggcaagcaaggtgccattctgctgctgtcaatgtctctgcctgaatgaaaaccctgacagagatcgggattttattgtgtgtatgtgtgtgcctggcttctaactttggaactcgcaatcatccatttgaactcgtaggggtccacatagcattgttctcttctgtttggatcacgcaagtaccacatcgtgaatcttttatgtagcacctggatttgagcagccttaatttatatggctgttaatgtcttctctgctaaatgtagttttaggccatctgaaatttattgctaagtagagagccttttaaacgagtaattaattacatttcagtgcatgctgggaagcactgcttcactatgctgcagcctcagcccctggggcatttcagtgttaactatttgaatcctaagactatctgcaaatgttttaattttgagcataataaacagaatgtttctgaaagtgtgaatgtgaagagccatttgatttctgatttctgcttctactacttgacagtgatttttacctgtgttataaacttgagaggatttaatcccagcacttgagaggcaggcagacatctatgagtatgaggctagcctgatctacatagtgaattccaggatagcaagaagaacacagccctgtcttaaaaaacagaccaaaaccaaccaaccaaccaaccaacaagcaaccaaatgaaaaaccacaacagcaaaacagcttgaggggatcctttttttttttt

SEQ ID NO: 31707 - DNA, 1140 bp, Mus musculus
tcttgtgttctaggagataacagattaagggagtgggaccttggggcaagattctacccagcttaattagatccaggcatggtgctacacacctttaatcccatgagacaggcatgctgatctctctgcattcaaggtcaatctacagagctagaaccaggatagccaagcttaggcagtgaaggatttagaaaacataaagctagtgataatgtaatagtacaaggggatcatgttctagttcctgtaagcagcagaactccacagcttcagccatgtggctctggctctagagttaagaatggaaggaactactgggaaaattgatgctggttagctggagctaaggaattagcagtgattaagaagagaccaacatcactgaggtgaaatcttctggaaattgttttctgggagcacaaagaagctgtgttccagagatacccaaggttgtacctcatgctgcggctggacttggtaatgtgtaagagtcactcaggtggtactgcatgtgaaggcatgaaggtgtcatgaagaacagatgaggcttggcactgtgagaggtcatagaaggccattggagaaggtgtagcctcagctgtagttgatgggccaggactgaaggggtcaggcaaaggatttgatgcttggcaccatgaagagagcccatgagaggatattggtgaagcctagttggagtggaacaccccagtgtattggagatgtcagtaccatgggatgatcaccaagatcagcagccatagtggagtggatcaacctgagcttagagtgctacagagggcagagctggagaagtaatgccagcccttaggaggagcccaaaatatcaagtggaatcccagacactgaaacaagaagctgtaacattgaaattgccttggagactcaaagacgttaaagatgtcagagccatgggatacatgctgaggaaagctgctaacatggagtggaaccagcccaggagaaagcagtttgttgcagtcaacaaagatgaaaaaggagtggagatctgaagattgctttaacatcagcaatggagatgcagagtttagtgcttgcccagctagtttcctgtctttctttgaggattacagttaagtgattggatgaatctcagaa

SEQ ID NO: 31708 - DNA, 1156 bp, Mus musculus
aaatgctgcaatggaagatatctggataacaccaaagaagacagagatgatggaatagagaaatgacaacaaagaaagcgccacacacactctgctttgtgggtgactgcaggcatgggttatacaaccacaccagagtcagacactgtagaacagattggaagagatagatactgtgcacctttgctttccttacaaggaacgattttataattctaagacaccgatacattgaaaacaaaagaacagaaaaagatatgccatagccatttcaaacagggctaacatgttactgtcagacaaggagacttaaaggtaaaaactgtaatagagccaaagacatttataatgcttgaaaaggtcaatctatcaagaagacaaaatgattgagaacatgtatacatgtaacaagagccgcagactacacgaggcaaaagatgatggcaaggaaaaccaccacagacaacagggagaaaaatttcaccatcaccaccactactcctcaaacaatcaaaaagcaagaacctattgccgtggactctgtcgtgtcctcatcaactctttgtggagagagggccatgggctgcagtgagctgcagatctgcgtgctgatgctgctccactctctagtgtcctcctgccttccccagaacagtgtggtaaagcaggaaaacttggcagttctctggctctgtgagtctttcatggcctccaggtgccagctagcgcctctccgctcttctaaagtgcacttctgtcaggagtggacttcagacacagacctccctggatctcagtctcttccttttgtcttgtttagttttgcctttcattttctaggtactgttctcaaagtacagtttttagttttgatgaaatgtataatgtctgttttattatttttgtccaacctaggaaaccttttcccaaccccaaatcaccaagattttttttctttttgttttttatggcttagaagtattaggttttgcgttaaggtttgtaagctatttcaggtacatttttaagagtgtcataaggtgtggagatgaccgtggttcaatacttctttttggcatgaggctttcccattgctacagcactaggtattgaagagatgacccatgtctgtttcatatgtgtgtgtatttgtttc

SEQ ID NO: 31709 - DNA, 1234 bp, Mus musculus
ttttgaaatgattgcaattgtgaagaccactttgaaaactgcttattatgcatctaattacccttagagctgaacctctagtcagaatacaccacacctttgtgtgggtgtgagtatgcatgctcatggtttggggtacatgtgtatgttagcatgtgtgtgaatgccagaggtcaaccctgggtatcacactcaggagtctgttctacctcgttctttgaggcagagtctctcacttgggcctgcctggccttggtcattagttaggcaagctagctagcaagctctaaggatgcctctgtttctatctccccaactttttatatggatgttagagaccaaactcatgcatatgaaacaagtgttagagaccaaactcatgcatatgaaactcatgcatatgaaacaagtactccattgacttagctgttttcccatccttttatcttaatgtctcaactattcttctagtcagtcaggtattgggaaggaaacttactgttttatctgagaatgcttgataattcacagtaatcctaagatcttttttgtttgtttgtcatagttctgctcacaaaaggaagccgttgcccaaaactgtatataacttgctctctgatcgtgatttaaagaaaaagctgaaacagtatggcttatctgttcaaggaaacaaacagcagcttattaaaaggcatcaggagtttgtgcacatgtataatgcccagtgcgatgctttgcatcctaaatcaggtaaagtaatacccctgtgctcatctctgcataaagtaagtatgtagctcagagattataaaccacagaaagaattttagtaagtacttttttggtagtaggtaagataagcaaatgaattttaagagctacctgtagaacactgtgctaaggcagtcttcctctcaggctgtctcactgccccaggtcccttctctgagaatcactgctggcaattttgagtctctttccagagactgcaaggtggtaaagagtgatgtagcgtcttacactcctcctcctttaatctgagtgactgtgagcgaatcacatctctgtccttcagttttctcacctgtagcttgaggattataatcctccatgctgtattctttcgaggtgacagaacacaccgagcacagtaccttacaagtcgttagagctcagtggatgcttctactgtgattattatacataaacagacatccttagtcggtactgatgc

SEQ ID NO: 31710 - DNA, 3424 bp, Mus musculus
ctcacacacacacacacacacacacacacacacacacacacacacacactggctggttctctgcctacctccaagttttacaatccacaatctggaatctgtgtcacagcccccacaggagccctgtgacccatagctacaccactcctgtcacctacagatgctttgaagtgccatccttggcatttcttccctttgggtttacttccaccatttcttgggtcctccattgaaaggaatcttgaccgcttccccagggagggacctagtgagtcattggtccttgagtgtggggagaatcacccattctgccttgcctgtacgatcagcactgagtacactgtggaatcaagaatgggctccaaatgagaatgccaggaagatgcccgaaccatcaagcctccccttccctctcaactcctgctgtgatgggccctctgttttttgagcacataaagatatctccattttatagttgaagacagtaaggcctgggggtgggaggactgggacctgcacaagatatgccagatggcctagtgggctgcattgggctcaggaagccctcatttccaggaatctgctatctctgctatgcatccgggagataagacttcttttttgtatcccagggctatttccagatttttaagtccactcacctcccaggcaaaaatgcaatattctctgcctggataccagatagaagcaaaattgagtttacaaatctattaccggacacacctattgccagttacgctgtgcagatttgtctctgggttgacttatttcattttccttactgcctctcccccaaatgtcccaagagcagagcctcagctgttttccttaagcatctatctttcccccattggcaagtggctgatgaattcacatttagggaagcacacacacagatggcagatgagtccccagctcttccaacccccaatctgagctttgatgcagaacaaatggaaaagcactgtccacccccatccccaacacacttcttcatctggtccccttgcatgtctcagccacccccaggtcccaactcagccccaactcagtcccatcggtgtctatctagtgtgagcatctcccttctgactcctgcctgtttttagtccactatatattgctgtatttgttaaatgctggaaagtaactgttaaaatgtgaaactgtaattttttaaaatgaaggctacaattacattatagccattgccactcaccaaatctttgcacctagtagatagatcgatgtaaaaacaaataccagaaacctaattgtacagtgattggggtggggggtgtagtaacatagttagtagtcctcaatatagccaagcgtacaaggggaagtggtgtctaccaatgttcatcaccattattgagagctgtactgatcagttagtttataacgggcatttaaaaaattttattttggcttcatggaatgatttcttaacctccaacttaccccgaggtcaagccttttgtctttatgtataactagtgttcagtctgttttaggaatgaaccagcaagatgttcatttaattaaaactgaccaaagacaattaattcctggtctagtttcctgggcaccgtgtggcccagttgccactaaagacctttctccgatcaatttgagaacaagccgagcttccaacccgactcaccctccctgccctccttctctttgtcctcgtcgagctgctctgagctgtgggatcctgtgaacaactgtcgtctttccttctcttcagtgctaacttctcaccttgaagcgccttttgagcccccccggacagagcacacaactggagggaattgtgggcgtgggaattaagacgagggagtcttttctctgaagtcactaaaccagggatcaggagggaaacggattcctaaggaacggaaaggtttatatccaatgaagaaatcaaatcggagcggaaagagacacagggaaatggagccatccgttggctactggctggaaccagcagttcagagatctgccttataaacactttagactggtgtgtggtacgcaaggggagctggtgggagagaagcctgtccagatgttcccttccttggcatctcctagagtgccttgttgggtgcatccctttcttattcaggaggcatggatgcagaggacatatcgtgacttggtacttggtcatcattgagtggccagcgcacatacatttggaacgagtgctggaaaactctccaaggactaacacaacagccctccctctcagcctttctgtttctaacttctcctcttccagatggttccacactagagcaaatgcctcattcttccgaaaaacccagaaaggggtggagtggggtgtcatttctagctgcggtagtgggtcctgtcgtactgggaggaaaaggtgtgacaggggaggaaaaggcagaaaggggtgaaccaaggcattgcttagctgattttctgctgtgcagagctaaggctgacagttcgtgttcacttccctgtggttctctggggtctcttctccactgagatgaattccaagtggagaattccacatactccaagctacccatgggaactgccagaagggacttcactgtcagtccgagacctcctgacctcttaaagttgatctgccagcatactgttgtcccatcctttgggactggccaaatggctattgcagtcctttgctgacaactcctttctgtgcaaactgtcccaggcaaatcacaaagctgttccttgaagtggaaccaccagattgcactttccttccctgatggatgtgggtcgaggctagctctgctgcccaggccctcgttccaggcagtgtgactgtttacatggtttggcaataggtttgcttctgattgcttcagagtggctggtctgttttgtttgctttgctttctttcttcccccaaattatgacaggaaaaacaaactgaaaccaccctaggaaattgctggttgcctgtccccatgtgatgctaactgttgccctcttctgggtatcatttctctaccttatgaccaaaatgcccgtcctatagagtgtctgattggatcctctgttgcgtattctgatggtgcctgctggtttgatgtggagctatcctgtgaaataaaacagcttaactttttctcaaacatagtctgtggttgtttacaagcataaggacacacccaggggagtggccttctcctccttcagtccactctgtctgtacacctcttccatcagactccctgaaaacactctagtgttgcaggatatccgatccctttgtgaacactgaggttgtgttctttactgaagagtgaagaactctgtttccagttgtggtgcagctcagcacttaccacccacctttaatccctctggctggaatac

SEQ ID NO: 31711 - DNA, 1354 bp, Mus musculus
gcagtgacacccacggagaagatgttccctaatagctcctcggacaagtctggcaccatgtgacctgcaggactggtgacactgccatggcccactgcagcacaccaaggcctagggtggccttagtggcttccactagcttcccagggatctcctggccttggagggcagatcctggaaggtcagcctgggagggtgtatgtctgtggagagcagaggcccaggcgttagctgcaactcccgctcagccatgtgaatgccacagacctcttgtaggcaaacagacatgccaaggaatgctggagcaagatcagtcccaaggacagtgtttcctaagattgaggcagatgcttaccagcttctcatattgtcactggaaaattattctctcgatattctctacatacgtatatatgtgtatgtatataaatacatgcatatatacgcatatgtgtacgtatgtgtctgtaggtgtgtgtatatatatatatttatgcatctatatacatatactagagagctggacatacacacatgctaactgtatatagacgctccttttttttttctttttatgaaacttagatttacctcagacccatgccaccaaacatctcccactcttacttggtgggatttgcagggacttctctgggagaacttagaggccccacagtaactgcgaacgaagcaatataccactaacctgcagagacacaaaaccagaaacagtctccagctgtctccagaagtcgtggccttccagaacagtctgtctgcccctcaaggaagggtggggcaggcagtacccccaagcaggctgcccctaaaggtggggaacccttcatagaaaacccttcacccacccccctagagaccctgccctgtcacccggaggccaaaggtcaactgtacccccagaaggcacaggggaagttggtgtgaagacccttgagtttgtatactgactcaggatggtgagatgctgtggttgggggtgtgggggagaacaggaggaaacaaacaaaacccaaaacagtagtatggagtagttcaaaccttacacgtgctgtagggacaaatctgtgctgactgtacaagttttacttctctcatcttcaaaatatttaatggttttttttttcctcctcgttctactgattatgctttgtcagatttggaactaaatgggcaaggaggcattcagtcacatcatgtctgtttgagagcagtccacactctgttccccgctggagcctccagtgcccagccatcccttggcctccatcctaggaggactgtgctaggaagcaccgtaggctgggatgctatgaaaacggcagtgctcctcacc

SEQ ID NO: 31712 - DNA, 1217 bp, Mus musculus
ccatgagcttgaatgtactctgccctaattttcattcaccatgtggaagtctaagagccattgaaaggctgattgtgaggctcagtgacagagttccttcctagtgtgtgggaggctctgggttccatccccagcatgacaaaggaaaaaaagaaagagagaaggagaagagagtcacagaaagtattgtgggtgaacagagatgggactctagtgctgcgtgcaggcagggtgggggtcttatgtgtaaagtggaccagagagaaaagagagcccatgggaaagtgaagatagagtatatgctggcatgcagaaggaacagagatctcctctctctctctctctctctctctctctctctctcacacacacacacacacacacacacacatacacagagagagagagagagagagagagaggatacagggtctcagactagccttaaattcctgttatcctacctccacctcccaaatgcttggattataggtgtgcattaccacacctggccaaactggcttcagtaattatgcaacagaaaacaaggatctggcctgccagctccctatggacattttagatttgtttgtttatttactttgtgtgtgtgtgtgtgtgtgaaataagttatcattatgtaacccagactggtcacaaactcacagtcttcctaccctgggctctagaatgctgaggttgcaggtctgtgccaccgagcctagtactcagtggacattctgagaaattgcatggcttgcctaagatcaaggagtctgagcctggcgcgcaggggccctgagccccagcccatgtgttcatcaagcctgccgcccgtgattcctcactgaagctaaggctgcatgagtcaccggccacccctaagacctcacagatgctctttctcttgattttcttctagaagtggagcagattgaggccatcgccaagtttgactatgtggggcggtcccctcgtgaactatccttcaaaaaaggggcctcactactcctgtatcaccgtgcctcagaggactggtgggagggccgccacaacggtgtagatggactcatccctcatcagtacatagttgtacaggacatgtgagtgggaactggggccttctgtgaagaatgagggaatagattagtgatgtctggaatgggcagtggaaggggaatatatgtacaggacatgagtgtgataactggggcctt

SEQ ID NO: 31713 - DNA, 1221 bp, Mus musculus
ttaaagccgaatggaacaaacaaaaacatggggaaatgtgtgctaacgcagatgtcaaatgaccccaggtggctctggtttgtgccagcccgaggcctataaatacacggatgggctcccatctctctcctgaagcagcaagccctggggccaggagccagcctgtgatattccataatgccccagttgtccttcttagggcatcagttgggcgaatgtgacctgtggagaccaacttgtctcagctgacatcatagtgaagcctgcacccacttcctgcccaatgatctgtttggtttcccagtctgtcctcccctcagtgctacttcctgttacaggtgaccaggacattttattccttattctgcagccttcagtggtgttgaggaaatcaccaagccccatggggcattttgatcaatatgactttgtattggcaacatttccagattcttttattagtttaggatgcttccaaatctagttctgttatctgtctgtctgtctgtctatctatggagtgagggtggtgtggtgttgtgtttcaagacagggtttctctgtgtagccctgactgccctggaacttgctctgtagacctggcctcggtctcccagagatccaccttcctctgtctcctgaatgctgggactaaaggtgtgcactttggtgacatgtaaacatttaaaaatggctatggggattatgactgttctgttggacctagctcctgtcttgaactctagactgcagaagtgtgtgtgggtgctgggggaactggatatgaaccctaggttttccagaaatgtatctgggataagtcagcttctctcctttcaccttgcttggtcagagtaaactgatagtgtggataggtcagagatggataggtctgagagagatgggcagctgatggagtgggtagatctgagatgaggagcagtgaaggaggttacctgtctagagcttgtcactcatgccctactgacccagatacacttctctccaggaagacactgaaagttgaaacaaactcggtatggtgatatatgcctgtaatcccagcactcaggaggtagaggcaggaggagcagaagttcaaggccagcctctagtacacagagagcttgagacatggtctcctgtaatctgggccagcctcaacataccaacatacctggctctcctccacttctccctcctccttctcttcttcctctt

SEQ ID NO: 31714 - DNA, 1098 bp, Mus musculus
aaggaccagagttgtctacaaggaaagtaggcacttatttgttcagttacaatggtgagaaacaaaaggctttcattctccatcatttgcaggaagaagttctaagagactttgaagaactggctggaaaactcccatggtcagaccctttaaaagtctggcaaattaacaccactttcaagaagaagaaagcaaagcgcagaaaggcaaatcagagtgcaggtaaagagaaggctgactgtggacaaggagacaaagcagatgagaaagatggtaagaaaaagcatgccagcagcacttcagattcacatatcttggactattatgaaaatccagccatcaaagaagagatatcaaccttagtaggtgatgtcttgtcgtcttgcaaagatgaaactggtcaaagcttaagagaagaaactgaaccacaggtacagaagtttagagtcacctgcaacagagcaggagagaaacattgctttacctccaatgaggctgcgagagattttgggggtgctattcaagagtactttaagtggaaggctgatatgaccaactttgatgtagaggtgggtattagcttttattgatgatgaaaaagatctgtaatgtggctggggagatgggtcagtgggtaaagtatttgctgagcaagcttgagtacttgagttcagattcctagaatccacataaaagccagagtaaatgtatgaatgttaatcctagcactgatagttagagacaagtagtgtcctggagcagacaagctgaaacggcaagacccaggttcagtgagagactgtttcaaaaataaagtagaatggtagaaagacaatgtaaacttctgtcttttgtacagtcacccacaaaagaaaaaaaaggttctcatacatttgtaaaatttccagacagctagcacaagggccattgaacagtggccgtaaagctagaaggatgttaggaatagcatgacttgtggagatagatggataggtattgattgaaatttttactcagtaactctctagacttggacaagattgtctctttgagcctctgtttcaaatggagccaataatagtgtgtacctttaaggtc

SEQ ID NO: 31715 - DNA, 1140 bp, Mus musculus
ttttttttttaaaaaatgggttatataataaacctcataaaatagttatgaggagtgaggtggactaatattaaatgagtccctcccctataaaagagctattaaggctttttgtcttatacttaactttttttttaaatgtggtatctttagaaccaagggtcttagagttttagtatacagaaactgttgcatcgcttaatcagattttctagtttcaaatccagagaatccaaattcttcacagccaaagtcaaattaagaatttctgacttttaatgttaatttgcttactgtgaatataaaaatgatagcttttcctgaggcagggtctcactatgtatctctgcctgatctgcaacaagatatgtagactaaagttctgcctgcttttgtctcctgaatactaaggttaaaatgtagtaatacttttggaacttgcaggtcagattcttttataggggacacactaagggagcttgggtgatagttggtaaaatgtgtttcaagtgatgaaaacttgaattattatcaccgcaacctactttttaaaaaaaaaagccaggcctgttagagcatgcttaagggatccctaggacttgctgagcacacaagagtagttacttggcaggctcctggtgagagcatatttcaaaaaacaaggcagacaaccaagaaactacagttaaggttacctgtctttaaaccatctgcatatacacagggatattaaaatattccaaataatatttcattcaagttttcccccatcaaattgggacatggatttctccggtgaataggcagagttggaaactaaacaaatgttggttttgtgatttgtgaaattgttttcaagtgatagttaaagcccatgagatacagaacaaagctgctatttcgaggtctcttggtttatactcagaagcacttctttgggtttccctgcactatcctgatcatgtgctaggcctaccttaggctgattgttgttcaaataaacttaagtttcctgtcaggtgatgtcatatgatttcatatatcaaggcaaaacatgttatatatgttaaacatttgtacttaatgtgaaagttaggtctttgtgggtttgatttttaattttcaaaacctgagctaaat

SEQ ID NO: 31716 - DNA, 1155 bp, Mus musculus
tttctgtccctgagccccccacctcccctgttcttgcggccttgtgacaactctggtcgctcgtgggggcccagtcctcccctccataatcttcctgaacgcctctcctctggttttccagttcctatctcagatggctgctgcttttcccacaccaaagacattaccttcgccacccccacctcacattcttggactccctgtggcgtatgccccagtatccttgcgatatccctgttgaatttgtagggttctagcctggaattgagccagattttgtcgttttccctgcctagggcgtggagagcgatcttttaagaacgactctaaagaagagggggagggatatgcccctatgaatccgtgcaagccaagatcctaggtaaatggtagtgggcaaaagccctggttttagtaggtaatcgctcagaaggaaagttttaactcctgggaaagccccttctatgctaatttattctatcgggcgcctttgcctttctcattcttaggaataaggatctttctcctgtgtactgatgctgcagcccgccctgctggcctgggtcaggggtgcgtggatgacctgcattttctgctttctcatgttacttgtgtaacgtcttcaccagcaactcatttttcgcccagagctctgggctctgggttttgtctatacctggattccttttgccaattgttcctgtgctcaaaatacttaaaaagattcaggttctcgaatttcctccataccttgactaaattgtttttagatgacatatttgtgaccaaggtcatgtttacattacttccttgcttatatgttaaatacctatacttttgattggggaggatccagatggaggaggttccaggaggaggtttgtgtgcagcatattgagaggaaagtgttttgatggttaatttgatattaataatggtttaggtcgctaggaggaaaactttaagaggttattttagatgtgtgcaatctgacctaggactaaagcagagaatactgacataattagagatttctgagtttggaggacacaggaatttcttttccctggatttcttccagttttctcaggaggatcattagttctctgtccaaaatttgtggcctgttatgggattagaggctttaaggttatt

SEQ ID NO: 31717 - DNA, 1173 bp, Mus musculus
acatctgttgcttgagtgagatagagaatcggaatgatgattactttgtgtagcaaagaagacattgttgtagacgaacataaccagaatgctgcatgtaatgtacattgatcgagtttttgttgttttgttttgcatcatttctctcttttgtaaaaagaagtacagcatgttacccatgtaacattttattttaagtatggcagtcttggcagttacagtacacaaaatattttgatctgaaaaaaaattaaaagactggtcgaaggctcagttggtcaggtatttgtaaaaagagtacttgagttcagtttctcaaactcacgtaaaattgtgtgtgctgcttgtaatcccagccctgggcagacagagatgccaggtctctagggcttactcactggtcagcctggcctacttgtccagtttaggctagtaagagaccctgtctgagttgtggggaaagaattcctgaaaaatgaaatgaggttgtcctctggcctgaacatgcatacccttgttcacacatgcccaaacaagaaagtacatttgtgttattatcactgctgggaaacatttctcatcagcaaaatagcaacaattttaatgtgaactctagtgatacctcattatacattacaatagaaatttagatggtcttttcttctttttatagtctgttaacatggattattcccataaatttgtgggaactaaaaggaagctggtttttctagctccagtgtctctatcaaatatctattgctagcattagggttcccttgcaaaaaatactagaaatgtagcttttattgcttcaaccgaatcaaactagagacctaaaacagattctgacaaacgtgagaaagtaggagattacatcttgattccagtaatatttataacttgtagcttcccaaatagctaatttcatttttgtaagatcgaggcagcagtaggccagcatggaggtgaagcacacacagcacctcatcttggtgtgcagctgctccaccttacttcctgctattattatcccactacgcctcttcccagcaaaaaaagaaactaggacaaagggggaaattgaatgggctgctgtagtttatagcttatgttaggttgtggatttgtttatatgttctaaagctagtactttaaaggctagtgacaaat

SEQ ID NO: 31718 - DNA, 1164 bp, Mus musculus
tgttgtagaattcctgccatttgcccagcacacccagttatgattgtatactttataagcatctttgtaatagagccggaccactgcagtgaggaggcctcttgtacacatcagagtattatgcttaaggtttctttggtgttactgtccttagctgtcatttgagaaatcttctatcatattttcctttattacggtaagaaaaagtttgtgttttctaaacaacaagctacttacacaagaaactcccctggtaaacaatgcagtggattggcttttaagcagacaggagggttactttcccttcagaatttgactcagttataggaagaaacatagttaagaggtatttttggtttggtatgatttttgtttttcttgtaagtggttgtcaacatgtaattcttgtcacatgagtaaacctaaagagttaaacatattcaaggacagggtgaggtgatgattccacatcctaaatccagcatttgggtggaggaggcaggatcttttaagtttgaggagttctaggccagccagaacaatatagtgagaccaagtgtctcaaaaaaaaaaaaaagaagaagaaggcggcttcagggctgataatgtggcttagttggtaaaagtgcttgcctaccatgcaaacagctctagacttgattcctatcaccatataaaactctaggtgttttggtacatccctattattagcatgcaggaggtagaggcaggtgaattggagtttgaaatcagcctacagagtacctaagatggaagacacaccttcagatagcttttatgttcatagtaattgtttgttgtcattgataaagggagaagtgggaaatctgcatatataaaactcaaggtaaagctacataatataaattcccccagagagctggaagattctggacttgttaataaacacacttttaatttagatattgctacccaacgtaattagtttaataaataaaagctacgtgttaaaatcttaattttcttttgaaatctgctgtatttgtgactttcttgtgagtaaattccccctttcattgttactcatacaacccagagcttattgaatgctaggcaagcactctaccactcagctataccttcagttccctgagttaatctttttctaattatgtttttgtc

SEQ ID NO: 31719 - DNA, 1149 bp, Mus musculus
aaggtccacagcctcagtacaaagactgtctgaagcatacgaggcctgttctctttctaaagctgcactcttcttcctgccagtcctcttcacaggattgctaaagctgacttgtgcgtttctttcattgggttgactgtttactggtctcttgtctcccagctgcttccgcctcacctgtctgatacatttcttctgaaatcttaaaagtctagaaactacatataaatggtaactctcaaaagagtgctcagtattggaagacaggctgggtttgttagtggatccggtattttgtagatctggtgggttgataattgatggcagagtgaaactatatttttactttgcctctgtccttcctcttacttgctgctgctgaatacttgactattttatttcttctttttactgtcaccttcaaacctttttttttttcacttcaaaattgtgaatatacttttgaaaatatttttctaaagattactttgttttccagatttttaaaaattggaaacatgcgcacgcccacacccacacacataaatgtaaagggcatgccttctaatggatggtgacttgtgaacagctttcttccatgtttatgacctgttattattttggatattgagagctcattttggtcagtactatatttgactttgtgaaataaaaacatgaatttaagaaattctgatcacctactcttccctttcttcattctctttccccaaatttaataggttctctattttcctttccttttggggatatagtaagttgatggaattgaccccaggtagaaccgattccccctgcccccagtttttataaggaatggaatggggaaaagaaaggagtcatcatttaatatgttttgctaggcctgtatccaaagtaaatctggtatttgatgaaaagaggtctgtgccccatgtggtggtgtgtgccaataatagcacttgggagggtcagccaaggaggatacaagtttaagtctgatgtgggctatagcaattgcttaaaaacaaacaaaacaaaacagaaatgtaaaagttactgagtttggaacccccatggaaagacaagaaaaacttgagaatcctgaggggaacagttttgatagaagggaagagaagggcagtatct

SEQ ID NO: 31720 - DNA, 1174 bp, Mus musculus
atccaaactgtagtaattttttttttgtcagattgattaaaaacatttgctaattgtgttcatttgtgcttagaaaaaatttaatgacaatttactttggttttgagctctgaatgtaggacagaaattgcttgtcgttgctttatgcactaaaatgtgttgaggtagctcacctattttaaaacatttagttttaaatttctgctataactgtttactatatttaaaataattttaattttttttatcttaaagtttagtgatgcatatgctatcttaataatactttgaataaattcttataaaccctactaattttacttttgaaatagcttctggttgatgctttttttattgttgtttttaatacttttctacccccagactcgagaagaccgaaaggttgaagccatcatgcatgcttttgaatctttagagaagagaaagaaacggcgggatcagcctgtagaacagagcagctcggacatagagattactactagcagttcagagatagtagttggagaagagacaaaaactgcagcccctgagtctgaagttagcagccctgtttcaaatgttgctatcccaagcaccccacagagcactggtgtgaatactcggaggtcctcccatgctggggtaagagggaaagctctgaaaagtcctgcgtatgctaatgtcagttgtctttttctatagtggtagaagttagtattttcaacgttgctctgtatcagaataagcaaagctattttgatctcaacagctggtttgtgggatgcagagagacaggtgaggtcaacatttgaatgacaaagtcccttagcacttaagtgtctcccagataagttcatagaatcctttggtttgggagaatgcatactgagcacgaaggcttcacctagctcagtctccatctctaagggaagaaaccaaatctttgggtttctctcactgattctctgaatagctcaggtacatgactgaccttccagggccttctcaggactagtgtttaacataggacttctgggtgtagaaaagaaacaagaattatcttgcctaagaaccttaatattaggtacctagctttaattggcttttgacctattttattttatacatgtttgttagaaatagaattaactaaggcagatgtttgtctatggtc

SEQ ID NO: 31721 - DNA, 1143 bp, Mus musculus
ttactggatcccatgtcaaccgtgctgcatctaaataccccaaaaccaaaaaggtaagcgacgatataaatttcatatggtaaggagtatcacgctaaagcaagagggcctataatccccaaggaagaagtaaccttagaattattagattgaacattttacgtaaaaagttgtttgtgctggaagctgaaaccatcctacttatttttgttcacttgattttagacagaatttaaatcactggtaaaacactatttttatctgtctttgtgagcatggaaaatgtaaaggaaagataccttatactctgaatgctcagctcatcttcactgtggttgctgatctgttctagttttagttgaagtttgatttgtgaactacactactgcttctggcagctgttacaaatgcagtgataactaatggtttttgttttgttttgtttttttaaacctttagtatctagttacagaatggttaaatgacaaggcagagaagcaagaatgccctgttgagtgtcctttgcgtatcaccactgacccaactgtgttggcaacaaccctgaacatgctaccaggtcttattcattccccattaatttgtaccacccccaaacactacattcgctttggctcaccctttatgcctgagaggcgtcgaaggccccttctgcctgatggcacattcagctcctgtaagaaggtatgtgcctttctgtctgtctctatctatctatctgtctatctgtctatctccccctctaccccccaccccctccccgtgtgtgtctgtgtgtgtatacctgcccatgaatgaaaatatgtttaatactgtagggtgcatatagttgtagtatattttacataattgtctagataattcgagaatctctagataactttgtgagtttatattgtgttgttaaacatggaagtagactctttagaagtcactgtggtcaagttggaatgtatacagcatttttggtgctcaaacttgtgactgtttacctgtccatacctagaagcttttcacattactgagagcacaaggcaattgatgggatggatgtgttttgtatatgcttttgtgatactggttagcatggtaatttgtgactattgtatgatgttggaccccaaa

SEQ ID NO: 31722 - DNA, 1131 bp, Mus musculus
tggcccagtccctatcaccacatacataaacttgatattgtggtagacacctacccagaggatgaagcagaagcatcattatcaccacatacataaacttgatactgtggtagacacctacccagaggatgaagcagaagcatcattatcaccacatacataaacttgatactgtggtagacacctacccagaggatgaagcagaagcatcattatcagggtgatctttagatacttaggatgtttgaggccaatctaggttacatgagactatttcaaaactaatcttcattaaagagaagggaaagaacagccaaagccagccttggctgcacaggcccgaccctgtctagaacctatgtgaatgtatttgtattgtattactcaccaattaatttgtaatgatctggttagtgcactgaaaatagatatcttttaaatggttattgaaaattctctgggttttccctcccattgtagcgctggataaagcaagccttggaagaagggatgactcagacttcatctgtgccccaagagactagaacacagcacctataccaaagtaatgagactagtaattcttctagtatctgtaaagacaatgcaggtatgtatctgatccttttctaaatttgataagaacagtcaccatttgaggttcacagtgaaattttcagtgttggttctctgatataaaaagaaatagtgttttctctaaatagttaatttacatctgtctttacagaggaagagaaagatctcgagtcagggatcagttttcccaggacgacaaagaaggaactagacagtgtacagataacagcagaaatggttataaaaaaggttagatacgtttaacgtagtaagtttaggaaatatttatttgtacttataaggggagacagtagaaagtggtggaacactttcaaggggaacagttggaactgttaagtggcttgttgggtgggatctgactaaaggggcaggaaataatggcatccttgaggaatcattgttgttttgttttttttcaaaagaacttgcctcccagaactataaaatttctgactaagacataaagatatgggccaaatggctatgaaaaaaggacctgatcattgtctttta

SEQ ID NO: 31723 - DNA, 1120 bp, Mus musculus
ccagcaacttaagacctttctgtggtgtgtgtgcttggggctcagatacatccctggctacactgccagccccacatatgctgtcaaacgatgtgatgaaggctgagcagagtagtcatgtttgcagaattgcctgatgccttcattccctttttgccctttgactttttctgttataccatgtcccatatctctgttgatttttatttcagctttgtcaccgaaaagacctagatttgacaaaagtgggattcccagactccagcactcacagctgcgctgataggccctccctgcttaactgcaatcatcctgacctggcttctcatccctctgttgttcccacctccgaggctggcttcccaagcaggagtggagatggtcctcagaccttgctgagaaactcagaccaggcgtttaggacagagttcaatttgatgtacgcctactcccctttgaatgctatgcctcgagcagatggactgtatagagggtctcccttggtgggagacaggaagcctttacatttagatggaggatattgttcccctgctgaaggcttttccagcagatatgaacatggctttatgaaagacctctctcggggatccatgtcacctggtggtgaaaggacctgtgaaggagtcccatctgctcctcagaacccaccgcaaaggaaaaaggtaagtattcatgttactcttttaaagaatattagtcagataattcagaactttctaagctccagtgcataacacttgtcctactctttgctatgacctgtaaaaattagttcttttatttgattacattacttctttggcttatgtgggggggggggggcatgaacatgccaaaagcacatacatagaaatcagattacttgtgggaatcagttctttgcttccaccatgtgggtcctgggattgaactcaagttatcggtcttggcagccacagccttcatcaattgagtagactctattagtataactggaaagtgttgtgaatagccggcaggactgaagtgcagtcagtaaaagagtgtagccatgagtaaggctttccatctttagcatcccaaatacaaataaagcaaatatctagcttgccttagaggc

SEQ ID NO: 31724 - DNA, 2175 bp, Mus musculus
gcctaccaggcctccagggtatctgcggtttccaattcacagcactacccacatcgtggtagtgggggtgtacaccagtaccgactccagccactgcaagggtcaggagtcaagactcagacaggactttcctagggcttctggatatgggcaaactgaacttaatgagcccatagctgcttccttccagctgcctctggaatcaaggccgagcatatcgctggggaagaggggtacaaggtgccagaggaatgggtctggtcagcaagaaatgagacttgtggtcatgactggcctccggccttggagaaagatgtaaatcttgtctgaagcagagactataaagaagtttctccctgctgttaagggtacattgttaacaagcaaatggtgtttcggttagtaacggttctaagtgcaatgacttgtgttgaagcctatgtctcccatccttgcctgtagcctgtagtcacttgtgcagtgaggacatctttttcaataatttttttttttttcttttcaaaagaaaaaagtgggaaagagccaatcttaaagccccaagccatctgagtagtgttagggttttatgcacttaagggaaaaaaaggtaggtatgtaaatgtctgctgtgagacaaccattcctaatgcagatgcatggtcaaggtgtgtccacctggagtgctccctgcctttgtcttaaagccaccaggaaatgggcagggagaggaatgtgggtgcctactctgactgaggcttgcccggctctctgagaggaggagctcctgggtatttgggagcagatttgggatggactgggctccagctgttaccatccactcctccttccaagttgtttcacagtttaatgatagccctgtgaagtagagaagtgaggcaggccagtttaggaaacatccagtggtctgggtaatctttgaattttaattttcctattcccagttaatcaggagttgctgtcctaagagcaggacggcctccgtgactgaaaagcatgcactcatgactgcagggtaagaatgggacagatagggttgcggagtggcaccgacagggctgtgattgtgtgtggggcatacctgccccacgtttctatggggaatgcttatatgacagtgagcaggtgagagttagcaagtcacccatacccctaacactgttctgtaggagagacaaagagcagactggcttctccccatcagtgcattgtgcctgttgtacacccctggaggagccctgaagccagcccaggtggggtacacaatctttttaaattccatatggttgccagcttatttctttcacttgtttactgtaatacctggcgtgtttttatttatctaattttgtattcagctataaccatggtagggtagtgagtgtatgacagtgtgatccctggtgctgcagtggaccgtacttcttttggacaagatatactgtgagtctccctccttacctctaattgttttctttcccattccctagactctttcatctccttttctaccctgacctacaactatcatatgcacagtcttctctctttgtgtgtgactgttacaaattttcacttttcaaaattgaaatcaggtgtttgctcaaatgaggggagaattttttttttgttttggttttatttgtttttaatgctgaaccctcggcatagtactttctgttgttttccccacaaacccatcagtctgggagagcattgggagtggaaatcatgttgcctgggatgctggtttctttgtatattatataaaacgtatgtaaatgtctctccatttgggctggggtttgcattctcccattggctaaaagccaaggggagaggccagcgggcaggcggccctcaccctgcctggcacgtgcagagaccccagccactctgtgtgggcagggtgctgtcaagaccagacctctgggggggagggtggggggaggggggactcttggaagggaaggagcaccacttcttcctcaagtggagtgtttacaccttgctgtaacatttgaactttcacaagagatgtaataattttgataataaaattcttaaccataatcatcataatgttaacaatgtgtttgttcgcttctggaacatcacgttccctgatttaacctttcctcacgaaaggcaaggtgg

SEQ ID NO: 31725 - DNA, 1132 bp, Mus musculus
aaagagaacttcagctaagatgctagaagtcaagacagatgttcccacccactcatttctaagatgagattggggaataaaataactttggacaggaacctggggaagagggacactaagctggcctgcaccaggctggaggcctggggttttcagcagaaccctatctggttctctcacttggtgctcctgttccacaatagatgacagcgggctgctggtacactgtatctcaggctgggaccggacccccctcttcatctctcttctgcgcctttccttgtgggctgtgagtatgaatgagctggagcggggaatatgcagagaccctattaggtctccaattgtcacgtttaacactgttcttggttgggggctggggtaggataagggtggtcctgtcacccagtctatgttttggtttgctcctggagcaaggaggcccgcactaggaaggcagctttctgagcttgccaccctttgtctcccccaggatgggctaattcacacatccctgaagcctgctgagatcctctacctgactgtggcctatgactggttcctctttgggtaagtcttcaaggaggtgtgtgtgcatggtgtattagcttttcttatgaggaacagagataagaaaacagctggaggaaaaaagttggctctctttggaaaggatcaaagatgttggcaggcttcatgtgatgcattggtgccaaagacttggtctgtctgtgggtcacacggctcctcagcgctgggttgtgctttgaccttctcactcttctttttcagacacatgttggtagatcggctcagcaaaggggaggaggtaaggacctccgcacagacatggactacaccttaacacacaaggcattcattctggttgccatgctgggaaggcagtttctccacccaggatgcttggatgagcttaccatcctcttccctcaggcagtgtggtgggaaaggcaagagcacagaccgtgtgtgggcctcgggctccctttgtaccacagagggagttctggccacagtggctgtgaccatttcaggctcctcatcttccctctgcacttggctctggagccagtgttcaagttgctttccatggctccatgctcaaagctga

SEQ ID NO: 31726 - DNA, 1148 bp, Mus musculus
tggcagattgcccatcgtgactacggctggcatcctaagacatcccaggctaagggcccgagccctttggccaacaaagaactgggtgaggagtgtgatgctggggcgttgggctgaggttggagagcctgtcattcttaaccatctccccacagttcccatctctgtgcatggagggcacgtgtgtggctcaattaatgtagtttcctcacttctaatttaggaaactttttccggaatctgtggggaccttatgctggctgggcccaagcagtaagtatacctagtccagaccctaaaggactttccctcaccctgcctgacccctggactcttcagctacctgttctcataactcccaccacccccattgaccccagtcctgacctcagcatgccctgtttcccatagactccttatgccccctcccataggtgctgttcagtgctgaccttcgccaaccaagcctgtctcgggagccaccagcaaagcgcaaaaagggatctaagaggccagagggctaggtagggctcaggggcaaaaggtcttttttcctttgttctccatttctttcccttgtctctcccccccccccaacccccgacccctaagtctcaagtcagaaagacttaacactcccacctcagaggccagaaccccaaatcaaagtcagtttttacaatagggaaaaaggaagctatttgagcaaacggaactgtcttgttttatcttccctttattacaagaaggaacaataaaatagaaacatttgtatggaaaacgcagtgaagagtgagaggggaggggtgaagaggtgtggggtcagaaactccccagatctggagtgaggaggaagcaggctgcctccaacccctctcatgaaagaaaccctgacttccttgatgttcaatccatggccctagagcttgggggtggtgcagggggcagttccgagcctggttccacacagcagtctcggcagcagcagccagctgctggccctgtgtagagggaaagggtaagggtggctgtagagccggctccagctccagccttgttcttcctcatggaccacctatgcccttccacgagaccctggttcttaccaccagctgttggtgtcagcagctccccgtggctgccagtct

SEQ ID NO: 31727 - DNA, 1168 bp, Mus musculus
atatctgtatacataaaaacaaacaaacaaacaaagtctaacaggcttcaatcaggagataccatgtgtccagcactgtgggagcactgaggagttagcagaaaatgaaacactccaagtgcctgcccttaagagctgacatgtagaaagaatcagtgagtaaataaatctatattagtgtcacctggtcaaagtcactgtgaagataaaatcaaacaggagtagggagatgtggatagatgtcacttcagatagtcaaaggccctttgtgatggtaaaatctgagtggcttttgagccagtttaggtgtgatccggtttaggtgtggggaggatgtcaaacatgaagaccctatgacagcatgttcaaggacagaaggaaggccagtactgccagacagaagtgagcaagacagaggacttcctgtgagtcccgtctgactcttggcactgccccaaaatgctctccaagccaacgagtatttttaaagctgacatgaattctctttctctctgcctaggctctgtggctacccacccttttatgatgaaaatgatgccaaactctttgaacagattttgaaggcagagtatgagtttgactctccttattgggacgacatctctgactctggtaattgggtctttgccttcttcatctagcccctgcctcacgtcttcatctgatccaggagtctccccactgtcttgcctccgtcgtattttattcccagactagaagcagatgtcgtatgtcttatcttgggttccctctgcttggcccctatctcagagctctgtaggcattcagtcttccaatatagtatttacaaaattacctcccctggagcttactgactctctgaggcttaaacagcattaatatttctttttttttttttttttttttttttagattttttttttttttaagatttatttatttattatatgtaagtacactgtagctgtcttcagacgcaccagaagagggcatcagatctctgttacaggtggttgtgagccaccatgtggttgctgggatttgaacttcggacctttggaagagcagtcgggtgctcttaccccctgagccatctcaccagccccaagcattaatatttctatcttccattttgtgtcccagtcagggaccagcttgtgatggc

SEQ ID NO: 31728 - DNA, 1176 bp, Mus musculus
tttataccttgtatctttttgttgtcggtagtggtggttgtgggtttttggttggttggtttgtctgcctcccgagtactgggactaaaggtgtgctatcctgcctggcttctattttatatcttgctaatgcatatcagcttctaggtgtattttgatttttggttcttgtttgtttgtttgtttatttgagaaaagatagggtctcagcccaggctcagactcctgatcagcctatgtcagcctccagaatgatcataggctaggtgtgtacgccacgcctagctgtgttgagtctttctatacgtgtttcccttactggagtgtgagtggagagattggatcttgttggcctttcgtggcaccagccttggccttgggcaacaaatccgtgaggaaagaaagaataaacggatgcttcctgaccgagtcccatgccaggagatcctctcacattccagtctcagatgggcagtgtttacctctcagagctgagtgagctctttgctgcagattccccccctagggaaacactactcccagcgctgggcccaggaggatctgctggaggagcagaaggacggcgctcgggcagcagctgtggctgacaagaagaaaggcctcataggaccactgacagaactggacacaaaaggtaagcctcagcctcctcacagcccaggcctggatctgaggccccggagcttcaggcctccagctgttgttctccctgtccagatgtggatgccctgctgaagaagtctgaggcccagcatgaacagccagaagacgggtgtccctttggagccctgacacagcgcctgctgcaggccctagtggaggtgagcaggccatctgactgggaaccacaagctaggcatggtggcatctgcttgtaaccccagtggcacttgggagacagaggctcttagctcaagttcaatctggttacatgtgactgtctcagaaaacaaaaaaacatttacacacaggctcgagcgagcatgcgcacacgtgcatacacacacacacacacacacatacacacacacacacacacacacacacacacacacacacacacacacacgagcgctcgtgtgctggcactttattgttattttgctttttgagatagagtcacactatggactagaacttttagtcctcgtgcct

SEQ ID NO: 31729 - DNA, 1718 bp, Mus musculus
cttatctaaagcagcttcagttgctaggcaagctacagggaagcccttagcacttaattttttctgctctaattttgtgtttcaggctagtgtcttcagatcactgctaaagtccggccaggttaagagctcatagggtgctagaaatgatttggtggctcagggcacttgttgctcttttggaggacctgggtttggttcataaagtgccaaaggctgatccagctctcagagacccgaacagcagcagctcaccaggatgtaataaccccacactcattgcctgtcattctctttgacagttttaaaacatctagctggatctcgcagccttcccctcggcctccctgtgtctctgcgtctgcaaaggtgtcctggagtcactccccggagcagcggtgcagcagcagcagccggaagctgggttgggtgggcattggatgtgggaggtgggtgtggtgtgcttgctagctgtgcagaaaggcagcagtgggcctgccccatagccacatgtgtctgctctggctagtttctgatgctcagtcccctggaccgggacagactttttttttaaacgtcttgaaacctaaactctgtgcttgtagaagactgtaacctttttgtctttttttttttttttttaaacaaacaaaaaaaccaacctccagctccagtggctgtgactggccccagtgattgtaccttattggtcgctgtggtctgggcgggcctggagccagaaggcgactatttttcccgagccacccccggtggggaaagagggaaatttcagactacagtttttttcccttgctgtcttacaagcctccttaggcctagtagagaggcggtatggaccctctactagcctcctgagtcctgcctgaagatgcccactgcactggttgggaacaagggctgaatctatgattgccgggcaggcctaggagcgggggcccagaagccaggcaaacttctggccgtaggggccacccggtgtccatccgaccccttccagctgagaggcccaaggtttgcccgtctgggtgcagggcctgtgctgcaggtccagaggtgagtcctgcctgctcgggctcctctgctcccatgctcgctgtctcggattctgatgaactcccctcccccctaattaaagtctcttcctgccccttcggggctgcatgaggtctgtgctctgtgtgggtgtgtgaaaggatgcgtgttttgatgccttggagccttgtggctggcatttgggtctggagcagcccaccagacaattttgtcatcgatcccggccaagggccccaactcggagcacttcactacagccaagcaccgtcattctgaaggcggtttctgcccagacagagatgcggtgcttccacagcctgcttccattctagctttcggggaccccaggaaccatgatcctactttgtggataagaagagtcatttcccacgctacctaaccttgttagtctgactggtgcctcagcaggtgttgggggtaactcggtattgaacatgctgggaacttccgttggatagtgctcactcctcaagtaagcagtcctttctctcgctgtgtcctgatacttggagacctgtgaactctatgccattatccctgtcacacaggggctaggtgaagtagttgatctctctaccttctgtttaacttgtgtatgctggccatctgtactgacatccagt

SEQ ID NO: 31730 - DNA, 1718 bp, Mus musculus; identical to SEQ ID NO: 31729

SEQ ID NO: 31731 - DNA, 1323 bp, Mus musculus
agcacttggaatgaaagttgcttctccctttgctctgtcttacagtgtgaccctcaagtacgaaatcaagaagctgatctacgtgcatctcgtcatatggctgctgttggtggccaagatgagcgtgggacacctgaggctcttgtcacatgatcaggtggccatgccctatcagtgggaatatccgtatttgttgagcattgtgccctctgtcttgggcctgctctccttccctcggaacaacattagctacctggtgctctccatgatcagcatggggctcttctccatcgctcccctcatttatggcagcatggagatgttccctgcggcacagcaactctaccgccatggcaaggcctatcgcttcctgtttggtttttctgctgtctctgtcatgtacctggtgttggtactggcagtccaagttcatgcctggcaactgtactacagcaaaaaactcttagactcttggttcaccagcacacaggagaagaaacggaaatgaagcctgcttgataaactgctctgaggggtaaaacctaggtctcccattgagcagcgtgaagggagctgtccagactctccatcgattgtggcatctgtgatgttggcacctagtgcacactaggctcagattttggcctagagttctgttaccatctgctgaggtggcaaagctgttgtatttaatttatgcttgactagctgcagctgggtgaccaatggctgtgacacactttacctggttgaacttgaggccctttagagtttgggttttccagactgagccttatccttgccttctcttggccgtactccctccttccattcgtcacctcttcaccaccagtactagaagaaatatggaataaatcagtacatgaaagcagacttcagtctgtgggtcatgggcaagcaacatttgggaagttgctcccctatgggctgttctgtttactgcaaaccattttaaataaaaagaacctcaataaataaagttaagactgtcctgtgcctcgtgttggagatttgattgtttttcagagttgtatggagctgcctgtggagaagagagctggggtgaggatctaagtcagctgcagccctctagcttttaggtaagaactacccggggtgaggggcaccggaggtgtgcttcaggagttaagagcactggctgctcttacagaggacccaggttgggttctcagcacccacgtggtggctcaaaaccatttctaactactgtcccagggtattttatgccctcttcctgcctctggagatacttaatgggcatgaagtatgaagacaaacttg

SEQ ID NO: 31732 - DNA, 1185 bp, Mus musculus
gtgtaggcagcaactcagatagcctggttaatcccaggcctgccaatacagctgtaggagatacgtgctttagaactgggaagctgttcaaaagaaagaaactatagtgatagatttcaagctagatagtatagatgcagtcattggctggaaatggggccagtaggtaggcagagtggtctactcacatgagcccaagaccttggcctgcattctgagcccttcacctccagccatccaccaccctctcctcatagggttctgcggtatttgactgtttcgaggctagtcttggggctgaggtacagatctggtcctacacgaagcccaggtaccagaaagagctcaacctcacacagcagctgcctggtgagtcaccccaaagtcctggttccccagtctgcagtccctttggtcactccccatctttctggtcccatcattttcaggcaaggttctgagctgacaccctcctcagtcaatttcgtgtgcttctagcccctgggataggtgctctgtgccctgtgtaagcgtgggtggtcttcaggggacaggcagcccctctcaggatctccccatggtttgcactgcttccctttttgccttggtccccatccccactggacgtttttctgtgatctctccccagactgcaggggtcttgaagtccgggacagcatccagagctgctggggtaggggccagggacagtgggctgggtgggggagggcaggatctggagtttacacaattggatgcttggggttgacatcagcctcagagatgccaggttccaaaagtcacaggacatgttctatcattcattcattcattcattcattcatttgctcattccacatgaactgcagaattgcttcatctatgtatgtcaggcactagaaatattacaaatgctcattgatcccaggaacatctagtggcccaaagcactgttaagattctggtgcctctcctgactgaccagagtgggtaaactattaaacctgaaacagcgaccaaaaaatgaggagattttgatgttacttttgttttgtattttcttttaaagagaatttctcatgcatatgtagcatatattttaaaaagatataagtacaatgatttttttttttgagacagggtttcactgtgcagctctggcactataaagaccaggttggtctc

SEQ ID NO: 31733 - DNA, 1277 bp, Mus musculus
atattagatggtgacaagttatggagaatattcaagagagggggatgggaaggatgggagttccagtagtgagacagcctcactgtaatgaaggatatgaagaaaaaaccctgtatttgagagacagagtcacataggaagagaacagcctgtgcaaaggctgtagggcaggagcaaggcaaagtgtgcttaaggaatgtgaaggcatctcatgtgtttgcagcaaagtattcaagatagaggtactaacatattaggtttgagaggtctcagaagctagcctggttaaggttcgtggaagctgttgtaaagactagcttatattgggattactatgtgggggcataagcagagtctagggacagtgattgcattaaggaggtagcaggattctactggctgcagaagaggagctgtccccaagaagcaagctggagcctctatgggcttggctctgggcttgtgtctggggacaaagcccagtctgagatggagatacagtctgtcctccaagggcctcctagtccaaacccttccaggggtttgatggaatctctaacggggcagttggtgagtatggcccaggcttagctgtgcagagggggtgaagagagtctgaacttccccatctctctctgcttttcccactagtcctgccctggctcaatgtgtctacagatggtgacaatgtccttctgacactggatgtctctgaggagcaggactttagcttcttactgtacctgcgtccagtcccggatgctctcaaatccttgtggtacaaaaacctggtgaggcttctcctctagacccatgctctccctgtgctgatgcccatgctaaggatgtcggcaaactgtcaaaggggacacacccagagcagaggaccttagcagtggggagggtctgtctgtccttggactttgggcctccccacttcctctttcttagcttctcttaacccacttctgtctactcatcccacagactggacctcagaacattactttaaaccacacagacctggttccctgcctctgcattcaggtaagagcagaattcatctgtacatgggagacaggctagggaggcacggagggatggcctccaatcctctgggaccactgtcctccatactctgagatagagagcacggccccttcgggtggctgtctcattgctcttgctgtcctatgccttctgcttgttatgtgtccggaaccctgttcctggtgctccatccacaagactgttccctgtggctcgtggcccaccca

SEQ ID NO: 31734 - DNA, 1190 bp, Mus musculus
gactccacagacatgatgtggtatgccacaggccacacaaatacaaacacacacacacacacacacacaccaaaataacaacaacaacaataatagaaaagaaggagggtgaggagaaagaagaagaaaagaagaaaaaagaaagaagtagatcttcgaaaatgtgtcagaatatattgtaaaatgatgaggagaaaggcaagttacaagagcaattaagaaagcgtgggctcatttttatttaatatgctctgggaaaagcctggaagatatgccaggctgtatgtatgatctacctatgcctgtatgaatccagagaaagtgagctcccagtccccgcaggtatgcaaataaagcgggctgtagctagaaggaacactgcagaaccccacagggctctgacaccatctgggctgtgctgcttgtgagaaaggggcggtgaggagcagcgaacagagaccgttcccaaaggaaagggttaagtatcccgcgctcctgtgggcgggcttgacgaggagatcggcagagccgggctctgctggccaagcctgagcatctcggaggatgcgcctccgggagcggctgcagggacgcgcgcaaggtgaacgcatggctgcggatgcagcgcgcaggtgaggagctggccgagggaaggggagatggcgggacccaagaaggcaaggagcaaggcttacagccccttcgcgggcatgggcctgcacggtgccaaaccccacccgggacactgcgggaaggcatggagccagggagagagaagctggagaaggaggaagagaggtaacccgagatggaccagcttctgcaggctgtcctgcagaggccctcaccctgctccccccaccccctagtctctgcggctgattgatctcatctcccctcagaactgtccagccatggggaccctaatgctaggcaagctcctgcctggactgcgggtgcccacatctcttgcatcgggggtggtaggcagatggcatgttattcactgaaggcccagctcagccatctcctcctctgcaaagtctacagagctgtacgggcttcagtatctctagtatgtgttttcagctggctgtgcgaccttggacaagttgctcaacctctctgactcttggttgcccactctcctttcctgtgtgatgggtacttgcacctgctgtatgggaagg

SEQ ID NO: 31735 - DNA, 1857 bp, Mus musculus
aagattgctttatgagtatttgtatatctgggaggcatatggacatctctgcttcacacgatccaatgagctcatacacagaacagccttgcttagctgctggtcagagaggtggtcactccatgctgtccccagctgtcagctcagtggcaagcatccctcttagcatccctgtgttctcttcctgtgcagacagagtgggaagctttggaactgacagatcaccagtgggcgctcgatgatgtggaagaagaactcatggccagagacctccactttgaaggcatgttcaaaaaggaactacagacgtccatattctaaccacatgcggggtcagctgtgtccggaacttgcagtagcacttaaccttgtaacttccgtggagctggagcctctgagaataaaaaggagggtgcaggggctggcgggtgcagcaaggctcattcttgtctgagctgggttcccctttatgttggaaactagaggaaaaggagttgtgggtgactgctgtcttaaagtttgtgattgttccttcaggtgactctagtaaggacgtcagagaaaggggagaccccatgctactgagaatagctcaacccttagcaaaaactccgtgcttggaaagagcattgtcagttatagcagttactatgttcggtcagcctgacttccagccacagtaaactcctgttttcttaggatccaaacaccctgcattttaccttgaatttcttgtttgtatttttaactttctttacacacgtaatatacttttctctaccacaatttagaaactatggctgagcagcacagcgctccccgcactgttcacttgagcctacaaaggacgcagagaactggtgtggcccaacattgctgaaataaactctttgcagagtggatccccagggccggggcagactcagcaaacttttcatatctcttcatacttagtccagtgaaaacaggtgaccctgaggcacagccagactctcaagtgcctttgggctcatcagagacaggttacatatacaagttcttgattggaacttgaggaaatatcaactctatcggccagtcaatggtgctgtgctgtaaatggctactcatttgaacgaatgacctcatcccagttcctctgggcaggagagaacttaccactgttggggcaagaggacagtttctggtggatatgtagattaaggtgcccaggagtcctctgaccagggaagtgttagggtgccatttctgtaccaaaagctgggtgtgttgcatgttaagcactgtagccaagaacaagcgactcttgactcttaattaaacagccctgttttctctttgcctgtgaaagtgttgcttctgtgggttctgaaggggaaagagataagagcctttgccctcaacaaactcatagaggggggcgggggatctgtggatgtagcctagtgatgtcagttaagagtacattatccccagaacacacacaaaagacctcatctgagagaactgcttattttcttttatctgtatgagtgtttggcttgtatcaggtctgtgccccacatgtgtcagcgcctgcagaggctagagagggtggtgagttccctggaactggagttatcatgggttgtaagctaccgtgagggtgctgggaaccaaaccctggtcctccacaagagcaaccagtgctcttaagcacgtctctgcatccccaagagagatctattttgaggtcatagaacctctgaatctgatggtccaaagccagggtgacttgtgagccatctcagaagcaaacttgatcctgaaagtggggggagggactaagggtcagggcttgcagctggggtaggcgtt

SEQ ID NO: 31736 - DNA, 1154 bp, Mus musculus
gaaaagaagcaagtgtcttaactgctcagccatttttctagcccctcattttgaattttttgaaacaggccatggtacatatccttgtctggccccaaatgcagctttctcctgcctcagccttcaacttacttacttcaacttactgttatgagtccagacacgagccaccactcccactccctaaaactcagctgacactagattatctgaggacctctcagtcttctctcagggagactctgtagggagcaactagttgacactaattgccagtcctatcccatcctgtcacatcccattccatattatcctgtcgagttccaggccagcttattctttatgaggtcttcctcaccccaccccataacagcccaaaatagcaaataattttgtccatgtagcttttgtctacccagctttctttataaagagacaacttaggcagcttgtgtgcatgtgaaaacatctttaatgcatgtgatgctatgcgggttcttttgtttcttgcttctttacagccagagcttcagttacttgcagaacttccaccatagtgttcccagtttccagtgtggtctctaccttctcagacttctgatggcccttctggagaagtctgcagtacctaaccagaagaaagaaaaacttggtgatgagccttgatccctttttcgggggaaggggaatatgtgaataggattgatgtcttacatttgcaaaatttgtgttttcttagaattttgagcatttttacatgtaaatcccacaaaatcacaagcgtgccttcttgctccaccaaggagaccatgtttacagagcaggctatgacacagcttagtgtacctgtggttagattaattgactggacagttttctttttttgtttgtttgttttttgtttttgtttgttcagttttttttaattaataagatgtatatattttgtttttattttatgtgtataagtgttttgtgtatatgtatgccatacatgttggagaccaaaagtaggcatttgatccactataactggagttacatttatgagtcgcccaatgaatgctgggaaaaaccaagttctctggaaaaccagcaagtgctcttaatcattgagccatctgtccagccccaagttgttgtcgtcttcttct

SEQ ID NO: 31737 - DNA, 2436 bp, Mus musculus
atcccagcaaccacatgatggctcacaaccatccgtaatgaaatctgatgccctcttttggagtatctgagaacagctacagtgtacttacatataataaataaatcttaaaaaaaaaaaaaaagaaaacaggaagcgggcatctgctttagcttagaacattttaaatttcactgcttgtaagaacaaaagtggtatagtgtacatctgtgagagcagtgtctcgagcactggcctaaagtacctttttcttcctttcccttaggatggggaagatgaagcaagtgatgaacagaaggaccaggacagtgatgaaagtgacgacagctccagttagagccgagtggcatggctgccctgctcacctctgacagactctcatctctttggggtttgaagtcagatgtctgtttttctagtcagaagcatcctgtttgtccatcaagaaggggtgtttatttaattccccagtgggtttcacaggttgtctaacctccaggtccctggttcaggagtccagtgtagcatccatcgttgactaggatgaacatggctgggctgcagtgcagtgcagtgcaggtgccctagctgggccttggggttttgaaactaaaatttaggcttataatagctttgtaaataaatctgtttcagagttttgcctcagctacctttttcctcactttagatgtgattattcaaggatctcattattcaaggattaggtaatattgagttgaggtttgtgcaatcgtactggtggcctaaaagtatgttccgtactgttatcttcctggaggaatgacccaactttcttatcaatgatcagtgtttggtttggtctgtgtcagggtctctttacatagtcctggctgttgtggtattagatatgttgaccaggagggtcttgaacattacttttgaattttaaacatttttgtacatatgtgtatgggcatatatgtgccactgtgcatatgtgtaggtcagaggatagcttatgggagtgagctctctccttccaccatgtgggttccagggttcaaactctagaccttcacctgctcagccaccttacccttttaaaatgtttggttattaatatataaaaggaaggaagacaacatcaaacatgtgctggctttgtatgtatatatagtttttatttccacattaatttgaattatgcctataatatatttgtaataatcatacaaaataattgtaatttattagaaatagaacatcaggagttaaaataggggattcttctgtcttctgccaggaagcccagtctcagagatgctgccaggctcttcctcgctgtgccattaagattatttaatttttgttaatatttttactcataccggtattaaagttatgttttgttgggttgttgttgttggttttttgtttttgttttacttgttcacattgatttgaggagggaatgctgtttttaaattagtccttaacccatttatagatttttttgaccccttcatcctctggtatccagagatccatacctgtcttttcttggcatctctttcttcaccagttcatcattgtctttggcatttaaggtgtgctcaactaggctggcttatttctatgataaggtaatcattttcgcacatgcacatcaaagttaggttaactttgaaacggccatccagctttagagtagaactgctcctcctcgctcagtatcgttggtcctgtttctgaagagaaagggagagggggagctcctgagttgccagagcttgacctaaaggcaaaagatctggtgtgctgtcagcttggtttatgtggataggtctgtgcgagctttgggtacataccagagagctggtgtggaggtccagtggggaccctttacttggagtgctgcaaggcgaaggtgcacttcttgtaagtcgcatacagcaagaggattgagcgtagcatctgtttgcacatagtcactgtcatttggacctgaggctccttgagccctgtaggccactggtgctccctgctgattattttgcagaaggctgacttgtctgaaactctgaaggttccagtccacttgggtggctgggctgtgatgaccctaccgaaaacagaatccactccactgaggcggactggctgcggcttcctcaccacccctttcttgttactcacggctcggagctctgatgtgtggcagggtaacttggggctctctccaggttccacaagtggtctgtctaggacaagcgtgacttcttgaaggcacaactgcacttcaaggtcagagggggtgtgggggaagcaaggagaggccctaaaagggtgtttggaggaaggggtaggtgtagtgtgccgcagccattggaagctctcatccagtggggtccatggtgaccagagctggtagcctgccattgacagtcctaaagg

SEQ ID NO: 31738 - DNA, 1622 bp, Mus musculus
agcccagagggtttgtgtgggtgtgggtgtttggagtggcattaatcctgaatattagtctccttttaccagatatgtcttgtcgttcaagactcgcaacactaaatgagaaattgacagcccttgaacggagaatagagtacattgaagcgagggtgagtatagtcccaggctaccccagagggaatatctgtgtagaatgaacgcggtgcagaggttaagtgctctgcctggatgtagctgtctgggactctgaagctgcctttgctactgtttctcactgtgcaggatccaagataggattttttttaatggctttagtcctttgcgttttatctaaatgtcagtttttccttcacaggtgacaaagggtgagactctgacctagaagtgcgccgccgcgttgctgctgggaagttgctgtacagaacactgccgtgtgggaaaggcccagcagcctcctgctcctcctctctccttacagagcaacagggctttttcttgtttttcttttttcaaaagtggcctttgggctctgctgtgtgccctggggtatgacgtggcatgggggagcaagcagtccaggggacctcttggaaacagcattaggctttttcccttttcagtaacattgttcggaactacttgtcaatgtgtttgaggtgttgagaggcaaaggctgggactctaaggtcctccccacctctcaaactctttctctcagactttccctacagctcccatggcctctacactgatttctgtcaacagtcggccttctctccacctgtgagaggtggaggcagtcctggctgagacttgtgccctgcagtgtggttgccagaaaatgttgttgctaacccaccagtttcttgttctgggagctcaaagccaggcccccagttggcttgaagggacattttcagttttctttgtgtcacttggggtatcagtagctctcatgcttccctaataaactcaactttgtctgactgctgtgactgtggtggcaagagtggctggagagggtctccttgttgagagtctggtgggcaagagtgctctccagcagaagaaacctgcagccctagctggttcaaagcctaggcggctctccagtcagtgttcctgtctggacacttgaactagttcagtctggaattacttggtctttcagcagataactaccaaggacttttactatataggtgtgttagactccaataaaagatacagtattgaatcagacctgatgtttatgatctgttgcaatcctagcatctttccagtttaactgtatccagggtaggttactagttttataaggtaaacagcctgtgactgtaaatacggaggcttgtgagatggtctgacaagtggggtgcttgcctcaaaacttggagccctgagttctgtctctaggaccaacatggtggaaggaaagaacctgttcttggaggctgtcctctgatctctgtgggcatgcggtggcattcctgtgcgtggtgtacacgtgcgcacaatgtaaacaccaatcttctcaagcagatactgcagtttatacagaagaatcaaagacttactgtgcttcctttacacttcagccaacttactgctaaagg

SEQ ID NO: 31739 - DNA, 1180 bp, Mus musculus
actgtggaatggatttggggtgaggagtagttttgcctgctggtcacaaggccctagggtaatcagtgagcaacagaaaaaaaacattatgacacagtgtacaatgagatggccagtctggatccctgccctttggcctgggtttcccagcagtctgaataaagtcacctctttatctgagcacatgtggatatatataatctggtcccttcttccctgtcatgaaaggaacttcctgagggaggtctcctgtgcattttctggaaccttggctgaggtgccaccttgcatgacttgtagcgttgccactggttctatgtctctgaggtgcctgtctttatgatctcatggcggtgtgatggtgtgtcctgtgagaactaaaggaggcaggctgtctactctcagtaaagcccctgtggcgggttgctgagcatctggggccctgctttgtatcttttttataaaacactgggccaggaatatttccctcctttcatacttgtcagtctccctgtgtcctccacccatgctgcccttaccccagctcactgggggggctttggtcatttggattgttactgctgagcaagcagcctagcgtctaggtgagatgacctctctctcccttggctgctttctgtgttctgtttgtattttaggggccttcatttgtttgagcagtatgtgatctaaataggtagctttgttctggtctctgtagtaccttgtaaaggtggactcatttcaggccttggaggtgatgttggcctgggcagttctgtgaggagaatcatgttcttagtccagaaggattagtttgtgtagtccagcacttaacagtgggttcttctacgtgactttgtctttggatggtgcacttgagccttgtgaagtaaaatagataagctgatggcctgtttggactttgcagtgggactcagtgtcaggtctgggaaatagctttcatcttttcttcacttcccttggtcagctgctttttctctgcctcacattttttcactataggaagaacttggcttcctttttgaaagacttggcgtttgctcagtctgccacactattgtcactcaaacaagctgtattgtaaccatctttacagcagaccattgatatctttgaggcaccagtagcttcactgtagggcattactattgaccac

SEQ ID NO: 31740 - DNA, 1158 bp, Mus musculus
tgggcttaagaaaactgaccgggacttggtcgctaagtacaagcctgcagtcccagcatttgggaggcagaaaggttggtaattcaaagctactagccataggtggcttagcaaggaaaccaaacaaccatgagcaaagaaagaagagaattggcatggggacatgtttataatgatgtattttctttgtaccgtgtctcctaaccatgtgctcggatgcattttatttcatgtgaccagctgttcttctcaaggtctttccctccatgtgctaagtctcgtccttcatttctgctttcctgtgtttatttctgccagttgttaacttgaaattgtcttctcgccatcaggttctcttgatgaagtctaaggaaaatgaaaaataaagggcatacctccctggtagagtgcttgtgtaatgcacgaaggccctgggttctgaacatgcccagcactgaaaccccctatgaaaccctagatctttggcagttgggctagggaagctgtgctaggatggaaaagccacgacttgccttgagtcagagtttctttggttgtgaatcttcaggtttttgttgtgtgactttgggggagatatttgatttctctgaattctcttagaagtagaattgctgtaaaaatggacggaaatgaaattcatctgtttgattgttcatggtaggatcactgaatggtggctgttaggaccgttgtgtacctgtttacccttgtgctagagatcctgggttctgctttgggaatgagtacggcagagaggagctggagaagtgcaaggtgtgggctgtacagctggtgctcagattcatctctgcccacagtgaactacttggggtatagagtctggccagagtgtgttcagcatctgctttgaatgactacagggcacaggaagggaaaggagaagtacttatttttggtaagggaagcatcatgtgaccaactgtcctttcaaggtctttccctccatttgctaagtcccttcctttacttctgctctgcaatgtgttatagtggtcatttgtgacaaaagtcttgctgcctgtgctattccgacaggtgctgttggtagaaagggcagcagggcattggtgctgttgtgtatcctagggataagcctagttgataccagtgagtatt

SEQ ID NO: 31741 - DNA, 1165 bp, Mus musculus
tcctgacaaaagggccaagaatccattagttgctcagtcatgatgtgggatgtcagatggtcttttgtcaacatttgaatccagaagcaggtttaacaccagtgagccatgctttagccaagggatagatgaactggacagtgagagagagggcaagcaggcaaaaaacgaaagcttccttctgtgtcctttttatatgggctgctatcagaaggtgtggcccagatttagggtgagtgttctcaccttaaatgattcgatccagaaaaatcccgcacaggtgtgccttgctgcttgggttttagttgactgcagatgtagtagtcatgttgacaaccaagattatttacataacacatatatgaccatatttaactgttaggtccaaagtattttgttttaatgtgtggttaacaacaagtcgatactgaactcttacagtgtttaagtccagtgggcaggctctaagtcgtgtccaggcttctaggcttctgtgcctgcagtgctgtcgaaggatcctgctggcattctgccctctcctttcaaagcctagcatatcccactggctttcctgcccttctcccatcttagaactgtagccccagcccttgtctttattgtctattcatcagtgtttgccctcagcctaacggtgacccagagcctgacacattgtgctcagatcccaccttgccgtcctcacaaatctggtcctttccctttccaggtctctagtgctcgctgggcactggtaagtattctgagtggctggttatctagcaccagggtctcagtgctagttaggcctgcagggccctggcctcaaattgctactagtgccggcacaggctaaagcatgctggcatttggctcataagcataggattctcaagtctcatccttagacctgataccaaaggtcttcagcgtagccctggaaactagttcaacaggtgtcctcagtaattgttttgttgttataaaaagatttttttcccttttagatttttattatttttaattatgtaggtgtgggtgtgtgtacttgtgggtgcagatgcctgtggaagctagagatgatagaacaagatttacctatgggctgtagaggtgtcaacattattcaagttctccaagaccttgcactgaatccttgtaatcgcca

SEQ ID NO: 31742 - DNA, 1209 bp, Mus musculus
cccatgtccccttatcctgcctcccatgctggttttaattgctcatcacattatctgtgtgctgtaacccaagtcctgacaactagagggaaatcaccatgagtgcatggaaacatttattttattgctatgcaagaacatagcatcaccacaggttcccttctgcagattggctgtaatgctgtcagttgggccccagcagttgtgcctggaagccttatagaccaaccatcagggcagaaacccaattacatcaagaagtttgcatcaggtggctgtgacaacctcatcaagctatggaggtcagtgagttgtgtggacatctcttctgctgcctgtcattgctcagctaccgtgtacaaaaagcaagatcacctttctccctgccagtaaagtctgtcaagacttcctttttaaaacaaacaccttgctccttttctaagcactttagtattccccaaactttggagctatggatgaaagggcatttcctggagaccttaggggcaggaattctactcattggtctcattgaagaaaacatgaaaggttacccctttacccaaggtggaaatgaccagccagccactgtgttcctgctctgatttcctctgcagggaagaggaggatggccagtggaaggaggagcagaagctagaggcacacagcgactgggtccgagatgttgcctgggccccctccattggcttgcccaccagcaccattgccagctgctctcaggtcaggcccatcccctattttcacactagagttcgttccttccttccagtctgcccagagggaaaggtgggtagtaggcacctttagacttggacagagaacagaaggatcctatagggccagcgtacagtgagatgagtccaatgtggcttgagaatagtgtcaagcttagtccctcctgaccctcatgtaggaggaatggaggcaccttgggtccatgtactagtcatccttcccttatttcctgtcatcactgggatgagaaataagaggcagggatttcaggtccattagtgtttttattggacattcttgtttgctcatttgtaagatgattgtccctgttcacatgagacacactagtcagccaggaagaaaaacagtctgtttatagcagttctctgaattcatccctgaaaccacagaatccaggccccagcctatttgtgagatgtgttcagggcgaaa

SEQ ID NO: 31743 - DNA, 1177 bp, Mus musculus
ccagttgggattgtggggaattcttggtcacatcacccaccttatattggtgtgtgttgggggagggggttagaggattagtagataagattgttgccagcagtgtggttttggtaagggtgttttcttcactgccaccttaaattgattagtttttctgttgactataattgattgctcctggtgcctctccaatgctcacgggaaaatgtcattgtctccaggcaggtgctgctcctctttctctaatctttgccgacacttttcagagcatttaagattctcaaggaaacacacttacttattcagtgtgtgccttctgaatgccttgccgccgtactctcccagggtctacctttctgaaaaaatagcccaggctgttggagaattcttgatccaccctcttgatcctccagagtgttaaggatctgcaacaccacacctgccttgaggagtcaggctttgtaattgcaaagtttgcactgggaaaggtgacttgttggaaatggtgagaaatgtcagtctcaaatggaagctaccttttcaatccacttttctctcccaagaatttaatagtggatgagagaagaaaaaaaaaaagatgtgtgtctttgctcttttattaactcagtaggtagttactaagttctttctatctgtaaaaaacattgtgctaaataacttaaagagattcaaagctgaggtgtgtgatggtgcctacctttagtccgagcactcaaggcagaagcagataaatcccagggctggaggcagcctggtctatgcagtgagttctaggcagctagacctatttactaagacagacagcgaatgcatcaaagctacagatagtttcaaggagcttaccttctctagcagagaagtagcatcaagctctatagctgtcatggctgttgtgtatgtaagagtttagctagttggggatcaagggaggctgatttaaatcaaatggagaaatcgctggtgtccatcacaactgtttttggcctctacagactatcagacctgggtcccacaaggtgaaaaactagatgggcctttcacggttcatagtaggccagagagtaacctcagaggtaactaaagccaaatccttgtcttgacttatataacttgtttcacataaactgtctgggccatcagaatcgcttgcgat

SEQ ID NO: 31744 - DNA, 1163 bp, Mus musculus
tgtggccaagtggtctccaccgtatgggacatttggcttactagtgaggaaacaagagctgggtttggtggaggaagagagaggggaggggctggtcctcgctgcaaagggccttacttacccccaaccccctgcccacagcgtctccaggtcatgattcagcccagtgaagatattgtgcgccctgagaatggccctgagcagccgcaggctggcagctcagccagcaaggaggcctacatctaggggtgcagccccccatcacccctacactggcactctggactggctgtacccacaccccttgaagactgaagatactctctgtctccacctacctcaaggggcaggtccagacaccatgaccatgcagagaggggcggtgggggacagtctgaccctgggtgggccctgagtgggcagccgcctctggaggcttccgtagaggccccttagcaggagcaggtggctagcctttgtcactgccactgtagctcctttttatgctgccagagagggtgatagctgcggccacacgctcctggcttttagtctttttttttttttttcagactgttgtcctgtgccccaactatagactgttatccagacttttctgcccgccttggctctgaactggtcatggaccggggcttcggcattttgttcatggccgctgggagccagcaggctctgcctcttccttctcaatttctccttcctgaggcagcttccaggacccacccccagactgttcacagatcagtgcggagagggtcctctgtccctgtgaccctgtgacccgggcagctcagtgtcccctgccctacctccccaggtggcattaacaacaacagcccatccagaagggtcctgtgtactgggaaggaacaaaagaaatcacaagcacaattgccttttttggtcaccatcccaggactttccccaagtgggagctgtggtccttctgagctgcccagtttggcacaaacaatgaccaaggaaatcaaggtgaaggttctaagtcaggaccaatccagctcactctggtttccctcttagactgtcactgccactctgttctggtgtcccccctcacctttctggaaaactttcagatgtacacgcccactcatggagcagggttactccagaggctccgc

SEQ ID NO: 31745 - DNA, 1204 bp, Mus musculus
actgctgtggagatccaggcaagggggtgcagccacggagaggaggtgggacagctgttaggagtcagtgagggaacactgggcaggtggcatgctggggcaagggcaagggcaatcggtcattgttaggggtggcgctgaagccatgttcttggctaagttcactgtgtttggcttttttcttcattggggggactcagtttggttttgtacttagggtagactagacacgacctcataggcggagcctctgcaggggattcacagttctgcaggcatggtgccacttgcccacttcggggagttaggaatggggctctctctgctggagcatgctcagtgagtggagtctacagggcagcagtagggcctggacacacaggggctggggcccttaggagatatggtagacatcctgacatccttcctgcactttagttgccataggtgacaggtggctgcatcccactgatcgataagcccatcccctgcatcctccctgcctcagctttagcatagctctccacttcccttcactggaccctgacaccttccctggtgctcccaaagcccattgttactaccggagattgttccagggtagagtctgacggtgtcacctcctgttccaaacccagtgatgacatctagtgcccttacaaggaatgagccctaggctgaagcaagaaagatgacgctgatgaatgtgctggcaggtgatgagagtaaatggcagaatcacacggacagcatgcacagtgtccccgttacttttttttttttctttgtcaacttgacacaagccagggtcacccaggaagagggaatgccaattgagaaaatgcctccatcagtttgtctgtaagcaagtccgtagggcattttcttaattgctggttgatgtgggagggccctggccggatggtcctgggtgtttaagaaagcagtgagctatggggagcaagccagtaaacaaggtttctttatggcttctgcttacgttcctaactctagcttcccaccttgagttcttgccctggtttccctcagtgctggactacaagctgcaagctgaaataaacccttttctcctcaccaagtagcttatggtggtagtgctttatcacagcgatagaaacctacctgggacagaaatcacagatagcagagcgtcctggccacactgtggcttccaggcccactc

SEQ ID NO: 31746 - DNA, 1151 bp, Mus musculus
ctatatgtaatgttgggaacaactggtattctaagacaacagtgacttctctccatgtacatggagctgcattgggtaagatcagagcttcctttcaagctggctacactcccattccctactctccttatgcaaaaggaaaggggaggttgtctatcaagagtctgttgtgtgccccatattgtgcagttcttctgtatgtagtacctgggggcagagtaataattcctgtcaggtgtttacagggtcctgaggggaatttcttcttctacaaatccctgatccaggagcttcattgatgccacagcagtgctgttccacatgctcacagagcttactgggtaggaggcagagagccactaatggcattgttcacaggcaatgggatatggggggatatggggatgttggtctggggcctgagagtctgcctgtaggtggcactattgtgcagagatataggtccactgagatatggaccaggtcgagatgggccaggggttcctgggacagcccttagggctgggaggagctcagagctttccaaggacttgggggttatgtggccagagcatgggagggaagatggacaagatgaggtcattgcacctccgagggaggacttggctctgcatggccttgtgggattgaggatgtagagagagggtgtggagaaggaggacaaagcacatgctagagactccatgggatgctggtgcacgggattttcagcagtcttcattgatgacctccatatcataggcaccatcttaacacaagacaacagaggctcagaagagctggttggcagcagaaccaagcttcctgcctgcacctgttccgagccctagctcatcagcccacagcaccagctgcagtcctcagtactgcccaccacccctcccttcccaggtgtgaagtggcctacagggctagcccagcccagcccagctccctccagcccattcttttggcctctggcctgtctctgtggcatccttgcttaggatcccagagggaaatgtggggtctggtaattggattccattaagcctaattaagatgcagatttgtacagtgaatgaaggaagcaatttggaggcaatttggccaggccaggtctctcatcggcttctctcctcggtgaggag

SEQ ID NO: 31747 - DNA, 1198 bp, Mus musculus
ctttagttactaagctttaaagacactgcagttggatgtggtggcccacggttgtagtctttttttttttctttccattttttattaggtatttagctcatttacatttccaatgctataccaaaagtcccccatacccacccacccccactcccctacccacccactccccctttttggccctggcgttcccctgttctggggcatataaagtttgtgtgtccaatgggcctctctttccagtgatggccgactaggccatcttttgatacatatgcagctagagtcaagagctccggggtactggttagttcataatgttgatccacctatagggttgcagatccctttagctccttgggtactttctctagctcctccattgggagccctgtgatccatccattagctgactgtgggggttgtagtcttgatatcagcaatgcagaggcaggtgaatcatgagtttaagccaaccttgactataaagcgagacccagtcttaaaaacaaaatcaccatcaccaacaagatgcataggagctgaagggacaacagagtggtttgtaacacgttctgctcttacggaggatcctagttccgttcccagctgccacattgggcagctcatcgctgtctgtaactctagctccaggggttccaagaactcttctggactctgtaggtacctgcgtcacatgcacagcctccactctatacacataattaaaaataaaaatagctctttaaaaaaaggacatatatcttcccagggattattatcttgccttttcactttaaagtggagagcttcctccttcaccttcattgcatcaggaaaacacccctcgtgggttgatgagcattgtggagaaatatgaaaacagccagccatttaaagctgagcgtgtctgagcaggcatggtggcacacagctttaatccctgcactggatgggcagaggcaggcggatctctgtgagtctgaggtcagtcacatctacatagtgagttccaggacagccagggctttaaagtgagaccccatctttgggggggggggggacacggaagctgagcatgtctgcgtctgactttggggggagtttgttctttccgtttaccacataggtccctgggattgagcttggtgtccccttgcctacaaaccatcatatttgatgttgagtcatggaggag

SEQ ID NO: 31748 - DNA, 1196 bp, Mus musculus
gtgcatggggcacaggagaagaaggaggcaggaggcagatgcaaaccccagagactggggtgccaccctctgaggtgcgggaagccgattagtctaattctccctcctgtctttatggtcaatcagagttaaatctcccaacttcaaaagactccgctgaattaacaggacacgtttagtcttatccctaagagatatcccagcatgcctcgctgctcctcatcccattcctgaaacacagtggagccaatcgttattttcatcttacatcatctttctgatgatgtgtttatcacttaaggttgaacaccctccctcctcctcctccttctctttctctctctctctctctctctctctctctctctttctccttccctccctccctccctccctccctccctccctccctcccccctttcctgcttccctcctctattctgattgggtatctgtagctgaggctgctgtgacctcagttgtctggctttgctctctgggttctagggttgtaggtgtccactgccacacccagccatgtctaacctgtcaaattaagctgtagctctgcctcggatgagcctttccctgtacacaggtcagttggaggctcactgcaagtgttcagaggctcactgactttgtcttcataggtgtggatatagaattgtgtcaggccccaccttagagtgtgtgctggagaagttggcccactgatggccccttcttcttgatgctttttcttcctgaattgctttagacggtttctcttcctcctttctcttgccttcccccttccatcctcagagctcaggctgttcctggaccccactcctgtttgatgtggtaatgtgaacagctcctgccctggcgtgccactctggctcctccacagagcctccacagggggctttcccacctgcccccggtgcttcacagactttgctgtcctttgaagaacactgtttcaattttatgaaattgttggctgaaatattttaagcctttggtgaaattaattgttcttaccttgagcaaacctcagctcttgagaaaacctggtgggatcgagcacgttcagagtggtgtggctatggacggagcccatggaaatctaacctcagggcccctctgcatggaagtgcacataagcagtcatttcctagtgttctttgtggcacagtcccctactgcag

SEQ ID NO: 31749 - DNA, 1181 bp, Mus musculus
ggttgtccaggaaactgctctgtagaccaggctggtctcatactctgagatctgcctgcctctgcttcccgaatgctgggatttaaggcattggccagcatgcctggctgactgttgttgatgccgagctgattctgaccctccttcccagcaggagtgaggaagagtccattgctccccaggtccatggccccagacacagccatggctccactgagttgctctcggatgatcggctgtagctagtgctgcggatgcctcggcatcttcagcttgctagggtttgcagacctgtgctgtaacccactaggattcatttagctcttggccagacttcctggggacatgactagggccatcagtgcttttccttgctggggctctcctgagagttggcatgattagcgtgatggaggtgggtaggagagagagcagcttattatagtgttcatggatctgtggagtggtttccaggatgtgcggcaggctaaagactggagacccaggaaagaggtggtgccgcagccttgagccaagagcagattaccttcctcaagggaccttgtgcctttctcttgtatttcagctggtacaggagccttccttgctatgatgagggtaatcagctctgtttatattcacctgatcaaaatgttaatcacacctttaaagtgaccgagtgtctgagcactgcagtttaatcaaagtacatagaatggccaccacacccctgtgtcttctcagtacagaaagagcactaatttctccctcctaggatgtggttttactttttcctactgctttggccagtgggagggagctcagagccgctgcttacccttctatagtggcagctctcacgtgcctctggagtttgctcactggaacactcctagtgccagtcatcaggtcaggcatatctgcccgggccccacctggctctgtgaagctgccctgaagctagagttcagagttctcccggctcagggccagagttgggcctgcatctcctgattagtagattcaggtggctagctgtccatgcctgagagcatctctcagagggcactggacagcaagtaagaggatatgtagccctggctggcccggaacttactgtgtagaccaggatggccctgagcttcgatgacgtgtgtgtggtcacacgtgactttgtggag

SEQ ID NO: 31750 - DNA, 1202 bp, Mus musculus
taaatcatcacttctgaaactggaaggatctagcattgcggactgatactagatggtgtctaagagctgtactacctttaacaatcatgtatgtaaaaatactggccatctcacttgcagtaccttgggagacaggtcagtcttgacacaaaatctctgggcagttttaatagagatgtgggtttgtttgtttatttgtttgttctgttttctttggttttttttttttttttggaggggattgttttgtttttaattttttccaagtttctatatatagccttggctgttttggaattcactctgtagaccaggctagccttgaactcagagatcctcctgcctctgcctgctgagtgctgggattaaaggcatgcaccaccaacatccagaaagacatgggtatttgaagggtaggtaggtctcttaagttgctaaggagaccagcatcttgttcctggacaaggccttggccactccctccctcgcttgtgcttgtggacgcagcagcctggtagtttgctttttgtcatgttcttgtcttttcttgcagcttatcaagtacggggttattagcactggcacactgattgaggacctcctgaactggaataacctatatatcgccggacgcctccaaaagccggtgagtctgtgcccttcagggtgccacagttagcaccatctccagtctctgaacttgaccttacttgatttttatgagctcataaatatggaatttcaggaaatggaaatataggtagagtcctcttccctcccatgaagttcatcatcccacagtataaagagattaccctgtgatgttgcaccctaagatgagatggtatacgtaatatgtatacatacatctttatgcatgtaatatgcatgtaaaacacatggtgggctttgtcctggctcctggcagagagctcctaaacccttggaattcctggatggaacagaggtgccacggctgttagttacactgaaccacactgccaacctagtgactctggacgagcctctgcttagcttcaggatagggctgattaccagaggaaatcggcctgtgatgagagggctcttctgcctaactctaggaaggagaaggggtgctggagactgagtgactcagaaaaggctgggaacttaccggtcacagataacagaacagccgcctggagagatgactccgtggc

SEQ ID NO: 31751 - DNA, 1101 bp, Mus musculus
ttgaaattcactttccagtgctaaagaaagggtcttatatcatgactggagtatctgtcagaaacagtgtgataaccaagattaaaaataagacaaaatggaccccagtaaaaggcagcatttttctctgccttatttaccagcatctcttggttttaaatagcatagattgtcacactttgttaaagggaggttaactttgtcaaaataagcaaataatgttaaagggtcgatgatgcttgcttgtcgctggacagttagatgcaggggaatgagggcggcaagctcggcctgcagtccacccttgagaagaactcggcatattggtgggccaccttgaaggctttctgggttactttgttgtcacggggttgagacttgagtgtgttattgacgttgtttctgttggcaggtatcagcatcgggtggaatgggccagggacttcctgcgtaggcagggccacgatgagagcactgtgcagaagatccttacagactacacagagccactggagcttccttgcagagaggagaaagaagagaccccacagcacgagccactgagctccaaggccgactcctccctggaaggcagagtggaaaaggatgaactccccgtgacccctggaggtgctggacagtcagatgacctacccggtctcggcacacactcagactgcctgcaggaggggcctggccatgccacactcgctgcggctagtccatctagccataatgggcatgtggcagaggaccccgaggttctcccccaggaaaccctcgttccacagggtggcctttggcctgaagccagcagccaggccgcaggagagaaaagggctgctcacgagtatgtgctcatagaggaagagctgtgtggtgcccaggaggaggaggcggcggcggcatcagacgagaaggtacatagatcaaagtgccctgctccccacatctgggcttcagttacagtcagcgacagtctgagagcattgctgttggttgtggcttttaaaagagagcccacattccttattgctctcattgcagtgttaggacccctctcctgtactcgtcactgctgctaatctctcactagtgcag

SEQ ID NO: 31752 - DNA, 1412 bp, Mus musculus
atcgagaaccgagaaacccggcaagtccccagcactgacgatgtggatgtgacagagctaggagacctcttcatgcacctttctggagtagaatcatcagaaccctagtcagtgctgacgccttcatttggctctgcagtcaactttccaaggcacggtgtggacgcatctgtcaccgacccgaggtgacgtggtactgggatgtgagtgcagtagtgagtccccctgggaagggaagggagatcaccacgtccacagaatcactacatttagagttgagctctcagttgtacctccaacccctttctccgggaccagctatgtggtccagctgttttaattgagtgcttttaaatgaaacctgactgccatctttcttttgtgactttcttccttaagcaacagtaaacttgcagcagatctggttttttttttttttccttgccaagacatcgccagccctgtagaaggctcctctgcagtgatcatctctaatagagttgtcgagccttggaattgatgcagctgtgtagtgagaacacatttggccatattggtgctgctgtaccatagtgtagacttttacagctgtgagggtggctattgagttccttccagtgtctcaagtcacaggtgtgtgcagttgtgaagatctccagggagactccatcttaccctccccttgtactaagagcacaagacacaggactcacagattgcttgttctcccctataaagtagtaggctccacacttgtttttgtggtaaacaggagcagtcactcctctgtctaagaactgggggcaagaaagagcaaatttgtcctgaacctgaatttatttttataagaaaacctgttattacctgtgtgcttttcacttggttgttcatgaactgcagagggggctccttgagttctgtctgcacaagaaactgcactgcaagttttgaaggagtcagtagccattaaacctaaatttaatttattttattaaaataacataaggaaccaactgtattggctcaataaaaacaaaattaaaacccaaaatcattaagaaaacctgtattcctggctttcttacagacaaggatgtggctacagatagggttgggccgcggcccaccccataggggcagctcctggaagacagattcagcacgtgggaggctgccaaaggtggagcaccgcgcttggaaagccatccacacaggacaccttagacacagtttgtccacaaagttctgtagtaccaaagcaggctcccccaggtggccaggactccatgtgcaaaactggcactgcaccactgtccatataggctcaaggagccaagttcccaattgcatgtccctgcagcagccggagtgccctaccttctccaaggccacttgccctacaaatactcagc

SEQ ID NO: 31753 - DNA, 1373 bp, Mus musculus
tacaagaactgccccaaggcaatgaagaggttggtggctgactgtgtgaagaaagtcaaagaagagagacctttgtttccccaggttagagagctcagttgaaatataacattctaaggatgtaaatgtgggccaggattgggtcggtggagagaggacctccacaagctcttggtatggttggggagataccaagtttccaactaatgagaccacgtggggccttgtttcagatcctgtcttccatcgagctgcttcagcactctctgccgaaaatcaacaggagcgcctctgagccttccctgcatcgggcagctcacactgaggacatcaatgcttgcacgctgactacatccccaaggctaccagtcttctagctgatgatgtagctgttcttaggccaccaggggacgaagaagagtcagcaggcaccactttctgtttccttgggggcagaatgcatgtttttggaaaagctgctgctgctaaggacctagactactcacagggccttaacttcatattgccttcttttctacccctcctgccctggaaatggaagctgtccaccaagaaagcctgctcagctccagaggtatacaagtcagctgagtatttgtagggcaagtggccttggagaaggtagggcactccggctgctgcagggacatgcaattgggaacttggctccttgagcctatatggacagtggtgcagtgccagttttgcacatggagtcctggccacctgggggagcctgctttggtactacagaactttgtggacaaactgtgtctaaggtgtcctgtgtggatggctttccaagcgcggtgctccacctttggcagcctcccacgtgctgaatctgtcttccaggagctgcccctatggggtgggccgcggcccaaccctatctgtagccacatccttgtctgtaagaaagccaggaatacaggttttcttaatgattttgggttttaattttgtttttattgagccaatacagttggttccttatgttattttaataaaataaattaaatttaggtttaatggctactgactccttcaaaacttgcagtgcagtttcttgtgcagacagaactcaaggagccccctctgcagttcatgaacaaccaagtgaaaagcacacaggtaataacaggttttcttataaaaataaattcaggttcaggacaaatttgctctttcttgcccccagttcttagacagaggagtgactgctcctgtttaccacaaaaacaagtgtggagcctactactttataggggagaacaagcaatctgtgagtcctgtgtcttgtgctcttagtacaaggggagggtaagatggagtctccctggagatcttca

SEQ ID NO: 31754 - DNA, 1594 bp, Mus musculus
gggcagatctgaatcagcttttgcttaaatcacttggttacctgtcttcctttttctgggcacagaaagaatggtgtcagtcaggtttaaagactgttgtgttcctatagacttgtatttatttttataacttctacaaacaactttaagtctgtaactagtgtacagcacatttgtgtttgtattatatgtattattttagattgaagtagctattgaacactaacctgtagtgacttggtaggattttaatattatgcagtccccttatagacagttactcttgtcatgagattgttgtattacatttttaaagaacactttgttctaggagcatacattttggagtccaacaggcttgggtttcaacaggccacacagtgagcagtgttggcttatctttatggtgggaccagaacacctgtgaggtgtgcttagacagcatgcagtaggtagtagaactgctctatgtcttgagccttgtccaatgttcccttatgttatgctttggataatttttagtaagaaagcacgcttagattggaacaccgatgccgcctctctgattggagaagaactgcaagtggattttttggatcatgttccactcacaactcacaactttgtaagtttcagcttctccctttctttgccattttgggctctctacagtggatggctgacctttcagagaagctctgggtgcacattgttagttgctttcagctctccctatgctgtcatgtattaccagaggcccctctaccctgtctctgaatctgacagtcttgcaactatgattcttccctgtgggtactctggtaaggacggggagggcagtgctgtgtttgcttgtcactcgagttctcacaatcccgctttcttgtcacaggctcggaaaacgttcctgaagcttgcattctgtgacatctgtcagaagttcctgctaaatggatttcgatgtcagacttgtggctacaagtttcatgagcactgtagcaccaaagtacctactatgtgtgtggactggagtaatatcagacagctcttgtaaggcactgtggtttttttttccttgtaaaaaatgccagggtcaggtccagaagcatttttgaggatgctcattatacattttcaatgtaaagtctgagctttaggtttgctaaataaatgattgctgcgagtcagaaactattgactttagaagcataatagttctgagattagttagttttagtgtggtggtcatctagctgtaaaataaacaggtagggagctggggatgactcagttggtaaagtgctaactgtgcaaacatgagagctgagtttgattaccggcgctgacataaaagctgggcctacagtgtgtaatctcagagttggggatgtggagacagggctgtccttgggtttgctggccagctactctagctgagtcattgagctcaagtttcagtgagagatcttgtctcaaaaaataaggtggagagtgattgaggaagactcctagcattgacctttggtattcactccagtcatatgaactcagacacacatgcacaaacaataccaaaagcaggcaggacccattg

SEQ ID NO: 31755 - DNA, 1195 bp, Mus musculus
tgatgactatgataatatgtagtctaaccacgatgcatgtaacctgtgttcttggacttggatccattgtactacaaattaaaaagcatgttagatgttttaaagctgtactttagaaagtggtatttcataattatactttgctttttgattaaaatgttcagttttactagaactagtgatggtttttcatcaacctttatgtacaaaaaataaaatgtcatttatcagtttgaaaaaaaatagtcttactctttatattgttctaatgaaagtattttccctagtaaacgtgccgtagactactgtccccttagtaactaattaagggtagttagttagtacaggagatgcataatgttccaatgctgattcaggcctatgtgcatctgcttatacttaactctggatattgaggtgtttttctctgtgtgttcactattgcaaacagtatgtcataagtctataccattttatatgtcgtgcgtgtatttcagtgtttatctttgcgagtggtgctgtagcctacactggtactaaaggggatcatttgtttgcaggtcaatgtgcggaatggaatgagcttacatgactgccttatgaaagctctgaaggtgagaggcctgcagccagagtgctgtgcagtgttcagacttctccaggaacacaaagggtaagagcaaagccagccagcaccttttaggattctaagcgtttcctagccacaaataacttggtatattacaatgctttgtattagcctcctagggattagtgcatgtggatatactctgttttcaaagtatcaattcagaaaaattgcctctgagaacttgaaattattgcctggacattgtcttaaaagctataataaatgggaggtgctaatagcattgtccagggatggaggcagcattgttagaaggcctgtttttgagtgcaaagacttttcctggtgtttgccatgcagagtgggtactctgaacatgactgcactcttttttatggttaagaatgctaggggctaaagagatggctcattaatggcatttgctgctcctcagagaactcaagttcagttcccagcactcacatcaggtggttcacagctaatggtagctcccgctccaggagattgtatgccgccttctggcctccaaggggacctttacacacatgacatacataccactta

SEQ ID NO: 31756 - DNA, 1286 bp, Mus musculus
gctggataagacaaaagaagtgtctgacataaggctcaaagggagattctcacagttttctaaaggaggagagccattactttgtctccttgctgacttgcaagtgtctgggcgttagtcttatacctgaggcgcgttccatagttaacacatatgtgttccatagttaacacatcagattaagctggttagatggccagtctgctgctttggttctgcactcaaactaaaccctgaatattacaatggaaaactcagactttgtaagtagatatggaatctgggagtttgggggcagcagctaggatgatttcttacaaagagtagaaggaagaaataaatcactatatttctttcctgactaacttgctcacagattacaaaaaaagccataaaccactgttttcacaactttctatattgtgttcttgggttaagtacttttcttctagaattataattatttgtctttcaggtataagtattgtttaaactgcatcaatggagcacatacagggagcttggaagacgatcagcaatggctttggactcaaagatgcggtgtttgatggctccagctgcatctcccctaccattgttcagcagtttggctatcagcgccgggcctcagatgatggcaagctcacggattcttctaagacaagcaatactatccgggttttcttgccgaataagcaaaggactgtggtatgtgaccctagaaaatgtagttctcttacctttggagactgtgctatgctgtccagtttatagatgggagaatctccttgtcacttgggatctctgttaatcgtttttttttttttaactcccccaagtgaagatttatttttatttttaaaaagacttatttggggtttgagatggctcagtggttaagagaactgactgcttttccagaggtcacgaggtcaaatcccagcaaccaaccacaatggtggcttacaaccatctgtaatgagaagcaaataataaaaacctatgggctggatgtgggggagggggaggtggaaagagctgggccggagcaagagggagaaggaaatggggggaaaaaagaaaaaaaaaagacctatttgttttatgtctctctctctatatataagtgttctgtcttcatgcataccaaaagagggaatcaaatcctattacaggtggttgggagccagcatgggtgctggagatcaaactcaggacctgtagaagaacagtcagccgctcagatttactttatgaaatcactgttctgctcactctctactgcc

SEQ ID NO: 31757 - DNA, 1757 bp, Mus musculus
ttgggaataccagctgtgtagtacagcagattggtggatgctggatcaggtcccctcttccctactcagatgtggatatctaactcaggactttgtgcgtgccaggtgaaatactctaccaactgagccacatacccagccccaaagttgtgatcttcaaatagcagcacagtagtagaaaaaaaatgaaatctgattatgcatcagattgaaattaggcctttatttgaaacctatgtttaaggcgggcgtggtggcgcacgcctttaatcccagcactcgggaggcagaggcaggcggatttctgagttcgaggccagcttggtctacagagtgagttccaggacagccagagctaaaagagaaaccctgtctcgaaaaacaaaaaaaacaacaaaaaaaaagaaacctgtttagaatgggtaacagagactcagtaaggacactgtctccctctgcaggtcaaggctggttctgtgaagcaggagctggagaagcaggaggagctgaagcgctcagcaatgcgggcagtggccgccctgctgaccaaccctgaggtgcgcaagagccccactgtagctgacttttccgcccagatccgatccaacccagaactcaccaccctcttcgagagcatccaaaaggacacagcctccggccccagcacggactctatggaactcagctagctgcccccaacacaagtctcccttcttatcccaataggccttggcctcttctgtccttccctgtcagcctcagtgcctttgctagggccccctgctcacagccccagtgccaaagccgggcccaccaactcaggacgttcattcacgagcgtcatgtcccaccacctttacactgcacccctccactcacttaggagccagaattggcctatgcccaagaccagaaggcaagcagggggttgacttcctacttcacttactctgaagtccaaatgtcagttagcaccctgaacctagccatgggtagggtatgtagagcccatacaagagaaccaatttatacttagtgcctcattagttagcagagtgagaactgtttacagggaagatagtgtggctcattggccaggtgtaggtccactgtctcaaacatccctaatcccatcacccaggagtgtaacagtcggcttgtgctcttcccgactttgtagttagtactgaaaatttaagtataaatgacaggttttgatttttaagacattgtttctctttgtagccacatatggcccagactcaaatccacctgcctggaattaaagccagctgaggccagttatctgagttaataacatatacaaagctctcctcacaggattcttatccatattgattcagtcctggaaataacaaggccgatggcatagacctgttatcctaattccttaggaggctgaggctggaccacacactcaggtcgtagtgaacaaatttaagatctacctaaaagcaacagggcaggatagctcagtaccacgccctcctggtagcaacaactttctaacctgtcctaaaggaccctatgccttcgggcagacatatatacaggcaaaacaccaaagtttaaaatagctcagttgtagagcactctccaacactacagcaagatgataaaacctcatttctacaatgagaacaaaagcttagtaataaaaaggctgggatgtctttctctccagtcatttaagtgtcacccgtgacagtcaacccttctgaactccattactgttt

SEQ ID NO: 31758 - DNA, 1167 bp, Mus musculus
gccagttggccttctcactttgatagtttaactcaggtacccagtcttcactccatccccaggtgcttgttcacctcattaatgagcacctagagcaaggaccaaaagaaggaaaactaattaaaaccaatgcatattcatgccaaaacaagtggtccccaagcctgtttaaaaggttaacttggcccgaaaatattgcagcagcttcatgcaagaattgccacaggacactatggccttgctgggctagcatttgctgctgtaatctagttgctctggtatagaagagaaccccatggggctgtgggagagacaattcagtggcagcccactggcttctctacccattccacaggaaccctattcctacccccacccctgcccacaaatgccactgtgatccacagctgaagttgtttctaattgcctaaaggcagtctctgtgtctggagcttcaaagagacaggcagacctgcactaattcccttcttcctctagcagactgccttgggaaggaccttcagtccaggacagaccctgtcatggcttcttgctgtcttacccttctcactcaccaggcccacagtcgcctgcactcagtgctgtttgtaacacatctgttattctgcctacctgtactttttgctgcccatccctgttgcctttgagtttcttggaattgtggctgtcctcggaatctcttttctattcacagcccttctatagccttgctctgatggttttagcacttgatctgagagaagcttgcccataatttaatgcttcttttccttaaaaaataaaaaaaaaaatcaaaaaaacccactaaagtgaagcatttcttgattcccttttccatgctggtgcctagcccgggtgagtgaggctggctgtgttggcctgggtgacttgtggttgtagagttggccatcattctgcactgttgatagctgtctgctccagtttctggtctttggtatactcagtgtggcccggtgatgaaggctttctactccttaacaggtacagttggatccatcgctgatggtgtttctttagccccatcccaattggcctaaaacatttgtcaccagaacagtggggaaaagccttcctttccagccatgtctgacagtgagcatgctttggtgtggtcttcactgcttt

SEQ ID NO: 31759 - DNA, 1416 bp, Mus musculus
agagagatcaggagtcatagatgcaagcatcaccaacagaatacaacagattgaagagagaatctcaggtgcagaagataccatagaaaacattgacacaacagtcaaagaaaatgcaaaatgcaaaaagctcctaacccaaaacatccaggaaatccagaacacaatgagaagaccaaacctaaggataacaggtatagaagagagtgaagattcccaatttaaagggccaggaaatatcttcaacaaaattatagaagaaaacttttctaatctaaagaaagagatacccataaacatacaagaagcctacagaactccaaatagattgaaccagaaaagaaattcttcccattacataataaccaaaacaccggcagtttgaatcacggtccgacggaggagtgggcgctgggatctcgctgagcgtccgcctggcctcgtctcttcctcgctcgtcggagcttcagcacggtccgagatggctggcggtaaggctggaaaggactccggaaaggccaagacaaaggcggtttcccgctcgcagcgagccggcttgcagttccctgtgggccgtattcatcgacacctgaaatctaggacaaccagccacggacgtgtgggcgcgaccgccgctgtgtacagcgcagccatcctggagtacctcaccgcagaggtacttgagttggcaggaaatgcgtcaaaagacttaaaggtaaagcgtatcacccctcgtcacttgcagcttgctatacgtggagatgaagaattggattctctgatcaaagctaccattgctggtggtggtgtcatcccacacatccacaaatcgctgatcgggaagaaaggacaacagaagactgtttaaggatgcctggattccttattatctcaggactctaaatattcctaacagctgtccagtgttggtgattccagtggactgtatctctgtgaaaaacacaattttgcctttttgtaattctatttgagcaagttggaggcttaattagccttccaaccaaccaaatttctgcattcgagtcttaaccatatttaagtgttactgtggcttcaaagaagctattgattctgaagtagtgggttttgattgagttgactgtttttaaaaaactgtttggattttaattgtgatgcagaagttatagtaacaagcatttggttttgtacagacattgtttccactctggtggataagctcaataaaggtcatatcccaaaaaaaaaaaaaaaaaaaataaccaaaacaccaaatgcactaaacaaagcaaaaaatattaaaagcagtaagggaaaaagttctagtaacatataaaggcagacctatcagaattacaccagacttctcaccagagactatgaaagctagaagatctcatacagaccctaagagac

SEQ ID NO: 31760 - DNA, 1175 bp, Mus musculus
ctccctctgaccttcccagttccctttgctccatccagcttagcccaagatcaaacacaaccatcccccaacccaggaaaagcaggaggtgctgtccactccactggctccctcagcttctctttcattccttccagcaagccaccagctaccgctaggcttttctctcccccccccccccacctttgctcctcagaagagaaacattcagacagctttattatcttagaatttgccagatagcacaattgttgggtgcagatctcctaaacttattagctaacctatatcagccagcttcagctgacctacttggttaaccatggtagtggaggctgctggttcttgttccccaaagatcttacatgactgctacatttccaaagcttggctgtaaaggccacttccctttcctccaatctctttttcctcttgggacctggaagtcgaacctttaacctttgcccagcaattggctcctaccttctttattgacacaatcaagaaccagttagggaatcagcacctcccccttcaactccgctgttagagactttgctgcttttgcaaaggacttgagtttagtccccagcactcacattggcaacacatagctgcctgtaaatccatcttgacgggttctgagacctctttctgatcatcttgggcactgggatggtttgaatatgcttggcccagggagtggcactattaggaggtgtggacttagagaaagtatgtcattgtgtgcttgggctttaagatcctcatcctagctccttggaagccaggcttttcctgtttgccttcagaacaagttgtagaattcttagctcttcctacaccatctctgcctggatactgccatgctcctgccttgatgaaaaaggactgaacctctgaggttgtaagccaaccctaattagagagttgccttggtcatggtgtctgttcacagcagtaaaaccctaacttagaagttggtaccagggactgggatattgctgtgataggcctaaccatatctttgtttagaagaatgtagattttgggactttggatttggaaatcctattaggaatatggaagatggtagtgctgagggtaatttgaactgtgtaggcctgctgtcccaagaagtttcaatggaaaagaatgttattatgtcatctaca

SEQ ID NO: 31761 - DNA, 1117 bp, Mus musculus
ggcttggggtgggtgggtacccaggagccctagaaagcattggagtgttcataagtccagtgtattcactggtgctctgagctcacattctgtatgaattcagaggctttgcatgggaatgtgacagagtagttcagtgcttgtttcatatgtgcatggctctggtttcctgtccaacactacagaggactgcatgtgttggggaaaggagagaagaggaaagaaggggagagcctgacagaccagcaaggggggaggagcgagggcatcagtccaggttcctgagggctaggcagccctgggctgcattttgctgtccaacacctgcacaaaggttatttcatttcctaagtgttttgtggctgaacctgactcatgagtgctgtcaggaggctcctgctggagcatagctctgactgtccttccatcctcagggcatcctgatgtgtctgggtccacctctgccccatcactgaaggagctccagaaacatgggcagcctactccggggaagagctcacatttgccaactcctgctggcctctttgatgatgatgataacgacaatgatgaagatgataataacttttttatgccatcttctagcaagccttctaagaccggtaccacttttaggctaattctgggaacttagagaagaaaattaaacttaaggggacacagttcttcacattcggtgtctcttacagttccagaatgccttacttactgaacattactgtcattgtcttatctatgcttaaattgtgctatagccttgggggggtccctcataggtcaatcttttctgctttgggaatcaattactgaggttatcttctttaatagggagctgaacttcttctgtattcttttcttaaagtttttgcttctgcctttcacattacaggcagaaatttagtcacacttcctcctagcaactccgggtagttacatgagcggaacattgcgtgcttgttgcttaattcccagcttctcttttttctgccagagggctcgtattgtttttgctttggtgcatcctctcccctcctccgaggtccacactgatgtccttcctgtgcttttactctctgacggagctatgcctggggag

SEQ ID NO: 31762 - DNA, 1162 bp, Mus musculus
gagtatgcttgatttttaatttgtttgtaacttaacagttagtaaactcattttacttgccgtattccatatttaaattagccactagataatgtatgtctctgccactaacagagctggctggtggctggcagacctctggacttggggaccacccaagaccaagaagcaaagctgtgaaagaccaacctatttgaggaggagggagaagagaaagatgtgtgtacgtgtgtgtgtgtgtgtgtgtgtgtgtgtgtgtgtgtgtatgtgttgagtggaggggcccttgcacatgtttgtgtgtggtctggctcagctgatgggtgctcctggggtccacctagatctgcccccaatgctgggatactgatgtgtgtggctatatctggatcttttaaacatgagatctggggatttgaactcaagtcctcatgtttatgtagcaagtcttttttcctcacctagccattttgtcgtcactgtcctgtggatttttaatgcatgatttgtgtcttaaggaccaatggaatattgctgattcgcataccaagttagcatctgacaataagtccaaaggagagctgtgggactcgggggccacccaaggccaagaagcaaaggctgtgaaaaagaccaatctatttgaagatgatgacgatgatgaagttgatctgtttgctattgcaaaggacaggtgagatgtttacaatcgcaggaaaagtttcatgtgtgagacggaatgtctgttgacgtggtcgatggcttagtgttacatacacacacacacacacacacacacacacagacagacagacagacagacagacagacagacagacagacagacagggctgctcttgcttatctgtgcgaaggctttgggaaagtttgccttgatttttatttctgacatttttgtaaccttgaaacagttttttctctaagaggtttaagaatgatattgttatcttttatgtcttcccctccctgttaggtataccctaaaaaaggttacttaaaagtttgttactttgatagaaatcctgaaaatgttgaaaaacatgatattaggaggagtaaactcccagcaggcactaactatgccttctggtctatgtgactgagctgaagctagtggcttgtggagtgtgacatcgggcat

SEQ ID NO: 31763 - DNA, 1831 bp, Mus musculus
tgcctagggtccatctccctgagctttggctgcttcacctgtcttctccagagactgaggcaaaccgaagatgaatcttttgtagttcctagtagaagccccgtgcttagttttcagaagcatgtggaggctagctagaaggcttgtggaagcaagttctgtcctgttatccccttgtctactccctggagtcatggagttcagttgtggagctgttctgccagggctttcagccattatctaatgggcccaccccttaggtcagcctgccctctctctcccagaccacataagcctccctgtgctcactgtgccccaaagtgcaattactcacactcagtgaggacaccaggcagctacagactgcccactaagctctgactattccttttagcagctgctgcggcgagtctctgaccctgtccatctgtctgtgacaagatgttccaacattgggtgggcagtcaaatgaagatggaggcatttgtagagaagaaagtgtccctcaatgggggttgtctctgcacagctgccctaggggacttgtactcccacatagataggtggctttggaagcatggcttcatgttgttccctttatttcaggaaggcctgatgctatctcttctctggcttctctgatgaactctgtccttcatccttcccccgctcgttttccctgaaggttctctgatctagtaaacaactacacatgtgactcagtgcaggagactggcaaggcacggctgcgaagcatctggcagagctctgggtctgcccagactctcctagtccttgcctctttggcctctgagtaattttgcagggctatctgtctaccccattgttcctcactttgagcttagatatagtgggaagatggcatgtagctagaccaagcagatctaggatgagggagacctcaggccaggagggcttgtgcttgtgggtcaaatgaagaaggaagtcgtctcagggtgtcactggcagccctctaacttggcctttaccccgtatgtcatagacccattcgcacagctttgactctagctgccacaagtgagtagttgagggttatgctcaagtgtatcacaagattttcctggaaatgtaaacattctcttagtctaggtctctctgtctctcctttctggcttcaggacactcttcgttaagtaggcttagttttcaaacctgtgggtatgtccaagtggacacagatgtgcaggctcaggcggtgggggataggacagttcaaggcctggggtagtatctaagtgacagaggggaaaggctgtgtgggcagggtgaagagctgtaatcttgtgggtgtggttagatgcacatgtatatatttcattctacctgttcaaatctggtttggaataatgcagcttatagctgcagctcaaggaaagcccaaagcatagggagagaaaaggcacttgtctctgtgtcgggagtgagtgacgaaggcatgtaactggtgcacatttagatgcaacgtttcaagttgattgttaataaaaaccaaatttacactggtgtgtgtagtgtagtttctaaaaagcacttcacattttaaatttttcttggaaaatttctagtaatctaaatgtctaattttttaatctttttgtgtatgttcattgtttctcagtattactgcttgaataattctctgtacaggggatttgtttgtgctatatacggggtgtctaaagttagcaataaagcctttctttacaaaggaattttgtgatgagagtgttttcaaatggggaagctaggataccctttcccgcccacatatcagtaaagaataatgagg

SEQ ID NO: 31764 - DNA, 1173 bp, Mus musculus
tccacaccggcgagaagccctactgctgtgatgagtgtggccggtgctttagccagagttcccacctcattcagcaccagagaacccacaccggagagaagccctaccagtgtgaggagtgtgacaagtgcttcagccagagctcccatctgaggcagcacatgaaggtgcacaaagaaaagaagccacataagaggggcaaaaatgccagggtgaaaactcacccggtgtcctggaaaaggggcaaagggaggaaggcggtggctgggatccgccaggtaaagggagccacttccggcctttttaaaaagaagaagtgaaaggtagaggagaaagccgctccgaagagtggatgctttacagtagagcacttagataccgctcctccctagcatggagacttcaggagtttcatgacagtgcgctgaaactctgagtctagctgccctcatttcctttaaaaataaataaatttatgtgacatggagcagaaagaactgaaacaatagtttggtaagaatttaatattcttagcctcagttgaaatcgcttccctccattttgataaaaagaatcatgttttcatgatccactggcgtgccaatgattactcttatttttcggaatttctgtatacgaaatcattaaagaaagaaggaatgggttttcagattctaggatcgactacattttatgtttttaatgttttgtagtttattaaccattagtatcagcattgactcagtatttgacatagtaaaatgcattcagattcatagattttggtttttattagtgtatattgtacgaagtaatgagcttccttttctccaatgtgtatgaggtatctgtatgatgtgctttgctcacacccaccgttaccctcgcccacctcctcctggttctccttttatcccagagagttcccctccacttaaaatgttgcccctagcgtctgtgaatgacagacagtgtgtttggttatttttctgcatccactttcctgtgcctactgtaatgttctctagttcaatccattctccaagcaacaggactgtggcttttctttttcgtctcacagtctattgtagtgtttgaaggctttagcgacaacccgcttttgtttgtttctttccttctgctatgttagtaaagggtgagaaggtctccatg

SEQ ID NO: 31765 - DNA, 1194 bp, Mus musculus
gctgccctgctttagaacacaagaaaggactcactggtggtggcctgtggatggcctgagcaataaagtcatcctaaattgcagaattttagcatcagaagtgcaaaggaatcttctagccaaagactctgaaattgaaaacctgaactggatttttagcctcaagacatctgcctgtccggtgctcagaggtaattaactgacttgactgttttatgccaggcctgtgctagaccctggaggaacaaagacagagccttggtaattcctcttctggaggagcagacttggagacagttatgcgcctgatattgagtagacagctaagagtgaatggtactgaatggtactgtaagccacgagacagcttccgtccctgacccaggaactcactcagtgctgggggaaccactgacacaggaaaccctggaagtggccaccaacttggtggtgtttcacagctgtccaaatattacttaaggctttttaaaataagttttactttcaaactattatcaaaactaatttctgaatgactagagtttggaaaaactctagcaagttgcacagagcagtgctctctgctgtgttcctctgaagtgttcacaaatgttagactgacctgccacatctgctcttagaggacaactggagaaccaacctttgcagggcataacaaccccagaacttgagactatggaggctgtggcttcacagtgcgcttgggctatcacctgcgatggaggtcacagccttctggtgtgttctccacttctcagatgataaaggtatctatagataaagtgaagatcccggttagaaaggactgtcttccaaaatagatctgtcctcagagcttcacatagtaaacagcacaggtcgaaatcagtgtgattacaagattgcaaaagtcccgagctcaggataaacagggttgtttgtccagatcaaatgaccagaacggatcggaaacaggagtaggggaaagacttgtttttctaaagcaataataacctttagactttctcagtgacaaaacaaagtctttcacccagaatacatctggcttcttggtcacagggcaaggagagagggcttatttactctactcaggtgatctggtaggaactggaattatgccagctgcactgtgtgaacacagctgcagagtgacaggccatggaatgtccttat

SEQ ID NO: 31766 - DNA, 1104 bp, Mus musculus
gctggcttcctggcttccatcctgtctcctctgagtagctgatgctgtgtcctcaggaacctgctgagggaaaacggggagaacaagcactaagccatcgctctgtgctctagtgctccctgctctagtgctccctgctctagtgctccctgctctagtggacgagcgctgtcaactgccttactgtcaaccacagcagtctctgcttattttctatttgaataagagcactgcacctgaggaaatgccaaagccaatagagagcaatattcttattgtagagatggaaaagtcgaggctcggagaggaggcatctgcagtcacccaggtcttagtagctcccagccctgaggaagaaggcctttctgctacactgcttaacttaaaggaaattctacgtgcaaatgcttctactgtgaagtaaaagagaggacggattctccttctgagggagagtagagatactgtaaactaaggcaggccatgagtcagatgccacaaactagtcccatacctgtcttgcaagtgtgtgctccatttggtctcctccctttctctctgattattgtttctccctaccccctcccctcccctcccctcccctcccctcccctcccctcccctcccctcccctcccctcccctcccctcctcttctcttctcttctcttctcttttctcttcttcctctctctctttccctccccctctcgtctccccctctctttcccctctctcccctctcttccctctctcttctctcccctctttcccctctctcctctctctctctcctctccccctttcttctccccccctcctctttcccctgtgccctcttcccccccttccccccctcacatatttactaagcagcctttactgcctggacttaaatgtgactgggctggctgttgtcaactctgcctcctgagtacttagtactatcttctaaatgtatttaaatgtatacaaatttaatggaacacttctccttgttagtcagtctggaataggttatgctgcagtaagaaatgcccgaaacaccagtgtcttagctaatccagcagagatggcttctctttccaaatgcaaatccactgtg

SEQ ID NO: 31767 - DNA, 1244 bp, Mus musculus
acgggagagaagccgtaccagtgttacgaatgtgggaaaggcttcagccagagttcagaccttcggatccacctccgagtacacaccggggaaaagccctaccactgcggcaagtgtgggcagggcttcagccagagctccaaactcctcatccatcagagagtccacacgggtgagaagccgtatgagtgcagcaagtgtggcaagggcttcagccagagctcgaacctccacatccaccagcgggttcaccgcaaggagcttcactaagtaacatgagcccactcagaagacttttattgtaaagataaatatttttcacgaccgagtgtgcatatcagaggtagcatgcttgcctagcatgtatcagtccctgagtttgagccctgatacgcccccacccacacacacacacacacggtttccagcttattaatactttgtgcatgttaggaatgtgtgttcatgcagagaggggtatgtgtgttgtgctggtgtgtgcatgtatgtgtgcacgcacgtgtgtggacgtctgaggatatctcagatactacattctgtatgtgagactaggcatctgtctgtcacacatggtgtgtaatgtcaccaagtaagccaggccagagtcccatggatctaactgtctccacttcccagctcaccgtggctagggttgcggatgtgtgccaccacatccaacctttttatgtggattctgtctcaagctttctagacaagagctttgctgcctaagctatgtcccagggctccagtttaatactttaaactcttacgtttgaattcctcaaaggaaagaaatagttaagggttattccgatatagcccctcacagaagaaatcaatccgagtactcagcacattttatgttatacagtgaatgggttactctggtttctcatatgggtagagtgtataatgcaattctgccagtgttgttagaattatattctacattttttaactgcaagaactctgtatttttccaagcacagcatggttcccttcattcatattctctgagaaattggaattcatgtttcctctgaaattatgtgccttgtttttcatattccatttaagtcctaaatagctctctttaaactgtgaccgtccaatgtgttcatttgagggtggggtgggggagctggaggtataacgggcatggtgacctgttgtgtttagtacaaaaatgtgcatcagtttgcactcacactacaggaagt

SEQ ID NO: 31768 - DNA, 1505 bp, Mus musculus
tatttaattcttctagttgaacaagacagacgatatctggaaatagttaatacttaagtctttcttcccttcgtgctgcggagtggaggtcaaaacgtggttcagttcttccatctgtgtattcagactgagcgcaggtagctaaggtctggcaaaaagtgcgttagcccattgaacaatgtcgaagtacttttgagtacgccgggtggctatgcatgcttttgcgctcagcgctcggaggtagatctcagttgagaacagtcttacagaccaaatcctgacttaaattttgaactttctgcttttcttatctccctcgtgttgccattagtcttaccagcctttttttttttttttaagttacaaatcattatgtagccacagaggatgaccttgaattccagatcactcagctccacctctagattggagtactaactcgaccacaccccattagtagttactgggcatggcaggctttaggcacgctttgtcagccccattctgtctgtattatgcccgtttttgtagtaatttttaaaaaagattcatggtttgatttgaaggaaggcctgggcacactggatctaaaagtaaatgcaaaagtgattacttgtttcttgaggtagggtctaactattatattacgccttggcgcaaaattactgtatatttagataaggctggcttcaaactcaagcaacacacctacttttgcttccatagtgctgtgaattgctggcattaaaggcatgtatcacgaagcacagctaatacaagggggtgtgtgtgtgtgtaacagctttcttttgtttttcgagacacggtttctctgtatagccctggctgtggctgtcctggaactcactttctagatcaggctggcctggaagtcagaaatccgcccacctctgcctcccaattgctgggattaaaggtgtacactaccacgcctggctgtattttgtacttttgagatgtttggttttgtttggggggggggttattttgttctttttggattttcaagacagggttctctttgtagccctggctgtcctggaactctgaaatgtttgttttatatgtgattatatttaagactttagtaaatgccgaaataaaactactgaccatttgcttaccaaaaaaatttcagttctctgtgtaacccacaagtgaatggttgtgggcagatgataccagtaacatggagaggtcagagaacagcttttggcccactttgctactgtgtcttctgggataaaactggggtcaccaggatttcagcaggtgcctatcatccctttctcttaaaaattttatttattttgcttttgagacagggtctctatgttgtagctctggctgacctgtggctagttctttagatccggctggctttaaactcagaaccttctgctatttcttgagtgctgggactaaagggtgtataccactactcctagggtctaaattttttcccctctgatgttctgaaacgg

SEQ ID NO: 31769 - DNA, 1240 bp, Mus musculus
catttgcagctatcaccagctttagtttcaggtttctctcctccagtttttgcagaaaataaactttagtaacattttaaagtagttatgtataagagtgcttgcagtgttttcactacaagtgtgcttaggtcagaggacaactttagccccttctcctgtgggtcttttgggggttggtaccctcaggtgtcaagctgggtgcctacccagctaatgcctttctttctgcatctttctgggtccttaaaacataggcctttgaaataatctaatcagttctcaatctaattgctttgaattaaaatacattttgtgattgcctcttgggtacagactttataaggttcatttttatacatgtgggccaattacattcaaaagtcaagccccccttccactatgtggtcactggggaaccaaacttaggttgtcagcttctagaagtcaagggctttgggggaactcaagaggaagcctaggcaggcctctgcccccggaatgctggaattaaaggtgtgcaccaccacacccgatattaatatatgtaaaaaaatgagacaaggccggaattaactcgtacacactatatacactggtatcggctttagatcctcctgcgttaagccccctgagcgattaagtgcggccaccacgtctggcggaagtttttagttttttaaagtttatgtttcaacatggaaaatatcctcgagcccatggtcaaaagaaaaaaagcaagtattgggtgtcggcaggtctttatcctgtagcatcccagtgctaggtgattcggttttactttgctgcgtcttcaacgcctcattgcgctcccctttccaactgtagctgtagtctggactttgctcaggtggctggctcctttacccagaactcggcgagaagtcttcccctttccttcccccacttccggcgccggccaaacccactgttcgcgggccacacctgcaggcacgcttttctcattggtgacatattggcgggcccggcagggcacttccttctctgcaccccgtgaccccagtccgactgccgctgtagatcacgcggctgcagcttcccggactccggacccgaacgcccttttcggcgtggtgagccccgcttcccgcccgagcctcaggctccaggcagcgtactttacctggtcacctagaagtttccctcttggagcctttccacccttcggcctgcgcgagttcttgctcagccctcttcc

SEQ ID NO: 31770 - DNA, 1957 bp, Mus musculus
tctgtcccctctgctaagaatgaggaaatagtggacaacaaaactgtcctaagttggatcccagtatagttttggagacaccttttaaaactacagaaaagggtgttatgaaagtggaatctcagacatgttgagcataagatgttttggaaaggtgatggagcttagacctggaggattatcatcaagatttagctggacaaggttgggcagaggatatttggatggagaattactgtgcatgtcaaatccttcagggaacagagagtggggaaattacaggaatgaaggggaaaaggaaatgatgggatataggtaagaatgtctgtaggatccaaggatttcattaatttagtctctgttataaccagcaggaaatagggcttagaagtggggcattgaaataattgggttacagttgtagttagagaaatcttaagattgtgatagagtagcagggagtaagttcttttttattagagttaagagatattaggaatatgagaatacagaaagaattttgaacaaggccatctaatacagggctgaaattccagctaccaggaggtggtgaggcaaaaggtctaagttatggtcagcctgggcaacttaaacacagttgagtggtttcaaagtggctgtgtgtgtgtgtgtgtgtgtgtgtgtgtgtgtgtgtgtgtatgtatgtatgtatgtagctcaggagtggagtattttatttgcctatcatgtgcaaggcactatagctaagggaacttttttgatcacatttcaggtgggctagtctagatttaattttgatgaggtcctgcacatcaagtgcatattttgatttaaaaagattagtttttttgtagagcttgtagactcaggtaaaataaaaggtataggagtatagaatgccatgttcatttgtgataccaagggttgtgtgttaaggccttcaaagattgagtccagctacatgtgtgggagctgattagaatacctaagaggattctaggaaggaatggttaaattctgtggagacagcagatgaagatattattagtaagaacttattttattgatagtaagtagaagatgcaatagaggggcccattgagattctacatttaagggggggggggaagatcagtaagttgaggcaaagctggccaaagaagaccttattaaacaatgactggttagtagtactattgacattcagtgcaaggaagacagtggtcagtaactataaagggttttctctaagttgggtctctttgtacactgtagctgtcttcagacactccagaagagggcatcagacttttgttacggatggttgttagccaccatgtggttgctgggctttggaagagcagttagtgctcttaaccgctgagccatctcaccagtccctaagttgggtctcttaagtagagctgtaaatatcttacaagagacaggttcttgtttataagttgataaaacttaaagaatttgtggctttccttcagggagttctgggtccttttggaagtaaagaacagcttttaaagctgcccaggaatctgaagggggagcccaagagtggatttgtagatgggattgtccatatgtacttttcctttgtttttattttgagatagctagggtcgtgtagcttgacagaagttagccttggagctactcatgctgattcttcccagatgctgggactgcaggccttgaactcctagacacagacacagacacacacacacacacacacacaccctttatttatttttaaagaagcagagtttcactaagttgtgtcatctcaaattgaacttaactgaatttgaatttgggtctttctgtcctggtctccagagtatctggttaaataggcactgccaccagttcaaattatgtaggtagtatttgaggcctacctgagggcagttcaacttcattagagactggttgg

SEQ ID NO: 31771 - DNA, 1213 bp, Mus musculus
ttcttttccatgttctttctgaaatgtttttgtagctcaacttgatgtaagaagaaaacgcaggtgtcttgatgtatagcctgccttgtgagagtactatagtatgaaacagttgacaaaatgaaattttatatttgtccccaaaatcgtttgaattagattctgcctggtacctgtgttctgattggtcctggagtatacgaggctaatgttgagttggtcagcacactcctacagggaacagaacactggttggtcgaaatgttcaggcagatatgcctgctgaccactaagtcaatcatttgacttcagtctttagatgaaagctttcattgatcacatgtagaatattttttttcacagaaaataattaacatatctaaaatctacagtccatcacaaaggcataagtcaaaaccccttagtttcatgttgctttccctttgaatatgtttttaagcaaatggatatagtagatatagtttagaatttatggtttgattataaataaaatatattgttatgttaccaatgttcaaaattcatagtcaaattgtagtagattgttttgaacattttattatattggaatgcaggacagtagctgtgtttgggaacgtctttttatataagccagaggcatagaagatatgaacgttatagcatggttttgtatggcttttgttttgcactgtcttgtttagcatgggcacatatatatttattttctatatgctaattttgccataattgtgtttgcatttgtattatactttcagttgaaagagttttattgaaaaaaaattaaatgcattatataataagaccacccttgatttgagaaaagggaaggaaggaaaagtgacctgataaaaatataaattatggagtactttaaaaaaatgtacagattgaatgctactttaattgaaatgtaaattatattaatgagacaagatgaataagaaattatattccagtagaactgtactataatatttatcacacatggatattttatcattgggtcatttactagatccagaaattggagataaaataaaggcatgcatagtttttttaacccctgacttttaaagggacctgctatttctatataacccatgagaactcagaaaaagtcattatttttgttcagtaaatcataccatctcaaaagttacaaatgccaaatttctaggtgctaatgtga

SEQ ID NO: 31772 - DNA, 1195 bp, Mus musculus
tgctttgcaagtgtgtcattagggagctgtgagtttgcttattaattatttacgtgcttgtcatcaattttccgtgctgtctgtgggactatgattgtactgttttcttttaaaaatgctaaggaatgaacacagggattctgcgcaggctggccagagttctaccaggaaactctgattccagtccttttcagtccttttttttctttaaatttctgttcggggacagggtctcactaagttactgagtgtcataggaagtcttaacttactctgagcccaggcaggactagaaccttgaaacctcctgccttagccttccatttctttgcatagtggactggcattagcttcttactgcacagtttgaattggtttttatttacttgaaatacaggctgtggatgccgaaagaggaaaagcaggtggatgtggaaacgggccgagtgcgtcggaaagccatttttggagatacagaagatgagtctggagatgaagagagtgaagatgaagaagacatgtctgaagctgacgggatggaacctggctctagtgatgatgaggcggaagaggcagaggaagaaggtgctgagagcagcagcggtaactacatgatgggtaggggacgcaaacgaccaaagcttgaggagcaggaggaagacagtgaggcagactcgccagcgtttgctgatagcgatgatgaccttgagaggagctctgggggcgaggaggaggccgaggaggcggatgaaagcagtgctgacggtgcctccacaggggagagggacgctggggaatgcggctctgttggagaagctagtgaggagagcccgtcagcagcccaccagtggaggccccatgcggatgcacagaagccctccccggtgagaaaagcagccctcaccacttctgactctggccactgtacagccgaggaggcgtttccatctgaggatgagtctgaggactctgagctcagtgcagaggaagaagactccgaccacagagaggttagggggaagcttgcacaccctctgcgcgacagcggacagaaacctgcctcggagagcctggttgatgagaccagcgacattgaaagtttactcaaagaggaggaagagtacaaggaggacaatagcagctctgtagaaacgtcaggtaatgactccacagaaacgccaggcatccttacact

SEQ ID NO: 31773 - DNA, 1152 bp, Mus musculus
ttcataaagagaatctccttttaaaagaacttacttaatttatcttccttttctttgttatagaattgattttagttctctaaagctgtgacagggttctgcggaggattcatctggacctaggtcttattcttgttttggtctcattgcttgtgggggatctgttacatttttaaatctctttatgacttaatgttggtatgtcacatattcatcagtttctctcagattttccagcttatggaataaagattttgaaagtatatccttattaccctacggatagaaaaaaaaatatccatttttgtttttaattttattaatttggatagtcttgtttaactcggctaaagctttggtgtgtgtgttttatggaattagagggtgctgtcttaagatgtaatgctttagggaggcctgaaatatttcataaagataaaaattttacttctgatacacagtgtaatctttattttctattttttaaagagttatttatttattataagtacactataactgtcttcagacacattagaagagggcatcagatctcattacagatggttatgagctaccacatggttgctgggatttgaactcaggacctctgggagaacagtcaacaagaactcttgaccactgagccatctctccagttccccagtctaatccttataactaataccttttaaacaattaagtttaaattgcctgttttgattgagaagtaaatacaattgtgtaaagatatcatttccttttttaaaaaatttactccatgagtttggaagttttgtccacatgtatatctgtgtagtgcagtgcctgcggaggccagagagggtcatcgggtcctttagaactgttgctatagatggttgtgaactgccatgtggatgctctgaactgggctggagtcctagaagaagagcagccagtgctctaaccactgagaaatctctcccttcaaaagataattctcaacttgtaactttactgaatgagttcagaattcctttttaataacacttaccagacttctagaaacttgctaattaaagcttttattcatccttattatcatcaagagcatatgggctttagaagagattaacagcagagaagttttattagggtagtccttataaa

SEQ ID NO: 31774 - DNA, 1223 bp, Mus musculus
cagacttgtccctgaaacccaacctcagtctccagtgctcttttgggaacaaccttccagggaagcttctagatcagcaaccacttgcctgtccaggcccaggaggaattcctgccctggtgctgtagggtacctgtagggccacgagcatctaagtccctccctttaccatgtgtccagagtgtggtagaggtcaaactgaaggtcaagctcgctcccctgtggcctgtgcctctcaaccactgccgtacaagggaagcaggggtgagggggagaggagagagagatgatggagacgccttctacacctgcacctctgtcttgtccccagagggctggaggcctgttcggcaaccatgtcacctactatcagagtgacagcaggggcaactttcctcagacgttcgccacccagcgcccactgcacatcaacaagacagggaacaaccaagctgacactgagtcaccgtcccatgagaagctggtggactccacgttcacccccagcagctactcatccacgggctccaatgccaacatcaacaatgccaacaacactgccctgggccgcttcccccatcccgctggctactccagcacggtcagcactgtggagggccatgggcctcccttgtcccctgctgtccgagtacaggaggcagcatggaagctcagctctaagaggtaagcaggagggtaggcctggccatgagggctcacataccctacccagacaacaccaggaaagatgggcttattctgtctgctcagacaagccttctgtgtggggtccctgctctgtgccttcccttcagggtcagaacagagaggtattgaataggattccagggacttgtcagttgggtcaagccatctcctaaaggctctgctgcccacagctagcctgtggttccttgtattgactgcccagaccaggatgctgcttcaaaaccaagtctccacatctgtctttacatgtttaagtttgtgtatggggtacatgtacttgtgtgtgcacgtgtgcggaggccagggattgacatccagtaccttcgattactttgcactgagctgggattcctcactgaacctggggctcaccaattcagctggtggctcccagcttctcatgaatactagggattgagcctggggcctcacgcttgtataacagtcaccttacaactaagcccctgcgtcatgcatgttattctacctactat

SEQ ID NO: 31775 - DNA, 2628 bp, Mus musculus
gttggtggtctttcttctcccttccttgctccttgcagcagtaacatgtatgagtaccatgcaccaactgatcgtgccattggagctccttaaacagtaatcacaaccaagttaggggaacatttgtatccaataaaggggtgggagtgcggttttaggcactcctttgggagaacaaagaaattaatgtaaataagatttctaatttactgtttaaataagaatttatataaacatttaagacataggggcagggagggagggagactttttttaaaaagaatgaaacatgcaagtaccacacactgtttcaattttgcacaagtgatgggaggaggatggagtggtagccccagaatgcacgatgtcttggtgcaccaaggtgccttccctaggccgataacacttggaccctgctggggcagagtggacagccccagcccaggaacttcctggccactctcaagactgagagcctttgggcattcagagggggagggatgtggaagtcgtgtgtgcttttcaatggaagcagcacaggttgtcatagtggctctagagaaagtgtcatttgggagactgttatgtaggctagtgatgacccttttgaagagtgaagccacctggttctactgtagatgtagtagagacttgatgaaggggaggaggacctgggggcatcagcataggaatggtctgcttctccctggtgtctcgtttgaccaggtggtagttcttatctgaatagaggtatggccattttccagaccctctctgtggagctctgagccattctgcaaattttgctctattgagaatcactgccctaactgtccttcctcctggaaatcaaaaactgcccccccccccccccccccagcatcaaagctccttcgtggagccggccactagtgagattctgatgagcatgggtcccacctgaagtcatgcaggcaggtgtggaggaccatcccttggactaggaatggtggcgcttttctctggtgcaggcttggcaggcttggcatgacaacagattcttctcccgttgaacaagaaagtcagtaatacctactgtggagttgttagcacgcactgaatgccatttgcaagacctgtgctacagagttgaaaaggaagtggactgttattaccaggtagtcggatagaattaaacccacaattttgaattgctgctagaagttacaaataatttctttgtcctagggccttcttgttatgggttttagagagtggcagtgagttgggtcttggctcctaagtgagaaaccaagcacttgagtctcttagactctaggcctcactccttggggctggtgggtattgcagtgtaacatgggcctcgggcatcccaaaaggggtgctgggcagtatgaggaggtcctgtttttacagtagtgttttcttggtcgtcgttgtccttcctctaccttcagatcgccacccagctgcagctgggacccaggaaggagtccattgaaaacctgggaagaacttcagagtattgggttgtggataaggtcactgccctaggtaggcccaacaggaagctctgggtgaacagcattgtgccagacaactaagaacagtgttaattcctcaagaagcagttcatcaagacagtgtccatccggaaggaagctcacctaggcttgtggtagcaacagcacatatcagcagccagacgcactctctggtcgtgcactttgggacatgagtttgagacgcttcctcatgacacctacaggagtagaggtctttgggactggtcatccctcttcccaaagcagggagactctggttcaacatagcacaaactcttagggaaccgaatcaccaccaccactgtagtccagtaacttcccttcggtgtgtgtgtgtgggcatgtgtgtgccctgtatgtctgcgcagctcactaccaacagcctccatgtgcacttgaccttgtggtgcctccgggaactttccaggttggcacctgaatgccttactctcagcagtctgaggctcgcttgctctgcgcacacgtttcagtctccttttttggccctaggctggttaggaacctgtacaccttcactctctcatcattaaatagtggcctttttcagtatttcctctctcccctctataagttgctgaaatcacaaagcacacttttggggatcatagaaggttggggttccagaaaggcatctctgtgatggttccattcactatggggatttccctacttgctgtcttcttgatttctctaataaaaagagccaaatggaaaatgagttttgttgtgttttttttttattgttgtcccccccccccctttaaaaacttacctcacttttgggatatccttaatatcctaatttagtcaggaagtttagggaatttttagaaacttcctgccttcaggaggttgatgcaggaggatcatgagtttaaggctagactgggcttacacagaccttgtctaaaaaaggtgagctttctctatacctggttaaagtgaccatcaaggcctcagggctgtgtggaacctgaccacatgcactgggcccctgtattttgtccgctccatttgcaagccacttgaaaccctcagggtg

SEQ ID NO: 31776 - DNA, 3331 bp, Mus musculus
ggatgtgaggcccgagcggccgcgcgggggcgggaagggcggcaggaaggaagcgccgctcggacgcgccgggaggaggagcggcggcccggccggaaggcggggaggggcggccgttggcccgcggcgggccgctctcggcgcctcccggggcggcggcggcgcccgcgcctcctgcacccggcgcggcgtagcggcgggaggaagatggagacccacatctcgtgcctgttccccgagctgctggccatgatcttcggctacttggacgtccgagacaagggtcgcgcggcgcaggtgtgcacggcctggcgggacgccgcctaccacaagtcggtgtggcggggcgtggaggccaagctgcacctgcgccgggcgaacccgtcgctgttccccagcctgcaggcccggggcatccgccgcgtgcagatcctcagcctccgccgcagcctcagctacgtgatccagggcatggcgaacatcgagagcctcaacctcagcggctgctacaacctcaccgacaacggcctgggccacgcgttcgtgcaggagatcggctcgctgcgcgctctcaacttgagcctttgcaagcagatcaccgacagcagcctgggccgcatagcccagtacctcaagggcctggaggtgctggagctggggggctgcagcaacatcaccaacaccggccttctgctcattgcctgggggctgcagcgcctcaagagccttaatctccgcagctgtcgccacctctcggatgtgggcatcgggcacctggccggcatgacgcgcagcgctgccgagggctgcctgggcctggagcagctcactcttcaggactgccagaaactcacggatctttccctgaagcacatctcgcgagggctgacgggcctccggctcctcaacctcagcttctgcggcggcatctcggacgcgggccttctgcacctgtcgcacatgggcagcctgcgcagcctgaacctgcgctcctgcgacaacatcagcgacaccggcatcatgcatctggccatgggcagcctgcgcctttccggtctggatgtgtcgttctgtgacaaggtgggagatcagagtctggcgtacatagcccagggactggacggcctcaagtccctctccctttgctcttgccatatcagtgacgatggcatcaaccgcatggtgcggcagatgcacgggctgcgcacgctcaacattggacagtgtgtgcgcatcacggacaagggcctggagctgatcgctgagcacctgagccagctcacgggcatagatctgtacggctgcaccaggatcaccaagcgcggcctggagcgcatcacgcagctgccctgcctcaaggtacttaacctgggactttggcagatgacggacagtgagaaggtcaggtgagggcggcagttccagttcccccgccccgccctgttcatcccaggaccaccactgttccgcacactcacgcgcgcacttacacgttcagggcagtggccgcggtggggcgatgacggaagcctgggctctcttctcctagtctggcgcccctctccactgcgtctggagttgttctgctccctctacccactctcctttcccagtgaggggagagatggaccctgctgtttctctgcccactcttctgcagggtatggagactttcagccaccgacaactgtatcctggggcactgcatttggaaatggggtgggggcggggagggactagtcgtttcaaccccgaggagttgaggaaagatgcctgccttcacttacactttcatttggatactgtgatctggcttttaattccaaacgtgtagaaagcaagcccgacttgaacagccttctcatccactttgtagccagtctcctctcatcgctgcccctttggtatctgcaactcacttcggttctggttttgttcttgttctgtttttttgttttgttttttatctgcttcctttttagttttcaaagaaatttgaaatcattgttcttttttctttctgctgagtatattctcatatatatatatatatatatatgtgtgtgtgtgtgtgtgtatgtatatatatatatgtctggctacctcgttttagtttacttttttctcttaagccctggaattctacaagagagatattttgagattgaaacatttttgtgcctagactggaaagatgcccactgggtttgtatctgtttttggttttggcttcttcccaacctccctgtacccaatgtgccccacttccgcatcctggctacgaccccaccccccaccccacccccagtctattgggctttgatgacccaaccatgtttctatattgatttaatttatagcacaaatgtatgggagaaatgagagcagaatttcctttttgtttgtttgtttgagatgcagatttgagtcttgaagaggagtattatatatgcaaattatgccccaccccaaccctcttgcaagtcttcccaccgagaggttagctagtgaggctgttagctagtgaggcttcccgtcctgtcggggagtgagccgtgtcagcagagagcctgaggctatgtgaatgaagggaggaggctgaacttcatgtcctgtctgagttctgttctcgaaacgggagcttgtgggtttgaaaacttttgtttctaaatggaggaatagatgactttattttggtggggggttgggactgtggctttaaaacaaatcgcttttgagtaggatgtatatttttgttggatattttgtttgtttatttttttagagtcctccacagcaacatgagagaccatggagaaacccagagacctttatcaattaattgtactgtttgtgaatttgtataaataacaaagatcctcttaaaacgtttatattcttacagcaaaaggttaaactgatatttatataataaaagaggaaatatgaagtatgtttttgaaaaaaaaagcacaaaatcccccccttgtatctgtgaattatttttaaggcattgtgtgtcgggtacatgctcaggtgggaggtgttaggagtgcacagaaactggaactaaggtggagttcagctggctcatgtgctgtaagtttatggttgagaatttcttttgtgtaagatttaccactgacatccaaatgttctgtctctagaaatgtgatcagactggagagttctataaattttggttttaaactgtcaacatggaaactgaaagaaaatgaaacttttttttttttttaagagaccagacttggaagagtcagagtggccagtttctttttgggaatggtggtggtagaggtgagatccaggg

SEQ ID NO: 31777 - DNA, 1099 bp, Mus musculus
gcttgttgatattgtttgtgtgattcagagaacggggcagttacattgtgtccattgttgagaatattaaaatattaaaacagtagttatagaactaaaaaattaaagagctgtgttttaaaagatgcaaacccatcaatatcatgttaacaaaggaattcaagctatgggcagcctagctcctccccccaggtcggtgtggtggtagccaggccagcccttgggagacacactctccacacctgagttaggtagctgcctgggaacaagaatctggggctcagagactctcagttgtgtcagggttttctctacatcctcaggacctctgggtaggggtttcaaagttggtgaccccagaaccaccctcaccctcacattggatcaagccttgtgtgcctagtgctatattgtaacctgggcttgggcctggagcccctgcttgcaaggccacaggacctcttcctgcccacttggtgctatctcatcatgtccatctatcagggcagcctgggctcctggagcctgtgggccaggtgccgtgggtggccctcaagagcttagctctctctggctcctgatcctagatttttttttcctttgaagctttctcttggctccagagatgtcagagttagggaaggaaatgagccaggctgaggcgaggagatccacccctatgccacagtgagcacaccagcccagcccctttcccgccacaccagtattacacccattctttaaagcatctagtcccacctgaggcacatgccattcagtggcccagctgcccagtgcagactagaaacctaggccggggatggggacgtttctctgcacccctacttcagaagaggcatgttgcactttagtggggaacccagaacgttgggcactggcttcctgtagcttgagtccctgtagatagccatggtggcagcctgatggcttgtgtgaagcagctgcagctgctgccagctgtgcacatgtgtgcagctcctagagtcaaattgccggcctgatgatgacatcacaaagatgtgttctgttcaactttgccttggtaattattgtaaacactttgttcaatttttttttc

SEQ ID NO: 31778 - DNA, 2440 bp, Mus musculus
agggatggtgtggaagccctgtgagatgtgctcagttgaatcatggcagtgaacgcataccttctcccttccttcttcgcagaccagcattctttgttctccaccctcatggcatctatgggcttgggtgagccacctctctgcctggaaggtcccatgtggtaggtcaggatctttgctgtcagtgttactaccctgaaacatgttcgtttgtgtcagctgcctgcttaacacagccatgcacacctcatgggcttggccatgctgcaatcagatgcagatccccccaaccccatccccagctgtagaggacagctatcagatggagtcgggccctaagagagtgcagctcatgtctcattcttcatccctgaagcagactcctgacactgctgtcttctggtgagaggctaaggcctctcagcctgcatctccccttctgcccagttaacactctcaaaggaatttaatgttgcccacaaatctctctcaccctcaacctaggacatcatgcggccactactgtcacagtcacagccctagctccccttcttccctgacatgaagtgttcccttgtatgggatgctggagagaattcctcgtgagggttgggtggcctctgccatgaacctctcatggaggtgcttttggaggtcccagcctggccaccaggaatatggaaattaggctaaaagatgataatcattgctgctcagttctctcaattttttttaattgtcctatccataaatcctttagaaaatcccggtatttcaggataggaaggttaggatcttatttattctcataaggaaccactacctagtaacagcttcacaggctacagtggaaatcagaaaacttagaagagtccaggcccacaggagtagcctagcactgccactggccagctgctgctccagctgttctgtgagggatcaccacagacaggcctccttacatgtacccattttggtgtttattagcagaagtaccatctgccacccttactaactgcacatatgaacccctccaccccttccttctccatcaggtccctccagagaggttgcaggagccctgcaggacatgtgcttaattgagaaggcaagtttgtaaggcagactgtgtctgatctctgcactatagcaaaggcttctcctcctcagggagtgatccagcagctcaagtggctctggagactgtggagctaaagttgaaccataaatgtagtgtttgtggtctttgtgttaggcaaagttaatagggtatctggcattgggatcctactgactgccattcagtaagccaatagttactaaatgcgtaactgccattgcactgtacatgtcattccatgactgtctgcatgcacatgatccttaaggtagctggccctgagagctcactgcaggttggctgagatcatccctgcctcttcattccatcgtcaagcctcatagccttcgcacctaaggtaaaggtggcctccccccaggccttcctcattggcctcctccaggccttcctcattggcctccctccaggtctttgaagaagggtcaaagcaagaatatgtcgctatgtagggtatgatacccacaggcctaagtgccagcagacccctgtgtcagcagtgtctaccccaagtgacatcataaagatgatagtaggaaaagagggctagaagccaacctggggctcccagctctgcatgccttagtagactctgtcccaggccctcattgagtgactgggattagcaagtacttacggacatttaagatgaagaagtcagagtggggtttagcaactcagcaatgcggaggggctcctgcaattcctgccagcctttattctcccacttgagaaggcctgagtgtacctcttcctcgccagtgggctttagaagagcactggaacaaggagagcagactggaacaagaccaccagtggtgttggaggtcacgctgtggctggccgtgtcctgtcccatccgtttggcctcctgggaagaatgtgttggctcaatttctttctcaggagagatgaagtcagtccagatggttctcacgtgctactgtcctgccctctgctattaacactgggactggcttggcaccacaccctcctatgtgactgaagcacagactcattggcctccctccaggtctttgaagaagggtcaaagcaaggatatgtcactccgtaggatgtgatacccacaggcctaagtcccaccagaccctatgtcagcagtattgataacaactctcgagtctgcctcacctcctgcctgcagagtccagagtcatgggaaaggagccagagggatgaggccgcaccacaggcctgttgggcacccgccgtcactgccagtctcagagattctgactgttcaaagacatgttcttcctgtgaaccaagaggacgttcagg

SEQ ID NO: 31779 - DNA, 1159 bp, Mus musculus
gtatttttaaaaaactctttcataaatgagctgctttaagtgagaacataatatatagctccacgactttgcaaagaatttaacactccatctttgactaccctggccaactagaatattgaccaggagaatcgctcagtgagaagaaatgtaaaagtggtgaacattattctctgcccttcttctctctctgctgggcctctattaaagaattccagtaagacaggtgtgcctgggacattagtcagtcaattaatagtgggactttcctggtacattctatattgaaaggcagtggacagtaacccaaacaaaaaaatcaaaattacccactagtatttattcagttaatatatgaacagcaaatctgcctctgacaatgtcagcaagtaaaaaagaacacagtgcttttatagccgattcagaattgtaagcagccacagaagactcttggtagatggaaaactaattttctaggaagactgagagtagctgacacatatatagaaacttttaaagggtgtgggtatgtgtgtgtgagaaagagaaagagagagagacagagacagagattacaggttcctcttctggtgatggccagagaggatatcaggtccccttgagttggaattataggcagttgtaaactacctaaaatgggtactgggaaccaaatgtcaattttcggaaagaagagcaaaaaatggctcgcaagtaaaggcacttcccaccgagcctgctgccggaagttcaatccccaggacccacaggtgaagcagagaaagaacctctcaagctgccctctgacctgcgcgtgctcactgtgtcacaaacacacaaggaagtgaacataacttttaaaaacctcttccaaacaatggaatttgaattccccaggggcagatgctctagtttctaatcattttcagccccttttcatccagtcttttatgataaggacttgggtaacttctcagagtgttataaccagctaagctatactcagatcagaggagaaccaggttcgggctactgacctataatcccagcttcaagaagctgaagcagggggatcacaacttcagcttcaaggatcataatgtactgacgctgtgtgtggacagacagcaatatttatgggtcctgtgtggcatctcct

SEQ ID NO: 31780 - DNA, 1189 bp, Mus musculus
cccccaaactaatctgacctggtgtaaagcaactttgagatatgtattaggaaaatagcagttttgacagacagagagagcacctggcataaaaccaatttacagctcttttgggggggtgagatggggtggggatgggggctcctgtgagcaacaggaagtcaatagagccatctgcaaacaagcttcataagcaatggacaatttccattacaactccatttctcagagtgccatttgtcacaagttttatttctctgttctttatttaaaagtaactgtctcatatttaaatgaaattttaacattaaaatatagcagctttcgagttcttttttctttcacaggttcagagttgtactgttgattttttttttttttggcataatgatattctattcattcagttgtgttgtcttcctttgagctccactggggaacgctgtgtccaaaaaacaaaaactcgtgtttcctcctcctggaaggagattctcatggaacttgagagtttgttacattggtggtgccctcggccctttttagcgaggctggcagtattcatcactcactgactgcccctgcaaacatctgtgtcatgcatcatcaccttctgctgtgtcaattgcttatatttcattctttgcattactagaaagcttcacacatgattcctgtaattcctttaatgttctcagcagtgtgcagatatgctgaaataagtgtgtgtgtgtgtgtgtgtgtgtgtgtgtgtgtgtgtgtgtgtgtgtgtgtgtgtgttcctatgcaagccagggatcaggaaagtcaatacattccagtgacccacgaaggtagaaagacactaatacactagaccccgtagtttctcatctcactgtaaaggagtgaccagtgcagcagcattccctggtctgcagctggctgcatgtgcccagaacacagtcatcaaatcctctttatcatgtcaatttgcctcagttgtgtccaggaagaccaaggtattggatttactcccttgttcatagtagtaaatcctgcacttcttttcctccaagctacatgagaagaagcataaaaccgtgctagcatgcagctgctctttgacttagcatcttcagtaaaactgtagagcaaaaacagcatgaatacttggttctagctggaaactgggatttttgtctttaaagga

SEQ ID NO: 31781 - DNA, 1148 bp, Mus musculus
gcatacaaaataatagatttcatagtgacatttccatatgtatgaatcattgtgctctgcacatgcacacattacacacatacacacacatagaaatacacaccattaacaacctctcttgtcccccttctaacttgtctcttcctctcttcatgtagctcccttctgctttcatgtcatatataagaatatagataaatatgtatatttcacatggattcctggtgcctcaagagccaggtggatccctgagtctcaggtcagcctgttctataaaggctcttccaggccagccagggccacataatgaaacccagatccaaacagtgacaagaaaaaaaaattagactccagatgtaatatggtatgtttgtcctatgtcgtcctaccgtccccacaacaccttttcttaatccccctcctccccttcccctgtatattagtcattcactatagatgtgataaaacaccgtgaccaagacaactcaaagaagaaaggttatttacacttccagttctggaggtttgagccattgatggcagagcaaggccctggctgcaagagtactcacatctggaattggaaacatggaccagaggtctaacttgaaatggctggagtctttagactctcaatgcccaactcccagtgacatacttcctccactaggactatacctcttaaacctcacaaacagctctaccaactggagaccaagtactcgaatgtcccagactatgggcaacaactctttcaaagcaccataccctacacaatccccttacagttttatttttttggtgcatatttttaatccgaattttgtagtttgtcaacttgaacatttacactctgcttattgacaaccttttgttttggtgtattacagttcagagaatgtcattattcttgctttttttttttaacatatgtaagtatatttctctagcatatattctttaatagaatttgctaataagaacatatacattgtttgtttgtttgtttgtttgtttgttttgagacaggtttctctgaataaccatggctgtcttagaactcactctgtagacgagactggcctcgaactcagaaatccgcctgcctctgcctcccaagtgctggggttaaaggcatgcgccaccac

SEQ ID NO: 31782 - DNA, 1203 bp, Mus musculus
ttgtcttttctgtgtgaaatctactatactagagagcatttggggaatacagcattggacgtataatctgtttatagtgagttcttgagcactttgggttttattctgctatctcccacagagaagtctaataaaccctgttactgatcatggcagtagttatcaaggtacaatgatcgggcctgagaatcaggggcagcttcttactggtttctgtgtgcaattgatattgttgttaggtacatcgtactgaatgtttgcaatgcaatgtattttcctagagaaatgtgactccaccgtataatttgtcttacccagtagatagttcttgtatgggttacatcctaaattttagtttgataattatttctttttccttataagctattaaaaatacactgggggttagtgtaaattgtattggatcacaaatcaaatggaatgaattttattccttattctgttttctagttgtgacttagtaagttccctaacttctctcagaggaaagaaagccactcatgtctcacactgaaataacctataaagactcccttcgaacactgagccttattatggcttctgtgtgtgtgtttttgggaggacagtagtgtctgcatgtaagcctctgtgtgtgtaggcttgtacatatgcacttgatacttagaaattccctttctgcattcttgggttgtcagacattaagttccatgttttgtctttcaggcaaagtaaacttctagtaaagtgaaatgactaatttatttttccacattcgtttatctgagttcaattcccagattccatgtgttattaggaaagaaccaactccaaagatcctacgagtagtcccctgactcctatatatgccatactgtgcccctcaccaaaagaagaggggtatattaattaaaaaataatagttgctgcttctttgttagtgctatttgagaaagaaattgtggcctagtatttacattatttctaacattttttttcttccaaaagtacagaaaattaaatctttttaatttttcttgagcgttgtgaacctgtttgttgctgaagcaaccagactatagaaggtacttagtcatacaaacataagcaaagaaaaagccagtccgctgaaacattaatttgcagggtattacttcagattactttcattttcgtttggaagctatattgccaaattttact

SEQ ID NO: 31783 - DNA, 1151 bp, Mus musculus
agctgtaagctgactttatagccatagagaaacctcacagaatcacattgttgtttttttcttcataccatttctggcacctaagttcaccctgcaaccatgtatggaagtgctcgatcagtagggaaggtggaaccaagcagccagagtcctgggcgatcacctcggcttcctcggtcccctcgcttaggtcatcggcgaacaaatagtacaggagggagttctggaaacagtgttggaggtggcagtgggaaaaccctttcaatggagaatatacagtccttaaatgctgcctatgctacatctggccctatgtacctaagtgaccatgaaaacgtgggtgcagaaacacctaaaagcaccatgacacttggccgttctgggggacgcttgccttacggtgttaggatgactgctatgggcagtagccccaacatagcaagcagtggggttgctagtgataccatagcatttggagaacatcacctccctcctgttagtatggcatctactgtacctcactctcttcgtcaggcaagagataacaccatcatggatctgcagacacagctgaaggaagtattaagagaaaacgatcttttgaggaaagatgtggaagtaaaggagagcaaattaagttcatcaatgaatagtatcaagaccttctggagcccagagttaaagaaagagcgggccttgagaaaagatgaagcttccaaaatcaccatttggaaggagcagtaccgagttgtacaggaggaaaaccaggttagtttcatttatacatttatctttatgggctgagtccatgtatataaacaaaaagaggcattccttttccatcccgtcttagatttcccccatctttgttcttttattttttttatttatcctttttactttagaactctgtttctactttcttagcctttttaagacttgttcctgtacatggtgcaaaacactcacacatataaattaaaaaaaaaaaaatcacaaagcagtgacgacaacaacaaaaacccaacttgagctggacagtggtggtgcccacctttgattccagcactcaggaggcaggggcaggtggatctttatgacttggaggacagcctggtctacagaacaagtttcaggacagccaaggctac

SEQ ID NO: 31784 - DNA, 1177 bp, Mus musculus
gcgggcgccggtcgtgctgtggcggtggcggcggcggcggcggctgtggtagtgtcggcggcaggctgtccgggaagcagtagcagcaaccgcagcagcagcggcggccctgaggagagtaaggcggccgcgtcggcagcggctcgctcgtcaggcggaacctcgatctgcccagaggtcgcaggcgccgaggcatttgtcgtttcctacccggctcggcgctcccggccctggctgggcagggcagagcgcccctggggaggggcggagctgtaggtgaggcttggggacccctccccctcctttttgggccgggggtggggaggaggatggggaggtcgggagggcggaccccgccccagcgcacccgagcccaccggcggccgcgccctgcggagctcccggattgggcgggagcgaaggcgctggcggtaaggatcgctgctggaggtgggaggtggggggcttctggcccaccgagagccgagggtgggaggcatgatgtggggctattggggagccctggagttggggtgcggccaaggtggatcggatgtaaaatgtttaagatgatcttattattttgaacctggttagatagaagaggaaaggttgtatttcagatggaaaatgaggcatggatgtcgccttggaggtagctggaggggctactgcagcagatctcacattgccactctagggttttggttcttttcttggtcagatgagtagaattcgctgagggaagagaatccctttgcgttgacttggggttggtaaattgggagcgcgagtgagtgaggtttttacacacaagaaggaagatgttggtgtttagacaacttcattctatagcaaccaaccatgaaggagtgagtctcattactcttagcccctcaaaagtgctatcagccttttcttttccttgcccccctcaaccccctctcctgtgcttgatctctttgtaccatttttcatttttgagttgacccgttaagaaaaggccctggactcagagtaatagttgcaggtggttgtggctgattgctttgagcgaactgtgaacagttctgttggagatgactgtatgaaattgcttaagcgtttaaagtgcaactgtctcttacatcttgtttttcaatagaccttgatacattttgcgtttatttaatcatta

SEQ ID NO: 31785 - DNA, 1132 bp, Mus musculus
acccagctacccatgctaaagtcctgtgtgtggctttggtcctccataaaaacatgtcatatgtcagctagacgttttttcctgagtctgatctgttcccagagatagactggtagttctggtttgatttttccagaactctctgaaatacttgctgcaaagtttcctgtggattggaaattttgccaaaaaacaaaacaaaacaacaaacaaacaaacaaaaccaaacaaacccaaaatatccacatgaggaataaatgactttcattcacatttaaaaatgccaaagacattttaatagctttttcttaaaaaatttattttctaggtgtgttatattgaaggtcatcgggtaattaatctggccaatgagatgtttggttacaatggctgggcacactccatcacccagcaaaatgtgggtatgtttctgtgtgtgctgcctgcctcacactccttactgcataactcctccacttgtgctcaagagggtccagtgagttaggacacagggcaggtgggtttgtttgacagctgaggaacatggatggggtgcaggggtcagtatctctccaactactttcctttcccattcctagattttgttgacctcaacaatggcaagttctacgtgggagtctgtgcatttgtaaaggtgcagttaaaggtgaggggctggggtgccacaacttcctgggaggaccaagtaggcagtgggagggagtctagagtggagaccagggatctgactcagccagggtgcctagaaaggcagtattcaaacatccttgctcatctgcccctcatctgtagaaaggatggatcttagtttagattgatgtgtgtgtgtctataacttgacaattgaaaatctataatgtaacagatatttacgttatagttcataacattagtaaaattatggtgatgaagtagcaagaaaaactactttatgtttggcgtgcgtgtgtgtgtcatacaacatgaggaactgtgttaaagtgtcgtagcatagaagggtaagaagcccgcagttagctgtctaggcctctgagtgtctgcagcacagtcttcctccttctgcctcttacatccgagacgacaggctcgagtgtgctactcaaggcccgct

SEQ ID NO: 31786 - DNA, 1100 bp, Mus musculus
gtagtcttcttgcctccaaccttgagtcccaggattatagggcttgctctgccatgtctggctaagctgtacttttatcacggaagggtcacactgtttctgtggcttgtcttaggtcatatttcctgttgctgttgtcctactgtatttatgcttgaaaattccatttatagccccatagcacttccacacctctgtgtgtgcacatgtatgagtgtgtgtaaaaacaatttttttttttagtttaatttctattgaccttaaagctttagataataaagatttggcactgagcacaggcgtctttccaggcagctccaagacagcacttctcaaatttgatatcttaaactgtgtgctgtgtgctcttcagcagtgtcctgcttccaccgtgcagggtggcttgtttattttctttctttcttttgagtgctgttggtcagagaagaggctgggcagccaagggcagagctacagctttctactccttttctacttcaggatggttcctatcatgaggacgtgggctatggagttagtgagggcctccgttcaaaggccttgtcactggagaaggccaggaaggaggctgtgactgatgggctgaagcgagcactcaggtgaggagggagcaccatctcatttcagctctcatttctaaggaagtggcacattcacgtgggtcagaaatctaaatagcatggaaaagatgtctcaggtcatcctgatctcatgtttccctgctctctgagggacgtggttttggtttctcccttccctcccaggaagggctcagagcttttcaggagccaagtcaccaatcagttcttagaacagttggctgaatatagcaactcagaggtttaggttggctcagctttgagagggcttagtccagtattgactagcatgcatcgtggtggagaggcaaaaataagaacaaacagaagagaccagtggtccatagtcgcagaggacagatgcccagtaacctaacccttccactaacctggagctcctaaagacgccatcagttccatactgctcactagagatgatgccctgtgagattgtgtgccatgtcactgctctgtcctcag

SEQ ID NO: 31787 - DNA, 2803 bp, Mus musculus
ggaagtagcctatatactaactactagtgctgcatttaactggttatttcttgccagaagggaatgtttttaataccattttgagccctcagaatggagaaccaccctccttctccgtttgttggagttaaaaaagaaggaatgaacagctttctggtggaggggctgcttgagactgcttttctgtttttgtacccctcagtaaggcctagaactagaagagaaccttgttaccagaaagccccaagagctcaatgtaagccaaacccgatctgtatctgtaagtgggcagagctctttaattttgacatgtgtcccaaattccttattccctcaacaatgcacaccttaagacaaaggttctctcccactctgatccctacccccactttttcccccccttttacaacctagtgaaaaataccaggggactggggttgcaaccctttcttacataggtcattaatgctttaagcaaaagatattagcagctttgactgcagcattagcaattagggaaaacaataacgttccctgcggacatgtaactttgccatcagttttgatgtggaaacactgtgatatataaatgttgttggacaacattagttttaagagaaaaatttgaaaggtttaaaaggttcacacacacacaaaagctagctctgtcctttacttattaagacactttaactttttcctttgtatttccattgtattagataaataaatgtgaatgtaaaattgtataaattactgtacttgaatacttctgttctcccagtattgcttgctggatattttagtgccttggacttctattgcttctgctgttagcatcaacttaccagaccccaggtcaccaaagggtatgtggaaagaaatcttaggtccacatgaccccagcagtggatatgccaaagggaaaatgaaagtgtttttggttttggtttggtttattattttgttttgttttgttttgttttctcagtcgtttcaattttgcctagagcaggtgtaaggtgagcacagtgaagttggcatcagtggttgaaaacaaagttctgtttcagaaagaatgaggagggttgtgagctgtgtgtgaaagataaggactgaagatgtggggacaagcttgtttgaagtgatgcttggccagtgaacaaacgagatctagaagagattaaacaaaaagaggggagtgggctagattttaagttgggaaggatgacagtgccaagtcacagatggaaaatgttgctctaaggaaacctgctcggttgcccccacctcttgttgcacaagtaccaccacactttctctgctttaagtactgtattgtgggaattcaacccacttctaactttctaagcattgtaggaaaaagtgcttatttcctttcctagctgtccaaatggttgcacagtcagaatctattgtgctgcctgtacttctatattagagctaatactctcacattttcatacccatatccccaaataacagcaaccaaccagtattatctgattttctggcaatagggacctaattggctgtttgggatctgaatattctggaaaagtggaaaaagtagaactcatttcttgggtgcttcctccttcaccttgagttgggaactgacacatttccaactttatgacacatcccaggagttgccacactagcaaggcttcttcctgtaagagtcttgttctttttaagttggtcgaggcccaaagatacaagtgagagctgaaagtttcaggagagggaagtgtaatgagcagggcttttgtttcaggtcgtgctaccaaagtgttgactcatttattccttttgggagcggtaagaggtactgtgggagtgaagcaggttacaggatgactgagtgcttcataccagcagtagagggagccaaatgcagcatgtggtgtttggtttagtcattctgagtgaggtctgttcccccttcacagaggtttacttactgttggtttccccctcctgtggatgaaataactgaagcctagagaaacgagctagtgctactgaactgtttaaattatttttgtgttaatagtacactttgagtatctttccacatttaaaaagaactttccgaattataaatgttttccttacgttatttaacaatgtacactgtttaaaactgaattcaaaccttggggtttctcagcagccgttacctgtacatttgcactaactccgggggctgcgcttctgtaagattgcgctttgtgcttcagtttgttacctttgtagacttatttaatgaaaccattcaaataaaccaaacttgcttttgttgaactgtgggttgttctttctgacaaacaaaaaacccttttgtcctcactggccctaccatttataactaaaatcgtgctgttaagggtgaaagtggcacttctccaaggagtctgttgctagtcctcaggaaaaggcaaagcaacagctgttagatggcagggaaattattgcaaactgctgtcagtcaacagcgtctgacataggtctcagtttctcaccaacagatcttgtccctgcttcaagactaggcacaggggctagaggcacttctttctcaccaagcctgtgcctggtcccagggactcaccaattccctcatagcataaccctaaattcagcttaagtagaattggaagttcattgttcctttgaaaagaatcatgaaactttgggtgtggtatagttaaagaacagttacttccttaaaacacctattcctagggagacagctaagtagtttctcatccaaata

SEQ ID NO: 31788 - DNA, 1663 bp, Mus musculus
aaatggaagatctgcttctctacccaccccactcacttttgtttgtttgactttgggttttttgtttttattgtttgttcatttcgtttttgaaaaaaggtttcactgtgtagccttagctggcttggaacttgctatatagcccaggttggacttgaacttaaggagatcttcctgcctctacctctggagtgctaggattaaagcctagccagggacatcattttttaattatacttcattctctttttcccatcaggtttcagttacaatggatgatgcccagaaagaacgtaaaaataggtcagaagatacaaagtcggttcattttgaatctagcacatcagagtcatcagttctttcaagtagtagtccagagagtaccctggtaaagccagagcctaatggaattagtatttctggcatctccttagatgtcccagacagcacccacaaagcacctaccccagaagcaaagtcagatgcaggacagcctaccaaggtgggacgttttcaggtgacaactacagccaacaaagtgggtcgtttctctgtttcaagaactgaggacaaggtcacagagctcaaaaaagagggaccagtgacctctcctcctttcagagattcagaacaaactgttattcctgctgtgataccaaagaaggagaagcctgagctggcagaaccttcccatttgaatgggccatcttcagacctggaggctgcctttctaagtaggggtacagaggatggctcaggtagtccacactctccccctcacctgtgttcaaagagccttcccgtccagaatctaagtcaaagccttagtaattcattcaactcctcatacatgagtagtgacaatgagtccgacattgaagatgaagacttaaggttagaactacgacgactacgagaaaagtaagtcattttttcatgtaaaatagtgttagtatcttacctggtattaatagcttttcaatgcagatgctaattttacaccccatttgagcagaaagtgatatacaaaagctaaaattacctgatacattattcatgggtagtcctgtactcaccagcacccatggcatttctacttttgggatctctttaacacctctatattattattttttattatggcacctttaaagaaagttgtttatgtgtatgtttatgtttatgtgttttgcctgcatatatgtatatgcatgatatgcatgcctagggtaggacaaaagtcagtatagttctctggacctagagtcacagatggttgttgactgtgatgtgggtactgcaaactgaacccaggtcctctgcaagagagaaactgctcttaactgctgaaccatctctccagctatgttaataactaacaactcttggttgtttgttagtctataacatgaatctaataatagcactacaatatataattgtggtcagttttccaactatcacttggatcacattagcatttttgcctacccttcctatgacttcaagtcatttttttctgtagtatgctatcatcaaggctaggagcttgctagaatgtgtcttgtgtaatagagaccagcaaaaatgaattgtaaaagtagaatctcacatttagcacttgactgcagatttaagaatatgctttaactcttacttcaac

SEQ ID NO: 31789 - DNA, 2502 bp, Mus musculus
cttgatcaagcaataattaatgatcaaatcaaaagtagaaaattaaaagtaataaagtcacacagaagaaggaaatgaattataatagagaatgtagttggacatgacacatgcacgtgatttcattgctcaggagacagagagaagggggatgatcaggaggtcagcctgggtggctgagtgacactttgtctccaaaaaagaaaaaatagaaaagagaaataagagaaagactgcagaccatgaaggaccaggtgtgctaaacaacctatacagtagtgtgtttctgtatttagaggtaaatttttttttcaggttagtcttatgtttgatggttttcaagattatgtactcataagctgccttactagggtaaactgctcctttactgttttactgcatgctgtttccttgggagtcttactgatgtgtagcattgttgataatccaataatggttcttcaaaaactctcttttttaatccatgtgtatatataggctaatttctttatttttgttttcctttctagttgtggcctctacatctcaggcccctggaatgaacttatctcactctgcttcatccctcagtctccagcaggctttttctgaactgaaacatggtcagatgactgaaggacccaatacagcacctccaaattttaatcacatggcgggaccaacattttctccctttttggctagcattgctggtgtccaaactgtagcagcatccacaccgtcagtatcagtccctataacaagcagtcctcttaatgacatttccacatcagtgatgcagtctgagactgcactgcccactgaaaaaggcatcgtgggagttaccactaccagcacaggtgtggtagcttcaggtggtctcaccacaatgtctgtgtctgagtcaccaacatcttccagtgcggtttcaagttctacagtacctgcagttgtcactgtgtccacaccatcccagccagttcaggcttccacatctgggagcattgcttcaagtacaggcagttttcctcctggaacattttctacaactacagctactacaatgggtagtgtggtggccccagatgctaagcctccaactgtattattgcaacaggtagcaagcaatactgctggggttgccatagtgacatcagtctctaccaccactccattcccaggcatggcttcacagccatcccttccacttagtagcagcacctctgctcctactctagctgaaacaatggtggttagtgcacactcactagacaaggcatctcacagtagtacagcaggattgggtttgtccttttgtgcgccatcctcttcctcctcctctggaacagctgtgtctacttctgtttctcagcctggtatggttcatcctttggtcatctcatcagctgtagtttctacacctggcctcccccaaccagtagtacctacttctacacctttattaccccaagtacctaatatcccacccttggtacaacctgttgttaatgtgcctgctgtacagcaaacactcattcacagtcagcctcaaccagctctgcttcccaaccagcctcacacacactgtcctgaaatggatgctgatacccaatccaaagctcctgggattgatgatataaagactctggaggaaaagctgagatctctctttagtgaacacagctcatctggaactcagcatgcttctgtctccctagagacacctttagtagtagagacgactgtcacaccgggcatcactaccactgctgtagcaccaagtaaactcatgacttccactacaagtacttgcttaccaccaaccagtttaccattaggagcagctggcatgccagttatgccagtaggcacacctgggcaggtttctaccccaggcacacacgcttcagccccagtcggcactgcaacaggagtaaaacctggaacaactcccccaaagccaactaagactgtggtaagagtcatcatacaatgactaaataaatatgattacttttctttcctctcaataattacatgttttcagctgagtcttgcaagttatgaaggtgcctggcatataaactcgtctctcagtcttaaagtgacaacagttttaggatctaagtataggtaacacaagaatgttctcttagtttggaatgtggctagatttttaggttatattgaacagttttcttagaatgtagaattatcaggtaaaataaataatggtcaagtaaaatacaggtttttccctgggtcttatgcctcatgtctattaccccaacacttgaagacagaaggtagttacaagttacaggaaagcctgggcactacaatgagttacaggccagtcttggctatagaatagggctttgtctctaaataaagaaataggaaagaaaagaaaaaaaaccaagggctcagcatttaagaacactgctctttcaaataacccaaatttggttcccagaagccatgtgcagaagacttaataac

SEQ ID NO: 31790 - DNA, 1181 bp, Mus musculus
tgactgtacactcaagtgtatactggcaatgctaagtggactcaaaggggtttgtgtgtgcatggatttgtgggagaatggataggctaggtgaaggcacatatgcatacatgaaattctcaaacagttatgtggacaaagatatttagggaggaaaacacaaaaaagtgatgttagtagtctttctcagatttaaactttcaaattaccttcatatgacttgaggatttactctatttcgcagtcagttgctgtaaaaagttactcttaggagcacaattctgtaagtcactgcttgaaagaatgcaacaggtaattaatgagaattaatcaaatttgtgtctcacttccatgtttaacgactttgacactaaatcatttgatgtataaccagtgggtgtctgaaactgtactgaatcttataatacatttcctctaggacttaatgtaccttattgtaaaaagtttccaaggaggtttcttgaacaggatcaagacaaatattaatattttcagtctacacttgaagaattcaaactactgtgttttatttagtcttgtgaaagattatgtatctctctgtgattcagttatcactagttttatttctgttacagagactgtagagatggttagaatttatgtatcaaactccctcccatctatgtgtttacagatttatatcaccacttatacatgttgctatatctccctggattccttttgggagtggattaggtttgggggtttgctttgagacaggttgtactatgtagcccttaggtggcccagaactcactatgttaattaatcaggctgtcctcaaacttaaaggagtgtgctaccatgcccggcacttggttcttaatccatatcattactgaaatggcaataaatgcgaaggccttcttctaacctatctctccaatagtgctgttttgacactttgctgaaagttttatttttgaagtatttgtttgtttttggagacagggtttctgtacacatccctgaatatactggaactcactatgtagaccaggctggccttgaactcatagagatcagcctgcctctgcctccatagtgttagaattaaaggcatgtgatatcatatccagccaaagaattttttatcaaattaaaattttaaactgttactgtactggatggttttatgt

SEQ ID NO: 31791 - DNA, 1099 bp, Mus musculus
cacttgtttttatactatgattcttatatttggtaaatgtacattttatacaaatacagaattttccccaaatacagatttttctttcctattgactaattgcatgtaccttaaaaataatatgaaaatagatgatttcccttccttaaccctggacatgtacagataaaatgcacatcagggtgcaattcctattcccagtatcttctctacagtggtaggtattgtcagagaaatttgtgcagttcttttctttctttaaaaaagatttatttattttatgtatgtgagtatactactactctcttcagacaccccagaagcaggcatgggaatcccattacagatggttgtgagccaccatgtggctgctgggaactgagctcaggacctctggaagaacagtcagtgctcttaaccactgagccatctctccagcccctgagctgttcttttcatgttaatcgccttgtggattctgttgtatatgtacctatttcaccagttacctggagacttggggcaaaaaatatatagaactgtggactctttttctgtgactactttctggaatttctcccttcccttcttaaatattttattttttgaggttataatatgattatatcatctctcttccctctttctttcctcttagccttcccatggtacctgctctcctaggctctctttcagattcattccccttctccagcttatcaattgttatgaatgtgtgtatatatacaaattcataagtatataaatacctattcagtctatataatgttacttgtagtatatgttttcagggctaactattttgtagttgataacctattggtatgctttttccagggaaagactaattttccactctaaacagtccttagttgcttataggtctttttcaagggttaagattttgtcccttcgattatagcatgtctattgatgttgtctttgtttaggtgatgtctaagcagagttgtagatgtatcagttatatctgggctctacaactctgcattttgagcagttgtgctgtaatggtctccatctgctactaagagaactttcctcattttagggtaagaac

SEQ ID NO: 31792 - DNA, 2078 bp, Mus musculus
agttctctagactggaagcccaacactggtggcatcttcctactgcagtggggtgtcgggtgggaatgggtgggcagagggcccattctcccaagtgtctgacatacgggctggtgtaaaaccagcaagatcaagcaagaagaagaaatgccccttctcctttgactctcctgccaggtaagacccggagagaataggaaggcatcaccaaaggtgacatgaatagcctttcagttacttaagagagacttggggacggactcaagcaacatagaaaggcaggaagggaaggaaatgtgtatactgcaagcctagtgcccttgtggccttgccctcctgcagagagagcccagcctcccagccctaaagaaataaggaggtgaaaccgggccctcagataaagggcagggcaaggtatgggacagacaagaacaggggcaggaaaagctggaaaatggctaagttctgagaagaagcagcctgcaaccccttctgtccacctgatggcgcgtacttagctgtactaataatcccggtcctctctggctggagacgctctgctgcagctgcttcaccagtggtgcattgaatgctgggcattaattaagctcagtctgtgaagggggatggtgagggtcagggcaccatctttctgctgtgagaaatggctggtgggtatgcagcagggccactttgcagagcgtgaccactatgctgtgaatcaagagggccgcatctggagttgcaggacccacgtggtgggctctgagtgccaggagcagagcttggcacatccaaggtggggccctctgggaacccaccgggcctttctttgaagctatccgaagggcagggccgtctgtttctgggctgcagctttttctcctgcctgctcaggccctctgccctttagaaaaggtgcacaggaagcaggctaaggctgcagcagaacagctggagcgccgggcttctctctgaaaccagaaactttgggccctgtgctcgaaggccagagccggtggctgcagccctcctgttctgtcctaaggactagaatccccctgggcctccccaccctgcttgcctcctccctcccaggtctagtgccttgtgtctgacatctgttacctccttaccatctgccttaagagagaggaaagtgccgtgggtggggagagggaggagggcattaaagtcagcatcttagaaaacaagcggctgtttccttcttgcccaatcaaggtaggaaagggttgggtggaagagccaggggtgttcctaagccattcatgtccctcagctgtctgctcaaggacacgctaaggaccatccatcccctcccttctgacttgactcctggttcagtgcttgccagcagaagggacattttctgtgctgtgcttgggaagggcacagcagtgtcccgagtctattagtctcagcagcccaggttgtggtctcaactagaaagtcccccacccccgtcctagtgaggaagacaagctagaaccgtgcagctgtaatcccagcacttgggatgctaacacagaaacgtcaggagagcatgtcagcctaggctaatagataaacataagaaaatcttttctgtgtgagttgaagatgccctactaaggcttcgcaagtgtgagttggcctccctagttatgtttgacctaggcaaaaatttttcaagaatttatgtatatgggtgttttgcctgcgtgtctgtgtgccacctgtgtgcctagtgcccagagaggccagaagagggcattagattccctggaactggcgttacaggtgtttgtaggtcaccaggtgggtgctgggatttgaacccagaacttctggcagagcagccggtgctcttaactactcggctgtctctctacttctccccccacctccccttttttcttaaatgcttttagccatgtttagtggtgcatgcctttcatctcagcactccagaggcagaggcaggtgaaactgtgggtttggggtttgaatctagcttggtctacatagtgagttccaggccaaccagaattacatggtgtgaccctgtctcaaaaaaa

SEQ ID NO: 31793 - DNA, 1118 bp, Mus musculus
gtcatactgatgccagtccctttgggtagtgggatagctgcatcacatggtcactccagttctagtttttaaaggaaccaccctgattttttctttagcgactgaactaacttacactcccaccaacgtgtcttatttgtctgtatcctctctagtggctgccactctgtcatttgacagctgtgacagtctttccagggtgaaatggtttcattttgattttatcctgatgattagtaacactgaatttttttatgtacttgttagccatttttttaaaagatttatttatttattatatgtaagtacactgtagctgccctcagacactccagaagaggacatcagatctccttatggaaggttgtgagccaccatgtggttgctgggaattgaactcagtacctatggaagagcagtccatgctcttaaccgctgagtcatctctccagctcccttgttagccacttttaaaagacttatttattttatatatgtgagtggtttgtctttatgtatgtaagtacatcgtgtatgtgcctggtgccttcagaggccagaagaggatgctagatcctctggaactggagttaaagatggttgtaagccaccatgtgggagctgggaaccaaacctaggttctggaagaacaagtgttattaaccacagagctgccatctctctagcttattttctttggtgtgtgtgtgtgtgtgtgtgtgtgtgtgtgtgtgtgtgtccctcctgtgtcctcttcctaagtgctaggattagacatatgctaccatgcctggccttttgttcttatatgtggacttgacttgtctggaactcctcactgtgagggtgaggctggcctcagactcttaacgcaaaactcctgattctgtctcccaaattctgggattacaggcatatacctgggggcgggggtggggaggggagtagagagaggtttttttgagaccaagtcttgtagatcctgcctggctgtacactttgttttctttaaaaggtatctgttctggggtagagaggtgctcagcgggtaagagcattaactgtgaaaactttaggggcctgaattcgattcccacatgaaggcctggcacgccgct

SEQ ID NO: 31794 - DNA, 1163 bp, Mus musculus
aatccagctcacaaccttctgagaggggggatttgttttgttttgttttgttttgttttgatcttttccttgttagcatatgtgcttttggcttttaagacaaggtctcatgcttgcattcaggatagcctaaaacttactatgtagaccaggttagacccaaaaaaatttgtgatgttcctcctgtctctaccttccaagtgctgtgattacaggcatataccccccatgctgtctgtcagtcttgatgtaaataacaaaaaaactaggggtaactgaggtaggatagcttatccaggtcacccaacaaatgactcccactccccctccatatgtcacatgtgtaactgtctgctgtttgttttccgggaagagttgaacattcctgaagtgaagaatggttgttattgttattagcaggtttggaggatggccttctagaagaatcccagtatgaagacgtaccagaggaaatccccacctctcaagaccagaatactgggatacaagggagaaaacagaagactatttccaccccggggctgggtgtcactgactaccacctgcggaagctcttggctcgctcacagagtggccctgtagcgcctctttccaaacagaactctacaactgcctttccaaccaggacaagcaacatcccagtccagcggccagagaaaagccctgtgcccagccgagatttgtctcattctgaccagggggcccggaggaacctgcctctcatccagagagccaggcccactggtgacagacctgggaagactcttgagcagtcccagtggctgaatcaagtggaatccttcattgctgagcagagaaggggagacaggatagagcctccaacccccagcaggggctggcgtcctgaggaggacgtggtgatagcggcggaccaggaaggagaagtggaggaggaggaagagggggaagatgaggaagaagatatgagtgaggtgttcgaatatgtgcctatgtttgacccagtggtgaactggggccagaccttcagcgctcagaacctcgacttccaagccctgagaaccgactggatcgacctgaactgtaacacatcgggcaacctgctgcttccggagcaggaggccctggaggtcacacgggtcttcctgagaaagctcagccag

SEQ ID NO: 31795 - DNA, 1196 bp, Mus musculus
tggcttctggctctgtgtagcttaaatgtgtgtcatagtggagaataactagcctttgtacggtgccatttatgcctttatctggtaggttttatttttccttttataggttaagtaaactgaggctgagaaagggtaggtctcaggattcacagtcatggtcagtacattctacctgacttgagatcctaattgctctggaggactgccttcctgaggtggcttgtgttgggactcaactggagaggtcttttccattgttcttttgagggtttgtcttttctttctggaactctagtaacttccctgagtcacttgactttcttgcttttttgttttgttttgctttgttttgttcttttgagacagggtttcatgtagcccagactggcttccagtttgcaatgtagccaacaagggtgacctgatcctctcgcctttatgtccagagtaccaggattagagagaggcattgtgttgattcattgtgctgaagattcaacttggggccactaagccagaatcctaccaacctcagcctgccttttttgttgttgttgttattgctgtatattgttatgtgttttaagacaggatctcactctgtagcctagactggcctggaacgcttgctgtatcctgcctgttctcccatttgtagtaatcctcttgccacagcaagtgagatcccaggtctgagcccccacccctggctcatcctgactttttgaagtagatttcagtgtagttgaccaatgccctgctctgctccccaaatgcacctgcagaattaagaaagttaaagattttttttttttatagatttatttatttattatatgtaagtacactgtagctgtcttcagacactccagaagagggcgtcagatctcgttacggatggttgtgagccaccatgtggttgctgggatttgaacttcggaccttcggaagagcagtcgggtgctcttacccactgagccatctcaccagcccaaagttaaagatcttactgtaggcttccagcaagcagtaggtaaagtgcaatacctgtgaacttgcttctatttttggcacaggaagcactccctgggattccaggcccttgcgcagggccacggggcacagctgtacctgctgtatacgacggggatggccctcttcccagggttccccctgccgagcagagcagtgtg

SEQ ID NO: 31796 - DNA, 1185 bp, Mus musculus
cccatcatcaggcatgggtgtcctgcacatagctgtgcacagaggcaaaatacccgtacacattaaaaacaaacaaacaaaaaaagtccaaaggcttgccgttccgagccaagcctggttgtgcttgcctgtgatcccagcacccaggaggctaaggtaagaagattatgagttaggggtcagcatgggctacacatatagtagaaatgtttcagaaaaaaagagggaaaagctacatttggttctggttctgctctaacagctatccataccctcattcactcaactttattagtttatttagaggtgtgtgtgggtctcagaatttttcttggtggcttcaaagttctgggctcaagccaaactcgtgttttagtgacccaagtacttaggactacaggtctgccacacatagtgtgtgcacataaaagtttattactctggatacaaatagatgctgggatcgtagctcagtggtcagccccgagttgatctctagcactgcagacaacaaaaaatcctccagacagcggagtcttggggtgggggtcagaatctgggaagagagctgggaatttgaagagatgcaaaaaaaaaaaagttatgaaggaacttcgtctgattcataagcacgggggtggatacccagatataaccttgccagccatctctctgttccttctaatatctttactttcaaatgtaattgaaagtctgaggaagtttacaggttggagaaagtggtctggttaggtcaggaggagaaacctaagaagaaaacgtagggggctggagagatggctcatcgggtaagaacactggctgtttttccagagtatccaggttcagtaactaacacgcacctggcaactcaaaactgtctgtaactccagtttaggggctctgacactctcatacagacatacattcaagcaaaacaccaatgcacacaaaataaaaaaaaaaaagaaaatattttaaaaaaataagtaaattagcaggcagggtgctaaggactaggtagagctgtaataagagtccaccccgggcttgatatatgacctcatggccctgtgggggcagaaacctttctagtcccagtttccagagggtgaaagactgaagctcacagaggtccctcaccttattcaaggtgtcatagtgaatcacgtgcgcagtcaggtg

SEQ ID NO: 31797 - DNA, 1149 bp, Mus musculus
gagttggttatctccaccatgtgggtcctgaggattgagtttaggtcattggtcttggtggcagatgtccttgcctgctgagccaggccattggctcctaaactggggcctttaatagcggcttttacctcatgtcattgcagtggattctggagtcttgtttcaagcagcaactaagacaggactgatatttagaactgattaaaaaaataaaaaataaaaataaaggaaaagacaaagacctggcctggtaatgcatacctgttattctagcttctagggaaactgaggcagaaaaagtataagttttaaggcttgcctgggtacaaaatgagttcaaggccaaccctgataacttaaggagaccctgtaccaaaataaaggctgaaaagaaaagaaaagaaggggagaaaagaaaggaggctctagatgtagctcagtggttaatcactcgcttggcatcctgtgtgaggccctaggctcactctctagtactgtcccctccctccccacagagaaggatgaaaggggtgggcagaaaaaacacaacccttttctcttttgagaacatagtagatctgggcagcagcagtgtgactttcagtcttgttctgatgtgaactggctgtccgtctttcggtggagtcagccctgctcttccatgtctgaggctcagtctttctttgtcagcacagagccccaactgtgagtcctggtcttatctaaccctgacattgtcctcagaggagtggtatttgcctcagctttcagtatcctgagctgaatgtggccagagaaaagtgagcaaaaaagaaactagggaagatgactgggttcaaatccaggctccttagaatcactcgctgtgtaaactcacctcacccaggtgagatgggaggctgggcggagacacgctctatccctgagatggccgctgtcttcacctcccccttcccactggagaaggaaaggttgacccggcaggtggggtttatggggaaggctaaggttggatgttgatgtggggctggctcttcagctgaagaggctcggtgacttttagggggcatctccctaagccttagtcaccgttgtcttcaatctccaagtcctcccctacacttctgggctatagactggactggaccc

SEQ ID NO: 31798 - DNA, 1146 bp, Mus musculus
tctctctctctttttttcaactctctaggcaaccatgaacaacacccatggagatcaggacctggccatgctgtgtgaagtccgtgacagcaacaggagagctcataagatacagggggaactgaagaacctcaagtctaaagtgtttgggctggagaatgcgcttaggctgtgctgatgactcctttcagggttggcttctggagacctgagacaaggtcacctgtgcccacaaagtggacctggagttgtccagagtagtggcatcaattttaataaagatggtgttaagggcatgatagctcacacctataatcccagggcttgggaatctgaggcaggaggattgccacaaacccatggtacaggcaggtggatctctctgattcatggccagcctgatctacaatagtgacttctaggccatccaaggctatttaatgaaaccctgtctacaaacaaacaaacaaacaaaaacaaaaataaaacatcaaaaccagagaggaaagaaggaaaacagtggcaaacctggctctggcacagctgccctggctgactgcagtctcaccatcctgctagccttgtcttttatatactgataggcttttctgactttaaaaagtcagtgatggggatgtagcttatctggtgaagtgctgtcgagcatacagaaagccctggtcctgctagctcccctaaagccaggtttggtggctcacctgtagtcagcactggagagagcccatgtgggagaatctaagttcacattcacccttggctatatggtgagttccaggccagcctgggctacacaagaccacgtctaaaaatgaaaacaagaaacaaacaaacatacaaaaaagaaaataataacttaggaagagccgttttgctgagcttgctaagtgtcagtgggagaatgtgtttcctggagaccaaagtcattcactgaagtcattcactcaggaattacatacacatggaaagtcacagacttagctgcgttccgagttactgaccaccagggggcagcatagcccttgctctcaagtaaaattggtcatcaagaaaagggtgctactttatgtacagtgggccaaactgtacaaaatgatattttatgtgaaaaagtttgacattttatcc

SEQ ID NO: 31799 - DNA, 1220 bp, Mus musculus
gatagaacactcatgtatgtaaataataaatccttttaaaggggactatagaaagaaattagttagcaggtaacatgctaagattttcagatgtctgaatatcttgtgctattctggtgagactgtaggagaatagaattgacactatacctgagctatttctagcacttcctcttttagttttttagtagtaacactggggatcaaacccaaggccttgtacatactaggcaaatactacattgtcaaacaaaatctgctgcttatttatgtttcattttttttttttacattttcagaatctgctggatgatgtagaagaatttcatgaacgtgcccaggaggccatgatggatgaaaccccagattcttccaaactccaaatgttaatagacatgggctctagtctctatgtggagctacctgaattgccccgactaaagcaagagctccagcaggctcgatggctggatgaagtaaggctaactctatcagatccacaacaagtcactttggatgtcatgaagaaattgattgactctggcgtaggcttggcacctcaccatgctgtagaaaaagcaatggccgaactacaggaactccttacagtctctgaacgatgggaagagaaggctaaggtctgcctgcaagcaaggtaaacatatttttccctttaataacttaagtgaaggggtaggtagagagatggctcaatgtttagagcactgctagttcttccaggtactaaggttcaagtttcagcacaagtggcacataactatttgtaacttcaatcctagaggatctgataccctcttttagcctctatcactccgggcacacacatggtacatagacaaatatacaagagaaagcacccatcctgagtaaaagagtagatgaggtggaggaacataaagcccatttcattaactttcattatttgtcttgtgccttttgaccaatgactagtaatcaaatgtggctacatgtagagagtttcagatatgtccagactgttgtgtagaggatgttgttaagtaattccctgaaatgatgggaaatagtattgtttcaagtccatgctatcaatacaattgcaaaatcagagttacaaaatgctcattaaaggggaagactgccagttcagcagctaagaacaatggctccatatcagaggatccctggtttgattcttagcacccatgtggtggctgaca

SEQ ID NO: 31800 - DNA, 3093 bp, Mus musculus
tgttgtttccaaagatgaatggacttcagaaaaagtcctcttagtgctggcttcctctctgcatggattgtgtgggctccattctcttatcatctgtgcagaggatgtcttctttggtgcagcagccaagtatttcaactcttgattcgttgagtgtggtttgctgaattaaggtcaggttctaatggaactctcaggaggctgtttggcattaatacattgatgtgcttagtggggcatataagaagtggctttcgaccaactgatacttgttgtagacggttacaacctacaggtggtgccattggaaggccctgaccgtttaaatatccttagttaggataattggacaggagtcagagcacaactttgtaattactgacatttatgccctactgatccagttaagagaagcaggccaaagttatcccttctagaagtcttggagtggcagtgcagtctatgacctcagctgcttgtgtttatttagaccaataagaaaatcctccaaaagatcccctcactttcctcaggaggatgtcaagcaggttagaatatctgattagactggattctgggaagaaggggttttttttttgtttgtttgtttggtttggtttggttttttcttacttcaaggcaagtaggccattggtttgagaagtccatctgggtctgtgttttagaaaagaaaggtaggtacacagatccaggtttctggagggagtagggatgactaatgagaatgttttactgagcctcggtgatgcatgcttatctgggaaaccctcattcacaagtattccagactccaccatgcttcacgcatggccatgagcaagactggcagataacagcttttgccttgcagccctaaccccaatgcctgtagtttccaacatggcctcagcagatatttgtgaataacaccatggcttcatcagaggatgtggggctgtaggtcctctgggtgtgaagctgttctagtaaacccatttttaaaaagaaagacttgtttttacttttttctaaatgtctctgactactgactgttctatagattatttttccttttttgatatacatatatgaatatagatatatatatatatatttactgttaccagcagcgtatgatagagtttgagcatcagaaatccatttggaagcttgcattttctttctgctttttgataaagaaatcccattccttccttgtagtacaaggagttagcacttccttcttcattctcacctaaacatatcttccacttttcttctattcaaatagataatatatttcctccatgttgggacttgtccctgtctgttgggcagcttggtcttattctagtcagtgctgaatgttttgtatgtctgaaactatggtgctgtgccccccccccctgcccctattgggttctgtgttcttacaaaggtcttaggtggactctgtaaactcctgctagaaggagaataatatattttaaaggacaaaaaggttttctaaaaatggtgtttatcttcactatcctttgttctttattttggtttaagaatctgcaatttaacttaaactcatcacttgtcctgttaaaggggcattgagcaaacctaggaagtttgtagcctctgttcccctttactccagtctcttaaataaatgtcttctagtaactagaagtgagatgtactgtccagttacagactgtgtgggtatgagggctacctcaaaaggcatcttaggaaaagaaaaggttttcttacaaaaccctttatcccaagtgctaaccaggcttggccctgcttagcttccaaggtcagaggagacatacacgtgcaggtggtacggctataggtacaacatccaatttctgaaaatactttctctggtttatactacctactttttggtctcttcacttaatgttaagtaacatatcttgaccagttatgttgtttgaatgtgttgctgtgcttgtatcttgaatttccatctcaatgtgagtgtgagctaagatttcagtaatggttacaaggttaattaagtaaatagttaatttcacacattttcattttgccaaacatgaagattatcacgtaagaattttatttggttattgttataatgaaaaaaagcacaatatttcttaacttttagtctttgtaaaagacttgagatacttgtggtttaaaattgagtgtacaccaacccttcagaaatttacaatgtaagtgatagaatcccagaatacattttacaattttgattttccttccagttaactacttttcattaactgtgttatcaatagtaaggagtcatgaggatactgaaaggtgactgttttgagtaatttgtgttctttgtacagtgtttgtctgttggagacctcagacataggcagtctgtacctgtgaatagctgcctgtcatcttctgatgttttgaaacttttaaatatataatttaattgattcattcggctcttctgtacttatttgaagactttgatatcttaaccatagatttagacaaaaactcaaaagaccataagggagggggtggaaagatgactcaacggttaagaatcctggctgctcttccagaggacccaggttcagttctcagcactacatggtggctcacagccatctgtaatgtcctcttctggacgttactgcactgtacacatgtggcatacagacatctattctggaaaatactcaaaacacaaatacaagtaattaaaatctttttttaaaaaattaaggatataagagaaactagcactctacccacaaattaaaaaccctatagtttgtgagttaatgaaataaagagtcatctatttaaggaaaagtagatgttctaatgtaaagctttgtttcacaagaattgcaagtaactccattcttctgtactgtttgtttacattttgtattaaaacttgatttatgtttctttctgactcctcaaagttgcacttcttcgttattaagtgtttaatattttttaagctatttctcactgccttcattatactttaacaaaggtaacggaatgaaaaaagttggaagtctgcctggtgtt

SEQ ID NO: 31801 - DNA, 1985 bp, Mus musculus
atgctctcggtgctgcagcagagcctgagtggacagcccctggagagctggccgaggccagaggtggtcctcgagggctgcacaccctctgaggaggagcagcggcagtcggtgcagtcggaccagggctacatctccaggagctccccgcagccccccgagtggctcacggaggaggaagagctagaactgggtgagcccgttgagtctctctctcctgaggaactacggagcctgaggaagctccagaggcagcttttcttctgggagctcgagaagaaccctggctggaacagcttggagccacggagacccaccccagaagagcagaatccctcctaggcctcctgagcctgctacttaagagggtgtatattgtactctgtgtgtgcgtgcgtgtgtgtgtgtgtgtgtgtgtgtgtgtgcgtgtgtgtgtgtgtgtgtgtgtgtgtgtgtgtgtagtgcccggcttagaaatgtgaacatctgaatctgacatagtgttgtatacctgaagtcccagcacttgggaactgagacttgatgatctcctgaagccaggtgttcagggccagtgtgaaaacatagcaagacctcagagaaatcaatgcagacatcttggtactgatccctaaacacacccctttccctgataacccgacatgagcatctggtcatcattgcacaagaatccacagcccgttcccagagctcatagccaagtgtgttgctcattccttgaatatttattctgtacctactattcatcagacatttggaattcaaaaacaagttacatgacacagccttagccactaagaagcttaaaattcggtaaggatgtaaaattagccaggatgaatagagggctgctgccctggctgcagaagaacccgagagagcctgcgggtggcgtctgggcaagaggggagtggcctgtggattgagtattaggaaggagccagagctcagggtggagagagctctgtggggctagggtgggagcagctggggactcctctcatgagtggatctgttgccctacgggggaggaaacttcatgccaaatatacccagaagtcttctcagatcagttctttagaaagagctggtatagaaatgggtgatgtaaaacttgagaagcaggaagaggcgtgtgaaatcctgtgctctctcaagtgctggctgccagtccgtgggagggctgcggcatgtgattcttcatgggctgcagccaccagatccctggagagctctacctcggggtacagtgagggagttgagaaagatgtgagggtagtgggcatgggggcgtggcataacaggagaactcgggaggccctcaaggtcagaggaaagtatgtcactgtataactacagtaagagaggttgtttaaagtagctccagggcgccctcatggggcagacagcagccttgtggcgtaggttctagagaatgcacaggtcttcctagacttaggtgagaaaaggaccatgaaatgctgtgggaagcacgaattcagtgattgtgtgtgtgcatatgtgtgtgcagtaatgaagacttaataaagttgctgtattggtaagaactcatagttgttattgaatcacctcttaccataggtcagacacgtcttgcctagcattagcaagccctgaggttccaagtctcactgtgtggcctgtattcaaccctgcagcagccaagtgagaaagagaaagcccctcccacccatcagcctttcccagctctatttcttcagaaattcaggcagcaagggcccttggatctagacaccagtcaagcctatggcatctgccaccctagtttcagatacgaacttaaacgtaagttctcccagcagcaaatcagccccacatcagcccagaactgctctctaccatgtctgactccacgtagggctcccagccctcagcttctagctgctgtcattagatcatatcagtacattagttcttctgct

SEQ ID NO: 31802 - DNA, 1301 bp, Mus musculus
ttcttctttgccctctggtattgctgccctgccagtgataaccctatgtctgatgtctacggtgccaacctattccatcagtacctgcaaatggccaatcgtggagaggaggaacagcagactggtgggcaacagaagcagcggccttcagcaacccagagttgtgcttccatcctggtatgcactggcatatacagttctcaggacccaggctcccaagtgcctcctcctggaaggagagagcttccattccacggacaccgagacttcagcttcagtccagggctcctagaagcctcccacattgttcatgatgtaaacgaagctgtgcagctggttttccaccaggagggttgggcttgaggggacggagatgtagcagaggcagagggggctgttggagcatgcgctcagggaatcctgtgtgcccggctgtggtctgggtcacaggcatcaagtccaagcctggcttcttgccattacttcctgggacagagaagactgtagcttcagtagctacagaaagcccttggggcagcatctcaggagaagggatggatttctgggcccttcctgtgcgtctcttgcagtctgacctcatgctggtccctttacctctgtgcctcagtgtcaggtcctctcagtgaggaccttctttttccagacagcgtctcactattgtagttcccgctgtcctggaactcactatgtagcccaggttgtcctgaaactcagatctgcctgcctctgcctccccagtgctggcatcaaaggtgggtgccatcacacctgcctcagtcaggactttaaaaaccgcacagtgcaacgttatgtggaaacttgtggagggagagcctttggtcacactgaaggaagcgctgtgccatgccagggaggggtgtggctggcactctccatagtgtttactgtattttagagtgctgcccagagacttgggggcttttttttttttttttaattaaaaactatcctaatatttgttacattgtgtcttgtgaggatttgtgtggaatgtgctagaagccctgtgaggggaggtttgggagagtggtacatagggtactcttcgtgagttgaagggtttgtggcatttcattccctaaatatggcgggcatcacctcctcctgctgtccgtcctcccattcccaggtggggctctgtcagcactatttacattgcgtccctaaagaggagtcctactccagcttccccttggctcttccccagccttggcatttgtcaaatttcctgctgctatagtttagatgttgactgcctt

SEQ ID NO: 31803 - DNA, 1170 bp, Mus musculus
ggacagcgggaactacaatagtgagacgctgtctggaaaaagaaggtcctcactgagaggacctgacactgaggcacagaggtaaagggaccagcatgaggtcagactgcaagagacgcacaggaagggcccagaaatccatcccttctcctgagatgctgccccaagggctttctgtagctactgaagctacagtcttctctgtcccaggaagtaatggcaagaagccaggcttggacttgatgcctgtgacccagaccacagccgggcacacaggattccctgagcgcatgctccaacagccccctctgcctctgctacatctccgtcccctcaagcccaaccctcctggtggaaaaccagctgcacagcttcgtttacatcatgaacaatgtgggaggcttctaggagccctggactgaagctgaagtctcggtgtccgtggaatggaagctctctccttccaggaggaggcacttgggagcctgggtcctgagaactgtatatgccagtgcataccaggatggaagcacaactctgggttgctgaaggccgctgcttctgttgcccaccagtctgctgttcctcctctccacgattggccatttgcaggtactgatggaataggttggcaccgtagacatcagacatagggttatcactggcagggcagcaataccagagggcaaagaagaaaaaaaccttagtttagtgtttcgaagctatcagaacagcctggaggtggtgtgactcagcttcggggaagcctgggtggtgtgggcagagggaaagaaaagcagctatgataatggagaggcaatggacttaccctatagcatacagcttcctgatgggggcggcccagccccgcctctcagcctgctgcctgatcacgtcctctgcatactggtaagtaaggatgctgggtttgcccatcagaccctcgtatttcagctcattgcctgttattttccggtagatggtttccaggcaaagcagaaaggtgccatgaccaaacctgcccaagaagagatctcagcaacttagccttgaggccatctgccactctctaagctgtctccaagcaaccgacctgtatccctcccctagagtcattcacatgaagaaactgaggcaagagcaggcagtttccccagggtagcaaaacta

SEQ ID NO: 31804 - DNA, 1153 bp, Mus musculus
agattaaagttgtgtgccaccactgcccagctaatttgtggtaaatttttaagaaatgttagtagtttcttggttgattgtatgatcacttaagattgttaaaactgtacaaaatactttggatggctggagagatggcttcgcagttaagaacagctgatactcttacagacctaggtttgagtcccagcatccacatggtagctcacacccatctgtaaattcaattcctgataaatcaagtgccttctttaggcatccacaagcttgtatcaggtatgcacatgcatacatgctggcaaaacactcatacacataaaataaataaataagcaattagagtacttggtggttagctataagatggagtgctccgacagttctgtgtaagtattggggtgggacctcaggtaccactagggtaggacagtttttgcctttgtagagttctctgctgagtgttcagtcatgacaatcaaaataggtcctccctcttttaattttaactttattttttaaatatttgtttttgatacagggcctctatatagccctggctgtcctagactcactgtgtagaccaggctggcctatgactcacagagagccaactccttctgtctcccgagtgctgggagtaaagggctgggcccggctcacactttattttttactttttacttttatttaggtatgtatatatgtctgtgtacatgccacatgtattcagggacctgctgaggccaaaagagggcattggatcctttggagctggagttgcaggtgtttgtgactggcgtgggtgctgggcgttgaactcgagtcctttgcaggaacagcaaatgttttcaaccactgagttctctctgtacccccttactttgctttattttgaggcagaggcctcactctgtagcctggactagccttgatcttttttgggaaaaagatctcatgtagtaatcactgacttctgatttgtggctagatcagtagccgaggtgactctgagctatctagcatcccgtctcacctctcaagtggtcatgctatcacgtaggtgcatgctatcgtgccaggccttagtttttatttgtttattttgtattgctagggttgggatttaaggccttattcatgctaggctagcact

SEQ ID NO: 31805 - DNA, 1194 bp, Mus musculus
gtgaggcattctctctgctttaacattttatagttgggaagaaatttccgcagggtttggttagtggaggagatagatggttgtcctcttgtgtctttttttttttttttttttttaagtgtgtgtttgggaatgtgtgctttttgaaaccaagaggaacccttaggaacactgtccacctctccttagcctggagttatgttttagtctaggacagtggttctcagccttcctaatgctgtaactctttaataaagttccccatattgtggtgactcccaaccactaaaattattttgttgctacttcataactaattttgttactgttgtgaatcgtgatataaatatctgatatacagactatctaatatggcacccctgtggaagggttgtttgaccctcaaaggatcataacctacaggctggtttatcctcctgtttctgcctcccacactacatggcttgcagacaggtagatccaaattgaagtcctaaagtttgcttagaaaatcagttaaccaactgagtcatcagctcagcccccacctttttgttttgtttgatttgtctctggatgtcctagaactaactctgtagaccaggctggctctgaaatcagagattcacctacctttgcatcccaagtgctggaattacaggcatgtaccaccaccctgggccccttattctattttaaaaattttttgttgtcttgttgtagtgaatttgtaatatattctggaaagtccacatgtatccattcatacaaaggatgtagagataatttaagtctagctcagttgtacagatgaggtacattgctcagagtgttgtgctgaattgtgattgaaacatgagaatcaagcctcaaagtcagtagatagcctgagttagcatttgcttttcatacacacggttttctgtgtttctggttaaccgtttttattttaaagccagtttgtaaatcaggtgtgtgtgtgtgtgtgtgtgtgtgtgtgtgtgtgtgtgtgtgtatctgcattgataaagcatgacatggcactttagtggaagtcaggagacagtgggggaagggtctgttcttaggttatcaggtttgccctgtaagcatttttttctcactgaaccatctagctggcctctccctttattggagacccaagtctctgtagtcagtgaccatacacttaac

SEQ ID NO: 31806 - DNA, 1155 bp, Mus musculus
gtaggcactgcgcacatgcagtacatagtcacatatgcagaacacgcaagcatatagtttatggtttttttaatgtcattaagccgaagatgacctttaacttttggtctttctgtctctacttccaaaatgttaggatttgttgaatggaccactgggcctaatctatgcatgctaggcaagcactccaccaattctgctacatccccagtcccgatcttgtgttattgaaattcttcgttacaaaatgttttctttttgataaaattccaacagaatgtattctttttttttttttttttgcattaggtttcatagagtggaaatgtaggatctttcagtctttaaagactagaattgtggatattttcttttgaaaaggaacttaatctctactcatgagcatggttggaacactatgttggtgtcctggagctctacctagtaccctctacactgtgctagtctggctccattccttcttgggctctataaactttaacatttagagattcttgacttcatgtgctgatggaaaggagttgaacatagcattgtgggctcagacagtgcaggcctgtgtagcatactgacacttagagcagggtgtgagaggtcagaagcatcaggttgtagcccaggcctttttttgtttgtttgtttgtttgttttgtttttttaaaacaaaatgttaatcttcatccacatgcattctgccttataaatcttcttttttctttttgttcttttgagacagaggcaagtcttaagctcacagagatcaggttgtccctgcctcgtagtatgttggaatttcaagactatcactctactgggctggctacatagtccttaaagttagctgaatagctatcacacattgaccaataaacaaaaatgaatgtatgccagacacagtatatacacaacacacacacacacacacacacacacacacacacacacacacacacacacagctaaaaataaaataaatcctggaaataataaaacaccaccagatgtggtggtgcacgcctttaatcctagcacttagaaggcagaggcaggcgggtttctgggtttgaggccagcctggtctacagattgagttccaagacagccagggctacacagagaaaccctgtattgaaa

SEQ ID NO: 31807 - DNA, 1129 bp, Mus musculus
cccacacaggagcagagctgacccagatcctacaccatccttgatcctatgtacatcagaaggattttagctctaaaaaaagttaatgcaacaaacagaatctattattctttttaggtgtttttgtttactacttttctgtctctaatgaactcaaagcattattgtgattgattggtaattatgcaaatctatgatctttgtccttatttggaattagaagaaagatttcctattgagtaagattaaagaaaatttgtacaatgaacaggagcatcccagcaggcaagagaaaatatcagtgttgtttaagagaagggatttaggaatatcctatctttagagtgtctatatagtcaaatggttttgttaagcaggcaggactttagaaataagcagttaagaatacttttctgcaagtgtgctaaaagcacctctttgtgttactttccattgcccagtggtgtgggctgtcccttgctcagcctgagttcttccccagtagccactgcatggtggaaagatttgttctctggggcagggaaagtggggggacattgattcgggcttttcactaatgagctgtgacgacagctgcaagaggggcaaatcctgttactctcttcacctactctctgaggctgcagagtggatgggaacaaggttcccctctctctgccgatctgctgccttttctgctgttgcctttcccttcctcttctgcccctgagcatcttggcaaaggtcacatttcggtgctcacagttcattgcacacagtgaaagggagatacaaaagagtaggagagaaagtgagaaaagcaaccaaaaaaaaaaaaggttggggtggagatttttaggaggctctctcccttgctgccttagtcttacgacttaagctccaggttgaaaccttaaagctttgaataacctggatttccaagtagttttttgtaagcaacttattagagcatgaacatgatgggctgtgagttaaagagaatttcaatttctgttctgaaacttgtaaattttgaagatcgttttatccctagtgtttgctcagactgtcattgtaaggatgacctgtaatatttatagtatgtgtcagagaccatacttagcaatat

SEQ ID NO: 31808 - DNA, 1235 bp, Mus musculus
ggattttataaaatgataatataatacataattcttcaatgaaagggtttcaagttcttttataaactgtcaacctattagtttcctttccctatcttctgttttatattaatgcatttatatatttggggccatttgatttaggcctcagacattccacagctacttggaagatatcattaactaccgttgggagcttgaagaaggaaagcccaatcctctgagagaagctagtttccaagaccttcctctgcgtactcgagtagagatcctgcatcgcctctgtgattaccggcttgatgcagatgatgtctttgatcttctcaaggtacctgtctagcaagctcttttttctagagagtaaaaagccagcattttgagtgtgaaaaccggaaattattgagaagcaagaggttagcttgttctcagcagtcttcatgcccgtaatcaataatgacctacatacatagccagtggccaaaggactgccagccatgctgggatatggctttaaaatttgttccttttaatttcctgagccatggttcaaataggagaacctttttgtaggtccttgtaggtcttcacgtaaaacaactgttgcaggattttccctgtccaatcacattagggcagtgggaggcttgtggttgaagggaggcagagtgaggagttgagagagacagagtggggggtgggggtgggggtgggggtctcaggaagaaagagagaaccagaatggtgttatcaaaaggttagaataattgggttaaagctctatcattagtatttggctctgaaattattgtattggcatcttgtaaattttgttattattgatacataaatttgattggctaattaaacattaagagtcttgattctaccaaataattaggtgtcgagatggctaaccagggatgcatgaggtgttgtgtgaaagggagaagaactcgggggtggggggtgggggggttgggggtggggagcatctgagagatggcctggtgggagccatgtggcctcgaagggctggaacgttggcgggccaagagactgcgtgagtgagatcaccttgcacaggggctagctctagagagttgttggtggcagcaggagtgcaggagcatggcctggccccgctgagagttggcacgttcattttttaatatttcccacaacaaacaatagtgaattttttttctgtaattaacaaactccagagacttgaaact

SEQ ID NO: 31809 - DNA, 1044 bp, Mus musculus
cttcctggcagtctggaacatgggctatctcttggcctctttctaatgtgactataacaacacaggagagacccagattttttatcttttgatagcttagatgtgcacagtgttctgcctacaaaagagtgtacagacccccaaatgattacacctttcagagactcactgtgtctagcagaggtttgtctcagccttgacccagttcatctaactgcatgctctatccattgatgttgtcatttcagctatcaagttattgttttgttctcccttgccagcagagcctttgcctggacatgaagagaaagcagcaagcatttgttcttcagagggggtatacctcaaacagctacctcacccagcacctcccttgcaagccagctgtaccaggcaaagctcaccacaagaaagggaaacagaggactcccaactcaaaagtgatgcttcagactctgcagacacttataagacatcaaagaacaagaacacctggcctttggacaatagctacagcagcccagctgtgcaaggctgtttgagggacctctccatagtggcagagacggggaatctacctgaaaatggggtcgttggtgaagcatctccctgtaggtcagaggggaagggccttgatggtagtggttcagaaaagccactctgccccaggggtaaaacattgcaagaagccgtgccatgtacaggaccgaatgcaactacacctccttgcacagatcccagtttgatggcagccactgtgaaccagttttctcccttatacatgcctggcatagaatactctaactcagctacacagtaccctatgagtccaagtttgcaaggtttggcctctatgatgggaggaaagtcctcaggatcacaacctcagtcctttcctcccaggggtttccaggctaatggtccccaccctggactctttcctcggtaccgtcctcagcagggaatgagatattcctaccagccgccttctcagccttcctaccacccctatcagcggactccttattatacatgtccacaggg

SEQ ID NO: 31810 - DNA, 5101 bp, Mus musculus
aaacttagccagagcaatggacctggagttcttgctggcttctccaaatcccaagactcttgttcagggaaaaatcactttaaacttgggtggagggtacatgtaaggctggagtggtgcttttaaactttcatgagcagctaatctcaggtatatatttggggaagggactacttgtagtattaatgtttttggagctgggtccagtttacagaagtttcatgttgcctttttttaattttttttttttttttgtggtgaatgtattgtatatatagtgggacagtcaggtgggcacatggaggagttgggattccttccccgatatggccagcatactatactggacgagtctctgtctttgtgcagtcaggtcacactgaatgcctgaggaacttggagaagagacccagaagactgcagcttatatatgtcactaacttgtttcctctccagccgacctccgagacaagatgtcctcctcagcattcatttcacagttggttggacggtgctgtcaatgtggctttactgggtgtcgcagccataggacaggctgctcttactctggtggcctaagttctggacttgggaaagcatgtcccttcctgcttttccaccagctctaccagatagttgtaagccaggaatttggactctagagtgttttattagaagataaagtggcttctccatgggcctgtcaggcctgtgatctagaaggcatcatacagtgctttctagcacaaatcacattttgtgaaagtgactactcaggtttgttatgtatgttagtctcaataaagaaattgcacaggtttgaataaggaaagtatatcctatagatttaaatttgaaattaggactatttcagtatgtgtagtttttatccagcttacgtgaatcatagtagactcagtcatgttgatttaaagtagctgccaagggctagttcttggggattatttgttgtgtctgtgataggaaacaattttacagtattaaatcccgttactatggatttagaagtgaattacactggattctccctgtttagccttctgtattttattttagctgagatgtcaccaaagttaggatctatgtttaaatttttgaatatcccatacagaataaaccaagggaaataccctggagtttcaagtctttgtaaaggaatatgatttttaagtatgctttggggtaatagagatttccattaaaatactaatctgccctagtatcttatagtataggtgtgaggaggggtcaatggagttttccctccagttccagtgtcctcaggaaatgcagactagtctaggaggattgcagggaaaacaattggacacacccaggctgtagagatagctggaccctaggacacttgctctcttgataaaagtggctgcttactaacctgctggtgttgctgaggacccagagagtgtttcccaggttatggcgcacacacacgagagttttctttcctgtttaatttgtgtttgcaagtctcttgaatcagaagccagacatctgcaatccagtttagaagagcagcgaagtcagaattgtgctgttgagctgtataacttaacctaatcaactgctgcaagatttgtgtccaccactaacagtgggggcctgtaaatctcactaggactgcagcaacaatctggccccacagtgtcaaggtgctaaaactagaggttgctaagctgcttccacctcccatctcaccccctttacctgttcctaaagaagtgctatgaacaaaactgtggagagaggaaagttcctttatcccttcctggtttatggaggaaattaaataggaaattgaattactacattaagttctaacactgtaagaagagcctgttgtgtcctgtgtgtgaatttggtggtgtctaggcttacagaacctagtacttcctctcctggtctggccccaacttttattggtctttcaggtgctaggtttcctggagcagccagaacacagtgctgagcctctgtgatcacacccctcactctctcaaatgcagacaagatcattggttttttacctttctgcttccagcacttctcttccaggtatcttacacagatggcaatattttaaaagcagatgcaaataattctgtttgcagtcttcagtagggaaagagtggttttggaagatggaatacttaggaagcagtatataaggatatcttaaaagattcacttttaggctaggagctgcatcttttggtcactgtgaccttgctagtatgctgactctcagtgatccccaggaggacatagttgtgcgtaattggaagcactctttgatttagtgttagacttcgctttatcagatttcgtcataacttagaacccttagggcttaaaagaaataaaagattcagaaagcacaagtggagccttttagagggcttatgagcgtgtgtgtctttgtcccccaaccccatccctactgtgaaatagttttctttaaagggaaaaaaatagcaagagctgttagctaaaattcctccccttagaagaatgtgaataggatagactatgcagggctcttgttcatgtaactttccgtccaatctcttaaaaataaatgtacagctactcttgctttctgagccagattggttttgggtcacctgatgaggcacctatctgagcctgtgaacttctcttcagttcacactgagcctagctgggccacgtgctctcaaaggctaaatctcatactagtccatatattaaactatatggaaaactttaagacccgtggtctcctccaatcaaatttcatgttgccttttttttaatcaatcaaaattcaactttaaatgtcaattactctagtctgtctcttgactggccatggtgttattgtccaatgacatttgtttgctgtatggttgttctctacgttaacttctactgaaattaaaaggtgtgcatgttcaatgtagtcttaaacacacaaatgtcccaatgtagttctcaactatgtttgccatcaacatgactcaagtcataccacttggtcagactttttttttttaatgaatgttcaaatctataactaactgttcttaagacctaatcagaggtgggggaggggctaaagatgtagttctatgcactggcctagcatgtgcaggtcgaaataataaagaaggtctggtggaatggagctgtaatcccagctccaaggctggggctggaggaccataagttcagccttgcctgagcaacttagttagatggcgactccacagtgaagaggggtggggtggtgctcagtggtagaacacttgtgcagcatacatacttgaggtcctagcttcaatccttagttaccccaacactccataatttgaaattccccaggaaggcttaatccagagtcaagatcaggtgtcaaaatcctcaggtgtttcagatgacctcatttgatcttctagcattctttactgttccctccttggcctccttccttacatacttaaaaccctgatgtgacgttcccttcacaagagtgtatcagtgagtgttcagtctggaggatttctggaatgtgggcagctcttgtcaacagctatagcaaagacacttggcatttgggtgaaacatgcagaaacattgccccttcccccatgaatttacagcactgctttagttccagtgtgagcccagcatggtggcacaggcctttaattccagcaggcagaggcagaaagacctctgagttcaaagtctgcttggtcaggccaaagcttaagtagtgagacccccattaaaatagcaaacaaaccccaagaatgaatgtgacaaatgtgattgatacttgctggtaaaaggctctcgattacctttttctgtttgagcacactgaactccttagagccttaggacctggcttagaccttccttttgagtagatgagttgcgtgcccaatcacagtaggccaacacaagcttagccttggtgctaagatctgtgtcagtcttgggttaaaacacattctctaggtgaggtgggacaacaagctttctactagcttggcttaacttagctgctctcactccatcctcccccttggagttcagtggggacagctgtatggatattgaataatttattgaaatgctgcctccctccctccaccccattctctgtggtcccttcatttctttaggcaggggatatatctctcatttgactcgtgggccctagccccacattgccagtctgcacacagtatattggacattgctacagaagtgaatgccctatgaactgtcctggccaggggggaatggtatttatttttatattgtatatattttgtcatggtctgctggttccctgctgtttcactgagagcgacaattacctcaatagttagtttgatgctgtgtgttggataattttttgaaagaactttttaaaaagcttttttgatctttggagatctgtagatttatttccatatgaactcgttattttgtataaagtacattgttaaattagtaaggctttcgtgtatgtgcctggtgtgtgttcatgtgtcacttttatcatcaggtcagactcctatttcaacagtgcccaccaccttaaaggattcatcttcatctcacttagatgccaagaatcttcacagtggtacagtcttaactatggccagggcaaaacccatcacagctagtctgtggtacccacctgggacctttatcctcatcccagctacaatgcatggctggttgcaggtatcttcccaaaagtgatggccatgtttggcattgactgctctccttgcagagcctttggtgagcagtcagttgacagagaccatagataacctgtagcttgtagtcatccaagttacagatatccagaagagggagctgcaagcccaatgaagcttaggctaacccaattgtttttagttctagttcctgggaaatgttttgattaggtaggttatgtaatcaaccgtggtcttagaccaaactacctagctgcttttattattacacttttaagtagtcctcattccataataattcagccatacatgtg

SEQ ID NO: 31811 - DNA, 1169 bp, Mus musculus
cagcctagcgaagattcattttcaccacgttctcttcaggtttcaatggaaagtaaagttagaacttgtttgaaaacttcctcacaggcctccaggcatgagaagctggagagccaaccttaatggcagttctcgagggcatctttgaaggccaagctaaggcctgccaactccctggtgggctcccttcccagcagatctgccaatatcttagcttggtgaacccttcactatgagttagtgtgagctgatcaggcagttaagcatggcttcctggagagaggttcctagcctgtgtggaaggagggggcaggacctgacagctgctcagggagggtgctgaggagggaacactatggacagctggaggctcagcacctgcctggcccttctctcatgtcccttacccaagctagctgagaccgagaatcttctctcacactttctctttttctcctccccatggcctagcatctccgcaaaactcatcaatggaggtatagcaggtcttgtgggggtgacctgcgtgtttcccattgaccttgccaagacccgactacagaaccagcaggggaaagatgtgtacagaggaatgtaggtatcggcgggagaggtgaaggcagggaggggtctggagaacaaggccaactgaggtgtgcccatgaaagggaagaggcccacttggacactactaacttcctttctggcctctgcttccaggacagattgcctgatgaagactgcacgtgctgagggcttcctgggcatgtaccgaggtgagcttctgaatatcccagaggagttcaggctcctctatgaggacgatggggcagggcatacagcccacactttgtgagcctgtagcacagaggggttcattccacgcagggaattaactttccagaaccttcgatgtagaggcagattcttctggctaaggccaccttcgaggtgcctagtttgtgctatgttaaaagcaagtgtccccagcctttctctgcctccctcccctcttcctctccttgacataaagaatgacccacagagctgtgagctcagccccacatgatgaccccatgctgctgctgtctgcagcttctccatacgtaatgaggaaaaaacaggccataggtccgtgctggaaagaactgataagatatgcagggacc

SEQ ID NO: 31812 - DNA, 1212 bp, Mus musculus
gctaactgacctgtgtacccagctctcattcctgttttcttagggcctaacatcatttgtgtggcttcggagaaatgaattgagggccatgagattgggtttcttggtgttgacatggccatgaaaggtagaaagaggtgagagtcaagggtaggaactggagccagcacctgctgctcttccggaggacctgaattcagttcttagtgccgtgtctggcagctcactaccacctgtaacacagctttaggaggtccaatgctctcttgggggttacagatacacagacatgtaaattagtaaataattattttttaaaagctgaactctttcagtgtacaatttccccccaaccactctccactctagaacagcagttggaagacagtaatgaactgtctgtggggcccaagaaggcacagcttgactctgcagaatgacagtcatctgctatgctgattacaggacaaggatttaaccagctttatttcagatcatgtcccacaagcatctattggaagggatctgggcccatacttcagggtgagtatctggggcaggaccgctgctgaggtggccagaatgttcattcaggctctcagactattgctgatgcccgcgagggcacaggtgcacttctgatctgttagggcggcaaggttaggattgacgctaaaccctcacaggacgattctgtgccacacttgcctgcagtggggatgttagtgtggaagagcccttctgtcttactgcacacggtcctgccatagtacataagaggttggggcttccgaacatctctggttcagaaagtttagttttcataaaggagatgaaggctctactcgcttagtaaaatgggtcatttcttctgaggtagcactacaggttagagaccacgtacgtcagagccagcatcttatacttccagcagtgccacctagttccctagggccagaggtgacagcaagaagtgacacatagattactcaaagcacttcaagatgcgctctccgatgccaatgaagtagacgccctgggcgatcccaaagaggggggctatgaccagggcacggcagcctgctcctttcatgaaggctgctggcccctcctgtgtccagagcttcctgtgaaggaagaaaggagagcttggtaggtgaaggctacgcacacatttactcaggactttctgttgttggatttggggagaag

SEQ ID NO: 31813 - DNA, 1374 bp, Mus musculus
acttgggatactgagggagcctggaggcctgcaggggctttgacacacaacctatatcccttctgccagagtgggaactactttcacaagatcctgagcaatgctggcttttatcaaacttccagaccattggagtgcctgagaccccacaaaagccaatgtggttactcttaggggtcacactcatccttgtaactctctgtcaagacatcaacagactccatctaagtgccctttgcagccagtcctggaaggggttcacacactcagtgtcacagactgagtacagtaatgacttcaggtctttccccttttgtgagcatagtctgactgcttaactgtctggcacagtgcagcagataggacaggtctgatgtgcttagcaatgtcctttccccacatggtgttaatattgtctgcaacttccctgactgaggtcctgatttactgacttctttacagatgatgccagaagtccgtggagccttgtttggtgcaaatgccaataggaagtttctggactgagcttcaggaggagcagttcccccacggctgttctcctggagaagcagattatctgtgtggcttcctctttctgttctaatactggtaatcagtggacaccctctacagctaatgccctcggctcagtgtcaacagcagggccacttggtgtgggcaagaacccagccccagctcatctgaggccacagctgttcactgggtttgcagcaggacgggagggtcagatgtgctgcacggcctcacccaggacccattctttccctgtcctgctctagtctagagtgagttgtgcatgctgtccctgctctttgggcataaagtgcatgtgggactcacattcctccaggaacactaccttcgctgttactgtttaggtctagtcttccttctctgtaaatgtgatttaaaatctaagccacaaatattctttatttattaaaacagagggcttatgtggatttagttgttgttccttatgtaaggcaccgagtttgtgatttgagagtaagttccactgggcacggtagcccacacctgtagccctagctgtggtgggaggattgtttgggggcagcctgggcaacaggaagatccagagaggagctatcccaaatccctgccgtacattaacctgcctgtcctggaggctggacagctttgtgtgtgtgtgtgtgtgtgtgtgtgtgtgtgtgtgtgtgtgtgtgtgtgtgttagcagtgggtgccagagcctcatagggaagcagatgctgcaccgctgagccatgccccgcaacctgtggcctgtgcatctttggggttttacctatcttgtcttagagagaataaggccgttttcagatggattatc

SEQ ID NO: 31814 - DNA, 1906 bp, Mus musculus
gctgctgcggtggccatcctggcagtggctgttggagttgcactggctttaagaagaaagtaacagtcttttcagatgagacaagacagaaagacctacggctttagctgtattcactggaacttagactgccagcagctactggacatttgcaggacactggaggaattgggctttcagctcagcgtggcagtgtcttgagacagtgttcacattggcctggttgtcattttagggccttggctcatgctagattcagaagggcaagagtgaaactcccacctccaacaggttagtcaacttgggcagtaattctctgtaggaggctgctctgtgcattatgtaatgatcggcaacatccctgccttctacccactagatgccactggcacccacttacagtgatggtagccaaaaatgtctcctacattgccaaatgtcccccgtggacaaagtcatctcccttttgagggccactactttaagggatagggttcaattaggagactctgggggaggaacctgcagctgggacggcctgctgttcatcctgttgcagtttctcggggcaggtgagctgaccgtgctctgcagctgttttctttctggtccccattctgtatcgtgaggtgctctctcccgcatcacaccacctctcaggtactgcagcagggcagtctcaccctgtacttctttcccacccaacaagctcccgaagctccccacggctccatctttcaaagatgatgcctttagggacctttaaaatgataaatacccagtccaggcgtggtggcacctgcctgtatttaggaagcggaagcaaagagattatcccaagttcaaagctagcctggtatatataccaagacaatctggggctgtttggtgaaaccttgtcccaagaaaagggataaatacactgaagctgtataggagacttagggttccccagtctgaatgccagtgcagggtagaagctgcagtcattggtcttagaggcaggaacgtggtcgacatgacccgtcaaggtctatttgacctcttaaaagtatagccagccagccaccccacgtgcctatgatttagcaatgacacctctgatggcatccgcgccatccagagcctggattagtgtggtgtgtctcccactgcctgttcttgagcattggactatcatcagcttctctgtgggtctctgcgtgtagaaagcagtgtcatcctttggcttacagaatcagttgggccataacccttattcagtataaatcatgaaataaatgataaagctttatcatttattattaggtatcacttaaatgaaaagtgggacagaaacttgaatttaagaccaagactgctgctgaggttctggcttggtcttcggcattcaagagacttcttggcctgaactcagcccagtgccaggcaacagacccagaggaccctatgcactcactgtagctagtgggactcagcagaatcccgtatcacctggctgaccccatccctcaagaaggtggggggaggacctgtctctctcatgcctgaggacacagtgccaccctgcaaggcacacatgcttgataagaagtcatctcagatttatcttagtcatgtaatattacttcttagatcctgaaatttataataaaaatacttttaactactctaatcaccaagacctgatgttttgaatgtccttgatttttttaaaaaagtatttttaaaagaagctctccccaaagagttgatcaggagattttattttagtgtgattgtgtgtcctgtcgatgtgtcccaccgtgatgtcctcttgtgagtttcagtcccatgcagggactgctagttgtgggcagtagtgtagctggaggtgatgggagttccctccaagttctcacaggtg

SEQ ID NO: 31815 - DNA, 3192 bp, Mus musculus
ctggcctttgttttaggatatttgtgtctgtgttctccaaggcaggagcagggaagaagctagcatctgagccgattgcttggtgctttattttactgctccatgaacactcagcctaacatgctcaagtatagttttctgggggatggcagacaggtaattttccatggcttctccccacatggacccttataactcaattcttcctttacctcattgacctctgcttggcagtgggctagagtagccacagggtggttctgtcaccacagctcctaggtttgccatcactttaaacaaagtaaaaaatatatccctatgtagcctaggctggtcttgaacttgtagtccagctcaggactgagcttacaagcacgtgtcaccatgcctggtcttgctgttacattaaaattagttctcaaatccttgctcatctaagggacttggtagaaggaagctgtttgtgccctaaagattcagaatgcattcaacttgcaccagaattgagtcactgtgccatcttctgttctttgtaaactagtgggaagttctgtagagacaggctgtcgtctgcgtatgtgcaccttgtgctcggaaccgagctgcataccaggccagtgctccatcactcctgctcttcaacccttggtagaattaattgttcattcaatgaatgattgacgctcacttagccaaaagcctgtgaggttttcctgacaaaacacctaaagaatgccgacttccttgctgtactgaagtggccagcctgagtccagagtgccttagcaggggggacttgaatgagcatcactgccttctagaagatggtctatttcaggggctttcaacctgtgggccacaacccctttgaggactgaatgaccttttcacagggatcaattatcagataccctgcatatcagatatttatattgcagttcataatagtagcaaagttacagttatgaagtagcaacaaaagtaattttatggtctgttgttaccctaacatgaggaactgtattcaaagggcgcatcattaggaaggttgggaaccactggtctagttagcacactcatttgggtggtttatgtatacctcacccaaagcatccctggttcctcctgcctgcatttcagtcccttcgggtgtcttgactgagtagagtgaaggtcctcggagcctggtcctttgaaggctgccaccgtttgtgagcctatgtgctaagcccccagttagagaacagtgcctgctctcgccttctgctctaaaggtgagatgtgggcattcaacctcttaagagctactttatggacactacactgtctagtgaagaaagaagttctcttccacatgaactctgtgctcactggcatgagccttgacctcttgcctcacacacacctgtgatctcaacagtctagcattgagaacctccatttgtgagatggctgtgacaagctacccttttaagtgagctctgtgtgggttactactccttatgctgatactgattgagcacgcaatgcatgctggaggctggagggttttcacaccttacgcctccttcaggtcctgtctaaacatcccaggctactgggtataaaccaccgagaactggtttaccgagttgcctagcttatcagaggcaaggcagtgagtgaaaaattcccaactccatccaggtctagtgtttttcttagtgaccctctgtgtgtggcagagcccctgtttacagttgtgtgaaattactgcacacagcagcctaggtgtagcctgtgtttgtttctgtgaaagttccatgtaggctaagtacccagtctgctgaatacagaaacctaaggaacaagctttgtattgcaccactgcccctttaggcactgggtgaccctgtggtctgtagtgttgttggtgaatgtgttgtcttcttgctgtaaacaaggtcaggccatctgacacagctctcatcaccaagcagcgatatgaaggcggccagccacttgacatttttgtcgggtttttgttgttgcagttttgatccctccggtccttcctccctgcaatggccatcggtctagggtaggcacacggaaggatgagtggacacctagagatactgtttggattcctggccctcaggctcaggattaacgaggtagccttccatcccactcatctgacgagagtgcttcctagtgaaaactctgccacagaacagtgctgtgcccatcagacccgagtctgtggtcttagttatctaccctgtaaaaagctattcgagagctggaagctctcctagtcatcttcacacagccctcctcgaaaacccaacttggcttgccatgtccctgtgtgcagcgagggtccttcccatgctcatgtttacacacacccccatcccctccgatgttgtcagtgtctcaggtcagaaccgtctcagggacacctttgaggccgaggcccaaattagcagtcagctcaggggcctccgtcagcacgtcactctggtgctgccctttgcggcacggaataataagctggttactggatagctttcggcaaacattttgatacgaaaagctgttcatttatttatgtgtgtgtggctgcatgccacagtgtgcatgtgggagtcagaggacaacttgtgaagttgatttgttctctacttccgatatgtgggtcccaatgcttgatggaaggcaccttgatccatggagttttcttgccagtgccacgttttgtcattgtgagatgacaggtttgtggatgccttcccccaggaaggtgagctacacacctcccttagtgaggcctaaaacagtctgtgtggtcctacatccatgggccatctgttggccagcctttttctcctggacctatatttcccctgctctgacaacccatgattttcttccttgagactaaaagtgcctctttctcctaactccttgattaaactcagtttgttagtggttctggtatcttgtcccccaggtactggaatggttatccttaacatagcagagtcaggtagatgtagctatcaatgtctgcccggggtgcatgaaatcctgggttccatcctgggcatggaatacgtacctgtaatcccagtactcgggtgaaggcaggaagacaatgttcaaggccatactaggctcagagctaaaggctagccctggacactt

SEQ ID NO: 31816 - DNA, 1158 bp, Mus musculus
tagaacctgtcagaaacattatccgagattcttttggggggagggggtttttgtttattctgggtgaaggcagagtccacattcccagatggcaatggaatgcaaggcaatcctcctgcctcagcatctgcaggcatgcacccccacacctgggtgggtggagcagaggacaggtctctgtgtgccaggcaggcactgttgactgagcagcagcccagtgcttgttttctaacgcaccgtatcctccaatgagacttactctgctgcctctttcttaggagatggactgaggagcccgcacaagcccgatggtgacactgcctccagaggaaccgcgaccatggaaagaccttggcctgaagacaggtcccagagaacagctgtctccctatttccaggtggtgggaaccccaagctggtgattcactggacatctctgcgttcagcttgagtgtatctgaagagtttacgccggctcctgcatccacaccatgtacctttgtcctatcagctgtatgggttcccacttgggaatgaaacttaacagcaggctgtaaggcagaaaagcatctttgtaatgccaagtgactgttcctgagagccagctctgggctgtcttcaccatgtaggtgggcttctgtctaaggagaacagcattaggagaggtgcatcggcccatgagcgtgaagtccacccagcctagtggacactgaagtgctcacaaggcctccacctgcctttgtaaaagccgaatggctgatctcaaaccatgggaagcccgaccgccccacccctcctcaccccagcgtttagctgtttcaggggtcagctattatctcaagatttctatccaagtggaaacaaactgaatcatgcacacgacttatctgtgtggtgtcagttacactcaggctcttgctacggaatgcaaagaacaactcacataccagtgtcaaacagaatgcacagaagagacctaaaacagcagcaggtcactcggttcacaaaaggtgactcccagtcaagtctgacacactgtcttggttgtagagcacagctgccatcctctttccctgggtaacatcacagaagattccatatcaaaagcaaatgttccctccgcttctgtatttcagagacaaggcctcactgtatcct

SEQ ID NO: 31817 - DNA, 1507 bp, Mus musculus
ttagccttcttaatagtgttaccgacctgcttggcaccagggagcagcccagggccctgtgggtccttgttcacagctttgccgtcccctcctctacccggcaccctgttcctgttgccactggacttttccaggagaatagcctctctgtatggatgcatttcggagccaggaggccaggcctcgagacaggttgttctggtcttttgggaatcttggctctgtggaccccactttgtccaattttgctgccaaggttttacctcctgtacatatgttaaaggttgaggctagcccctcttcatgcttgctgggaccaagtagagtgtgatgctcagccccagctagacaggaacatgtgtgctggtctcacctcaacataccggccactccaatcttctctgcctatatcaggattttcttggcctggcaggagccagtcagcaccatgtaactagatccataagccaagctgttcatttctcatggttcagccagagaccagcagttggagccagggtgcttctccttcaaaacagcagccacctatggaccagtccattggtaccataccaatctggaaagggcacgccagctgggcctgtgggaggggccagtgcagacaacagccaagggcccacactgaccctggactccccgtgggaaccacactgtgcctcaacttgaacatccatccacccaactccagaggagcaaacagctatcttacttctcaccttgcgcaaaagctgccatctctcctgtggaaacccagatgtgctgctagcaaccgccacagcgctgacgtcatcacttcctggactctgatatggcggcatcgctatttttattccatcagaggaggatgttctggattctattttcaaccacaatctgccaatcaaactggactttggacaggaccttcatcgcctgtgtggccttctccttgaccctgtcctcctctgcagtgccaccggcggcaatcccacgcagctcagccctgtcattcctgctaacccagaacaaggaaaccatttcccgagcgactcaagaaggatgcaggggcacgctgcatctctagctgcctctcagagctctgcaccagatgttcccttccacctctgtcctggtcagccatgacgtgttgatctctccaaagcacacgctgcttccagtgaaagtgggcagaacacttcgcaggagggcctcagaaatccaccagccttgggagacgtcccgcagttctccagtcgtgacgacacgaggacttcagaatcccacagagcacttttttttttaggctaccagtttgtaaccactagtttgcagttgatttcagtggcccgggaacgagacgcgaagtgttctccacctctggaaatgcatacagctctggtcatgcgttcttcccaggaattatgtcttcacttgaaggcagggaagagagggatgtatacacttcatccacacatacagtgctagagtgcttttgagtaaacccaaa

SEQ ID NO: 31818 - DNA, 1157 bp, Mus musculus
tatgtatgtatgtatgtatgtatgtatgtatgtatgtatgtatgataaagagttcaccatgtaggctagactggctgtctggacagcaaatcttgggggtcaggatccacctgtttccacctcctccctagctgtaagattacaggcacaccccaccaagcctggctttttatacggggtttatagctcactctcaagtcttcatgcttgcaaaacatgtattttacgaacaggcttatctctccagcccaatctaggttttcctagccatctaaagccctgacaacaagaagtaacttccttttgcttccatctggttcttatgagcagcctgcccaactactccttcaccactgaggcccactagggtctgtcctgccctctacgagcccccttatcctgcttggtagccctgacacagttccattgccagcgagccatgctcttgaccctactttcccaggtgacccagagtgtgtcatgcttgtcttccctgtcactgccactgccaggttggcaccagtcgcagcagggagtgcattaataaggggctgctgtggatcccttgcagacaggtgtcggcatggctcttgaagtgtgtcagtgtaggaccctggggaccacatctgtactttacctttttaaactggcccgttctgcatgacgacttaactcacagtcggctatgcaggggagaggaactgagcaggcatgatgcccgtgctcagagctaaaagcagcaagtgtgtgcccagccagcatgcatgtggtatcctgtgcaggtcccccaatgtgccacccttagcgtcctcctgtcctgggtgccaccagattccgattgcctgcatccacagggacctttaggcactttatgtgacccatgagaagaccacaaaagcaaaggaaaccggccaaggctttgagcaactctggtcagtgtgtgaactggagaggtttcaatggttgcccaaacactggtacttcctctaaaaaaccgtgatttgtgctggtttggttcccttcactgggtctagttctgaaaaagcaggtttgcccagtgtcaggacatgtcttccattccatgctaagtgttcagtggcaggaacagagaggaaggaaggggctgccgtggctgaggagggccaagtcaccacaca

SEQ ID NO: 31819 - DNA, 1195 bp, Mus musculus
gagtctctgttggcccctcccactcctcccacacctccccccacccaactccccatctgttcccaacctcagccctcctcggatgcctccatcccatcgcccaccaagtcccccatacgcttccagccagttccagccaaaacatccacacccctcaccccactccccgtgaagagccaaggagaccccaaagacagactgagtggccccctggctgtggaggaggtcttaaagcggagtgatctggtggaagaattctggatgaagagtgctgagatccgccgcagcctgggccttactcccgtggaccggagcaaggggtcagagcccagcctcccctcccctgcctcgaagccaatatccctaaagtcctactcagttgacaagtcacctcaggatgagggtctctgccttctgaaacctccatcggttcctaaaaggttgggcctaccaaagtcagccggtgaccagcccccactgctgaccccaaagtcgccctccgacaaggagctgaggagcagccaggaggagcgaagggacctgtccagcagctcaggcctgggcctccatgatagctcctccaacatgaagaccttgggcagccagagcttcaacacctcggactccaccatgctcaccccaccttccagcccacccccacccccaccccccaacgaggagcctgcaacccttcgaaggaaaccccatcagacttttgagcgcagggaggcctcaattatcccccctcccacccctgcctcattcatgcggcccccacgggagccggcccagccccccagggaggaggttcggaagtccttcgtggagagtgtggatgagatcccctttgccgacgatgtggaggacacttacgatgataagacggaggactccagtctgcaggagaagttcttcacacccccttcctgctggtcccgctcggagaagctccaggccaaggagaacgggcgactcccacccctggagcaggacgtgccaccacagaaaagggggctgcccctggtctccgcggaagccaaggagctggccgaggagcgcatgcgcgcccgggagaagtctgtgaagagccaggcactgcgagatgccatggccaaacagctgagccggatgcaggccatggagatggtgtcctccaggtcccacacggcacaatcgcagggcaaggaactaggat

SEQ ID NO: 31820 - DNA, 1145 bp, Mus musculus
tacagaaaaaccctgtgtccgggcagggggtggtggggagccacacactaaaaaggaaaacaataataccccatatcccatatcagatgcttcataaagtgaggggcatcggagcaggagtggtgggttttgcctgaaacagacgtgttacatcactttccctatagcatcaagtttggtcaggtgcccttgcagccttcagcctgcttagtgaggggttagccctgaagataagaacgggcatccttttaagaatcgtcttgtccaagctgggcatggcggtacacgcttgtgagcctgtgtatgtaacggcagaggccaattgagttatatgagaccttggctttaaaaaggaagtaaggaagaatgaaggaaggaatgaatgaatgcatgcatgagtgaatttcctggtccagcccgggagcttgttctcccacagttcaaagaacttggttcagtcatctctggtgagcagtgtggtatatttcacaacatggctgtggaatcagacctggactggaagctcagccctaccaccgactaactgcagacaaatcccttatcctgtgtgcctcagtttccccacttggaaaggccatgagcttataatgaacattacacagatgaatgcctggtacccagtggtcaccaaattagtgtcagcattaagtgtcactgcttacacacccatcgcagtgcagtgcccatccctagctgagtaggccagggatgcaggtgttggtctccatcaccaggtggcctactcgactagggatgcaggtgccggtctccatcaccaggaggagtaagagccagagcctgcctgggtcaaacttactgcctcggctgatcatcagcctctctgtatcatagctacctgtgtcgcagatggctgattgagagccaattctgctgttctggggacaacccgagagccttccttaaacggtaatgccagtctcggcggcaagctgtggacactggtttccagggtgtctggggtcttcagggtcagcagatggcctaggagatgtttataatcacctccacgggttggatcacatagtgcctgctggtcttaagccgtgtcaccgaaccttgacaaccaagactcatcagccatctaactactccttgttgactcc

SEQ ID NO: 31821 - DNA, 2354 bp, Mus musculus
atctgtgcctgtctaaggaaaatgttaggggtttcagattttttttttagacactcaaaaattgagggacctatggataggagaagcatgctctataaaacacagaaaatacacttgccagtgtggttaaagagtcaaaacaaacaggaaagggcccaagctagaacttgcttgcagaatagcaagagagggtcaagatctggcgccccaaaatatcccaggtctgaatgtccaaagtgaggctggcactgtacccctagcccaagggactccctacagagggagagcagactctgcaagtcattgccctgagtcctggacatgctcagaaccctggcactcgatcttgctagccactgaaggccggggtgggggtgggggtggggaggcagaattatgagtgacattttataggtgccatgagattggtttctgtttcttcttgggtagaaatgcctttttccaatcccacattagctttgagtgcttggccaaacttgctccagaaagcttcaggcaaagcccagtgcctcgggcttccagaatgtgtcagagaagggttcttaagcccatgtcccatgtgatcgcccatgttccctagagctcacggggttggggcggggagggcaggaagagctgggccaggctggattgtggccctgcctcctggtcctgtaccttcttgatttcctagctcttcgctcttctcccttctgttctttccccttaggcaagaattagtgctgttgtataaacaaaataccagccacaaaactacccccaaatgacaatatgaccctccttaaccccttgtagagagccctgagtaggccttaacacgctgtcttcctctggtaacctcgtctgcagctgctgtctgacccctgtttgagacaatgtttctggtatttctgtctgtaatgtgcgtttaatatagaaatcctcgttttgttctcaaacctgtaaatgctttgtttccaaaccacctcctctcactgctacagatcagtgggcctggcacagatttccttaccctggcctcacagtacctgcctggagtttagaagtctggaaaccggacaaagggaaaaaaaatcaaaaacgctgggcgggatggctgttctcttgggtgcacgcccttggttgcagatggtttcttttctaggtagaggaatcccattatgcagaatgaaaagtgaggcacaaggcacatgggtgggaagggaaaaggagagcttttctccctgcgtgcagacaagagcaggagaagcacgctctgcagacatctgctgaggaagtgtctttcctggagaagctgtagttaccagtggcactgggctgtcccctaaccccaggtactcttcagtggtacccactggctcccacagttagggaacacaggcacgggcccacgcgagccggaatagccacacgctacaaagaatgcgtacaaagaccctgggcctctgcctgacgaggaggttgggatcctctcgtggcttcctagggccccttcccttcaaggctatgggagaaaaaacccaggaaaggaaatgctgtggaacagctgccatgccgtctgcttcccaacctgaccgccagagccaaagctgagcagtggtactgtgtgaaccttgaacacacctctcaatgtaaatgtgtatatttatgtgtgtagatgggttttagttcagtgtgtaggcagatactatttatctatactgtgccctaactggtaacagtgagactgtttataaagctactagtctgaaagccataggaattttctctggaagcttgccctggcttgactcccccagcatagccaggattcagagggagcccagccactaggcatggcctcctgtggggcatagatgcgggggccaggtctctggggtggtacacacccctacactcaggtaatcagttttcctcatcaacaaagcaatagtcttactggtgcggggaccagagagtctcagatacctcctttccctcaagtcagtctgtggtctaagtgttagctccactgtggccgtctcagatagccattgtcttagtattcactgggcctggctgcttcctgcaggacagtggaacccattaggccctctgtgccactgaatactggccagtgaagtaaaggggttcgcttttaatcgcccaactgttctcttggggtgaggcaggagactggcagcaaagactgcccagagctgtggtacatagaagccagagtgcggaggaccagctgtgccaaggaacactttgcctgtccactctgaccttccctaaagcttttaatttgcccttgtttttaatctgtgctgttgtgagttgttttttttttt

SEQ ID NO: 31822 - DNA, 1197 bp, Mus musculus
ctgattagatagcagggaggagagggaggagcccaggcaaggcaggagctgctgagtaggtgcttccggacccaattggtaaagctggctctatttccatgtgccaagagcatgtgccactgctggggaaagcccagggggagcagagtcctgtctgtgctgccaggtgcctctctgacgtcaccctgcgcatgcctccttgcctgtcagcttcttttgctaccctggttttaggtgcactgcaaaataggacctgctgtaacttggttggggctgcccttggagttatttggggggcgggtcttttgtcaacgcttcccagtcaggagaagccacaagagcagcaagcagtagagagtcccactgcctgctatctagatgtatgtattagatctcattgttcccgtttgctccggttactttaccattcattgtgcctctctattcaaaatgcctcagtgcagatttatcaaaagataagacagtgctccttggccacggtacagagcgctagggcacttagcatggatgtggaactgtagtctgattgtttctgacgctactgtgcctcccgtagctgttcttgctagatggctgccatcctcggagagacgctcatcacaggagtggatgctaacaatcctaatggcaggattgattctcctgtatcccacctactactcactggtcccgccatgacaagcagcagcctagagggagggtcacctgctattactgtcttgaacttgagcggtggttccccatcttcctaatgctgcaaccctttaatacacggccttttatagtggtgacccccagctataaaattatctttgctgctacttcataactaattttactactgtcgtgaataatgatgtagatttctgataatcgactccatggaggttgcgacacacagacacacaggttgagaaccgctgagttctcacatggctcctgctgtcgcttcccgcttcgccgggatgccactccatagggaactatgtgcacctgagagctggcgtagttttctctgttctctttcattgcatctcagtatggaacatgatcttctctaagatgtgccctctccaggctttgtctgagaagcagaaactatcagtaagtgtcagtaatttgctttggaaataaagtatgtggggggcgggatcctaacattttggacttgggcca

SEQ ID NO: 31823 - DNA, 1181 bp, Mus musculus
ctggggaagacaccactgtgtataattaattggcaatcgagtttttatagcagagccttttacccagttaggcctggaccagctgaactcatttatttccctgtgaaaatggaaaaaggaagtatttaaccagaggcttgaattctgtcacatcatttccaacacagataggctattctccaaaccagtcttgcagaggttgggtggatgggggtgaggagtagcagacaagtttatgtctttggtatttgcctgtgagcaagtggacctgatgggtcagagatgaacactgtgtgcccagccttcctagagaaggtggactaaggagagagctctgggcctcgtcacactccgggagcccaagaggagcagggacagtccctaagggcttcaggtgttgacacactcacccttgacatgtttattgaagaacttctccggagcctgcaggaagttaccgtatttgtaggtgacaacgtgagagcagtaagcctcgctgtatggtgatctgtgatttaattggtcaggagtgccgaacttggagtggtgcgcaggtgcgattggtcaggagcgtggaacttgggagtggtgcgcaagtgcgcactgctgaggcgcagtacccatccaagactgcttgcttgtctcttgcacattacagggagcctttctaggctttacctaaccccctgtgctgtggctgggatgtttgtattttgccaacagggttgggttgttttgtagctcttcctcctcaggaccatggctgcaggaagggctgggttacctccacttcctgcaggcggccattgggcccatcaccactggagaatctgctggctggtatccttgtccttgcccagccactgcttgccaagaagagagacaggtactctagtggccgagcacgcctagaggacatgctgccggccacaccctctcccaggtgttctgactgtcctggtcacgagggcctccactggtcacttgtgggtttagaactgttgttagaactgccagggcttctttgcagcaccgttccagctatgactcggagcctgggtggagccttgcggtgccgtttcaggctctcccaagcccccaccttctgctcatctttcgaggtcacttgctatatttggaggctgatgaaggcctccttggacttcttactgccgagtgta

SEQ ID NO: 31824 - DNA, 1367 bp, Mus musculus
tctttctctctctctcttgggggtgccccacctttcatgaggcgtatcttcattcttctgttaaccattcttaaatctgttagagactgaaccaacactagcaattcataataagctcaactccgcttcatactggttcctcttgaaagtcttttcttaggcagagtcaagaatcctgcttcgcctgagactctggaaagaactcctcgggctaccaaagggtggcattgggtaactgtctctccatccagtgcctggcagaacagggagattgaggagggaagagccggctctcgatctgtcaaggcttctgtttggaatgggagccagcgggacaggtgcattctggagaacgagagtgggcaagccaagccgtgctccaaagttgctcaggaagggtgagcaggccagcttgcttcccacacagaatctgtgatagaaattggattgggcaagagttgtgtgcttttcgatggacttaagcaagaaaactggctctaattcaaatgtccttaaatcaaaggtccaattggagctgtggctcatggtccctgcagccttcacctttgccccgcttcctctgagcagagctctgagctggggaacctcagacggctgatggggactgacacaaagcttagcttgcagtctgcccctcctgcatgtgcccagatctgtaccatctcacaccggctggaggatactcccgtgcacatgtgtgtgcaccagtgctgttatacatgatggtgcatcatgttatacatgcatgtggataaaacacatgcaattaggttgcacatgtatttatgtagaaaagtcagaatgtgtccctgtagacaaactaatatatgtgcccctatggacttgactttcgagatgctgaaagtcggaagcatgttgtcacagaacaaacagaacaagcccccgccccccttcccacaccctgtatttttttggcctttgcataagcacacaggtcccttgtttcccctctagtgttccagggcagccatcttcacgcctctccttccccctcagtctttagtcctcatctgattggccagctgttcccactccccgttctaatggcctctgtgagaggaagagctgagtcagctggtggccaggagccaggacccaggacagagtctgactatctcacaggcctgtgtccttgctgattcctgctgttgctggctctgccctgctccttagaagcacagagcatctccttactcaggtcatcctagagcctcccaaagcccgagaaaggcctggctcccaaaccacaggccagaaggcccccattccacagaaaggaccacagtttccccagctgtactgcagaatgatagatcgccatcctt

SEQ ID NO: 31825 - DNA, 1112 bp, Mus musculus
acactgtgtgctttgagtcacactgtgtgctttgacaggagtgatactttacaccaccccacagtggtgccatccaccttgtagattatagcatacacaggggctgccttttctatgcaaaatacctggaatccgtgcaatgcataccttatttctctccgagactcagtaacaaagcagcaaatctcttgggaataacatctaccatctggtagagaccaggttctgagactagacatttaaattgatgaaaaaaaatgcccctaagctttcaagtcttcttattgttggcctgaggtcaagggtcttttgatataagggtttcaaatgtttgtatcttctctctttcaagctccaatatccactatgccccaccctaaacacacatctggacagatgaatggccattttgtctccaccccttgcttcagaagttcctcccattggaatgcctctctctacagcatcgggctaattggatctgcagttaggccttccttgccagcccatctcagacactccactatcatcctctgagcttatttgaaagtctcctgtattcaaccagctctggtgacatcaaatcactacttaagaacaaccactttgggctggagagatggctcagtggttaagagcattggttgctcttccagaggtcctgagttcaattcccagcaaccacatggtggcaacgaccatctgtaatgagatctgatgcccccttctagtgtgtctgaagatagcaacaatgtattcatagacacaaataaaaaattcttttaaaaaaaagataaaaaaaaaaaagaacaaccacttcattgggagattcagatcacaggtatgcaagcatagggttggggaggcagaggcaggaggattgcaaatgtgagactaacttatgtagataatgagaggctgtgtcaaacactcaaacaaattaaagactggtggcaaagctcaatggtaaagtgtttgcctagcacacgcaggccctgggtttggtcagacgccacaaaaccaaacgtaactgaaacaactatagcttccttacagctcttagaggaaagattctatcattctgaagccatgtgcagtttgactccaaactc

SEQ ID NO: 31826 - DNA, 1206 bp, Mus musculus
gcccacaggatacaaatccagattctttttaatagaaacttaggccagtgttcgcacgtctggctgacagctcctttactgtgttgccctgttcgctgagcaggctgtactctagctgccaggtcctcctcaggcctccctgtgatggcttagctgtatctgctggagggtcttggagcagctctgctctagacccttggctttccaggctctcaagggttacccagcattctttgctgcccagcccatctcctgcccctcctgtagtgggggcctggtggtgggtggtgggactgtttgcctcttccagtgccgtaagctccatgaggctgcagagtgtttgagtcgggctggcattcctgtgtgggtgactgttggccagggttctgctttctcatctgtaagtcggttctcttctcacagggcctcttctacgagtaatgggcacttaggactcttggcacttttgacagccactaggaagagttctcgtgagcagtggtattcccaggctcagctgagcatgggtgggtcctcagggctgagtggactggtggaagagggcatgcgcttctggtgctgtgaaaccctgaacagatcggcttgtctttctgctctctcctgatgctcctcacagttgttctgctggtggcccatggggctctgtttatttttacctgactgctgcagggctgtctgtaccttaaccacctgcctatccagccaggaactcgaatcccaaactgttgctgttactttgtcctttccaaggatgtaggctggtcctcggctctgggcttaaagaggtcagagtgaagggagggccttcttggtgggtccagcacagcagccatcagccaaaggtagcttttgagcatttgaattgtgtgcggctcatccacgtggacacatgctgtaattgttaaacatgcacactggatttcaaagaccaagtactaaaaaataaaataaaagaatggaaacacaaagatttttatattgactgtatgttgaaataatattttagatatattgggttaaataaaatcaattaaaataatttcatctgtttctactttctgtagtgaggcttctagaatgtttaaaatgtcctatgctgcttgcatttagatagtgccattcaagacaccacacacactggctagtctcagagcggggatcagtgtccacgaagagcagtgcatg

SEQ ID NO: 31827 - DNA, 1449 bp, Mus musculus
tctgcacaagtagagtggaaggcagacagacatagggcctgtggggcagactcctgcaccccaggaagagcaaggacagctaaataggcagaaagccatgagccctggctgtaaacatttttataagttgaaacactggatactctaattaaaaagcaaagattacttgtacctttggttgcctcaagttgttctgcagtgcttacctggctgtaacccaaatactcccatttgctttgagcctggaatcagtcacctgattgtcccttgtgtgggattaggacagggaaaaaaaatgtgaaattccccaactacagaattctaaggtaccatcacgttgtgtataggtctttaagtggcttgatagtttgaattggaccctgggccatggtttataaatccataggtaacccaaatgcctaatcaagtagtccttttctaaagtaaacagaccctgtgtgttgccttgtggtagttagtctcagtggccagccttttcttcctcatctccctctactggtacttgtaaatctgagttgcacttttctcacagatctgtagtttggctttttatactttccccaatcataaaggaagggaatggaagcggaagtggacatggaggctctgcaggtctctgctttgggtggggacactgctgcacctgtctctcctgctggctcagggaagtgtctgacccacttatctatgggaaaaggattttagttctctctttctgtttaggccatctgcccagatgcaagctgatctcgctataatagtgaacgcctaggccactaagtaacaacacagttaatctgaacacaggagatgtgggaaaggcagggccattcgttactttagagaaaaatgaatgaagtcattcctacttctcaatacccttgcaatggcagtggaaattttgtttctttctatacaagaaaaataatgttatttttaaaaaaggcttctttgttgtttgcatcctaacccgtgttttcaatgaaaaataatataccacttttgtacaaaaacacaataattaaaaaacaaaaaacacgctggctttgtcgtttgtgctaaggagacacagcagaatgcagtaagacaatggaggccaactttcatccttttactgaggaaaaaaaatatttaatattttgtataaggaatagtgcccaaggtacagtcctgacctcagccccacacgctcctgttttgtgaagctataggacagagcagcgttggaatgggaaagagggttgaaggtgggaacagttgggagctggggtgcagaaagaatggcaacagccacatgtgtcactcaaacacttcgtccctgcagcaaaaccgataccaaccaagtgtctatgatggctggtgaccctgccatgaatgcagaagaaatattcagtattaagggagaaaatgaaacagaaaactgagcta

SEQ ID NO: 31828 - DNA, 2692 bp, Mus musculus
cacgtgttcggaggcgtggaccccgccgcagctcctctgatattgctcgtgctaagatccagggcaagcgccatcgggtgagctgctactgcagagccagctagcgtgtaaaatacccctcccttggagttcctttccttaggtaaaagccctagatacagaactctcagaattctagtttgacaccgactttattgccccgtctcctttcatctgacttcaagtttgtacatccatgagtcctttactacacttgaaatgatcagggaacactcagcgagttcacacttgaacggttctttagagtagttgtgcatctgcaagtgaagtacctgttgagacaaagctttcctgtggcctgctgtagttgggacgagaaggaactgggctgttctcactggcctcactgttctgctatctcctctcaagggtcaagaggactctagccggggatcagataattccagctatgatgaagcactctctccaacatctcctgggccactgtcagtaagagccgggcacggagaacgtgatctaggaaacaccattacaaccccatccacgccagagttacagggcatcaatcccgtgttcttgtccagtaatcctagccaatggagcgtcgaggaggtctacgagtttattgcttctctgcaaggtacgggaggtgggaggggagtgggggtgagggtgtgggggttggcccttcagcagaaccaggtccacattttccctaggtcgtcccaccaggctgacgtgtaagctgcggggctgtgtctggcagtttgtgtcctatagtgtggtttactaaattcctcctgggccaacaccattgatcagtgtccacagttctttggtttttactttgaattaaccatatttctcagttggagtttttggataatgtctctgtttggtgagtaactgagcacacaccagaggtttccattaggaaagacctttcttgactttcttcaaggcaggactgcccccattaaacaccattgctctttggaatttgtccctctgagaaaatgttggaaaagctgttaatctttttgccagtgttaaactgtgcgtgtagtttttcttcatctctagagttttgaggttacttatttgatgaacttgttacttgcttgatgttctatggagtagccagcagctctaatttcacttgctttcagagcttgcctcagacctgtctactactgaactgaggacagtgagttggactagctagccatcactaggcctgttttagttttttttttccatctcctgatgctaccatccagtttcccatgttcccaccttttccttttaggctgccaagagattgcagaagagtttcgttcccaggagattgatggacaggcccttttattacttaaagaagaacatctgatgagtgccatgaacatcaaattaggtcctgctctcaagatctgtgccaagatcaatgtcctcaaggagacctaagtgaccctctgcacaattcagactaaggcagaaggcctggctgttcaggttataacctggaagagctgttccttttgtgtgacctgtggggtttggaggcagaactctaaggattggttgctggtgctacatggtgacagctttgataccttctctgggtttcactttaacaataaaaaccttctcactattcacacctaccctaatccagtttttaaacaggcagactagagactaggactgcttagccttccttatcctggagtggagggactagccagggttcacttctccaaggaggaatggatggtaaggcaaggaaatggatgccatgtaggtttgcctccctatgggagaggtcagctttcctagcttatgacaggagcagcaaacctggtactctgctggagtctcactgtggctgtagctcagttttctgtttcattttctcccttaatactgaatatttcttctgcattcatggcagggtcaccagccatcatagacacttggttggtatcggttttgctgcagggacgaagtgtttgagtgacacatgtggctgttgccattctttctgcaccccagctcccaactgttcccaccttcaaccctctttcccattccaacgctgctctgtcctatagcttcacaaaacaggagcgtgtggggctgaggtcaggactgtaccttgggcactattccttatacaaaatattaaatattttttttcctcagtaaaaggatgaaagttggcctccattgtcttactgcattctgctgtgtctccttagcacaaacgacaaagccagcgtgttttttgttttttaattattgtgtttttgtacaaaagtggtatattatttttcattgaaaacacgggttaggatgcaaacaacaaagaagccttttttaaaaataacattatttttcttgtatagaaagaaacaaaatttccactgccattgcaagggtattgagaagtaggaatgacttcattcatttttctctaaagtaacgaatggccctgcctttcccacatctcctgtgttcagattaactgtgttgttacttagtggcctaggcgttcactattatagcgagatcagcttgcatctgggcagatggcctaaacagaaagagagaactaaaatccttttcccatagataagtgggtcagacacttccctgagccagcaggagagac

SEQ ID NO: 31829 - DNA, 1187 bp, Mus musculus
ttgcagctttgtggaggaaaggtcatcctttcagatgcagtttgccatcttgaaaggtcgtggggttggagagatgccttagcagttaaatgaatatattgttctttcagaggacctgagttgtggtcccagcacccatgtcaccaattataccaactccagcacttgagtatctgactctggttatattcctgcacacctggctaggcatggcacacacttttaatttgagcccttaggtggtagaagagcagacagaattttgaattcaaggccagcctggtctacttagcaacttccaggatagctagggccatataattggactttacctcaaccccctacctacacctccctctcaaagaaaaaaagtcttaagaaaataaagaaggagattccctcagaggcagatttggccatcaactcagagctcatccaagcagagacaaggggactttaaaaggctatagagggcagaaagggattagactgctttaactgccctttctctggagcaggtgggatgttctcagttcctgaaagaaaccaagaagccactgcaggctggccttccgaccgggctgaatgagagtcagccaagtggccctttggggggagacagcccctctgtaggtaagtgatgggtgtttatggagatgcttgatgaaggtggggcttgagcccagggtgtagcacatatgcaaaagttccacaaatgagcaacatccctagatttcattctttagagacaaggtctcaccacgtagacctgactgagctttaacttcagaccctcccaagtctggggattagacacaagggccaccacacctactgcccatacatccacacccacccagtcagtccttgtttacttaaatgaagaatttaggtaaggtctgtctatgcacaggtgtgttctgctcagcatgtggaccatacgaaagaactataagggaattttgctaagttaaggaacaggttggcttattttatatcatttaaggacatattccccttcctgtatccatttcctgtttgctaggattataggcctgtacttgtataccagttcatatacttcttgagagtcaagcctttagggtgttgggtgttagggatttttcagttagactgtgtaggtctttgtagaaaaccctgaggaaaattagtaccgagctctgggc

SEQ ID NO: 31830 - DNA, 1104 bp, Mus musculus
atgttttcacttcaaattcctaaatttgttactatcttagggtgtttatatatgtgctaattccatcaagagctctttacccagatctgtctttgtaaagtcaacagttcttagttcgtctacactgagtctttcagtccctagccaggacttagtgatgtctttcttgtcctgatgcagaagttacacatattgggatgaccaagaagtttagtgtatcaaaggaagtaaacagatttgggcacctggagctgagaatgttctcaggaagtatgtagttaaagtttcctttcacacctaaatcatagctgctttcttgtttattcctctctagggtaaagcccagaccttggctgtgaaacgcaaagctgagtctgaggaggagagagatgacctctccgcattggcctctgtgcttcctacaaaggcctccccagcagcagagagcccaaaggtaatagaggagaagaatagtcttggaggtgagtagccaacttctaaaatcttactggtgccagagaacaaagaagtgttttcagtgagtcaaaagataaatgtaatttagtagaaaatgggccagaacttggtgagcaataagtagatacagacacatgggctccatgggcagtgatgagagatgggtgtgttgtgtaggatcaggcttggtaatgggcgggtcagttgtgtcatctacatgcgccttaatgtgtgcttgtttttcagagaaagctgaaccagtggccagtttgaatgctaatcctccaaacagtgatctagtagccttggcccctaccccatcagcaccacctcctactctggccttggtgtccagacagatgggtgactcaaaacccccacaggccattgtgaagccccagattctcacgcacatcattgaaggctttgttatccaggaaggagcagagccttttccggtgagggcaggccttgcctgaaagtgggactgggaagggggaggtgatctcattttttttcccctaacattcctctaaaagaaggaagggtacaactgttttatcatcagagaatggttcattatggtgcctatttaattacagggtgagggacataggggagtttgtg

SEQ ID NO: 31831 - DNA, 1169 bp, Mus musculus
aagaacccctgggagtctttccgaggcgcccctcaacccttgcttctcactccattcttactgcaacagagttttatactcaagggtattgacttcttccaacacctgacccaataggcccagtagtatgtctacctcaatattaatttctagttccttcccatcggtgtgcgtcttccccagttgagtccttaaacacacccacacccaaaaggtgggaacgtttagggtggcctttgactcttagttttaatttttgattgagtttgccacctaaacggtgtgctctcttcactttctatactgaatctggaactcacaacattcattgaaaaatgaggattttaagatagatttgtgtgcctgcgaggtttttgatggcagtttccctggtgaaaagactttaaaattggccctctctgtttcattatctgggggaaatgagggggtcatcgaattgatgaacgtgttttatataaggctctattgcaagtaacagggtcttacgtctctgagtgcagtgagataactccagtaatctgtacaactgtgccatgctgcctctaatccttacccactttttttccttcacatgctgatattgaggattcatgggtctgtatctgtttagtgctttgatattttggcaaaagatgtggggagaaaggtagactgaagttgatagaataccctctctgtacctctttcattttatccgtgtgtggagtggcatttgttcggtcccagagttaagtgatgtagagatgctgggaagagaatccagagaaaactccacttcaggggccaaggttgagacttttgacttttgtttacttgtttgggattaattcctgagataaatccattcatctaatgaaactagagatagcccctagcagaaattatggtcggacttttatattcccaagccaaatagtacttgggagacctgatagttctagtacctcagtgtatcaaaaataaagaatacacagtgtaagtttaacgaaagaatgaaaactaaggagtaaaatgatgtcattttcagccgctttagaagagtgtttctgcttgcttctcttgtttcttttcctttttttgatatgtatttttcttttaatttattttttgctggttttaatgtagctgccagagggtaaattcttaca

SEQ ID NO: 31832 - DNA, 1264 bp, Mus musculus
gtaaaagagcaagagaaaattaaatataaaactacaaacttaatgggttatctaatgatggggaaggtaggatattgccgacgatttgtatttgtataagcaatttgtataaaatcatactaggaagggaagggaattttttttcctaagacagggtttctctctgtagctctggcagtcctgaactggcctccagtctgcctgttgctctgagtgaaatcaactaggatctctctgctagacaccatgagagtgagacctaagcagggttcctccagtgcactgggcacagcgttctgttgatgcttaaccaaattctgagagatgtttttgctaatggccttagattctctacgcagccaagtatgacattgagttcctcatcctcctgtgcctaagtcatcaggtcagctggagattccctctcctctgcgttcagttaacatagaactttatctgtgaagtcaaatctcatcaagctcatgtgtatttcctttcccatccagataaaagtttacatcaactaatccagaaaaggaagaacaagcagaccgagatgtgtagctcagtgactggtaagctgtggttcttgacagatcgtcgcatcagggaagactacccacagaaagagatcttacgagcgttgaaggccaaatgttgtgaagaggaattggactttcgggctgtggtgatggatgagatggtgctgacggtcgagcaaggaaatctgggtaagactctacaactgaggaccagtcttaccataaggactgcctcacagagcagctctgttatagaagattagagctctcagagttctaatcgtatcatgtgtgaaagagctggagagctgagtgcaaggccagtctggtgtatagagtgattctaggacagcaaagactgcacggtgaaaagttatttaaatatacacaatttaaataacttaaggaatttctttttttcttcttcttttctaagcctcttaaggaatttcttaactaatgggaattagttaactaatttcttaactaatgtgattttttttatccctttagataatatctgcagcattaattaaaataacctatcagatgtggctcatgatcatctgcctcaggtggtacatacatttctaatgtctcacatgtgttcagaagataatggatatggtggttcatgccagtagaggcatggctggagatcatagccagacagctatgagagaaagaacttgtcgacacaaacaaaataaatatgaataaac

SEQ ID NO: 31833 - DNA, 1152 bp, Mus musculus
caagacattgttgtgggttatccaccagagaagactgctccagtggatttgggtttgagccaatagaaagatatgaatttaagccaatagaaagtctttactagccagctggcaaaaatactgggtgttcaggatctcagcgtagagccgagcctttctcaggttgaggttttaagcacaaaaccatgtcctgggttgacatacttcagttatcaaaaacagttagacggaagcacaattaccgaatccaaaaagcaaggttagtacactcagggactttcccagaactgtggactttgttctcattttggcatgtggcactgcctgtgtgttgagttttaaggcctgaatggcgcttccacaatagaattagttgtgctaaagtctggggcctgtcatgacatcacctggaatctaggagagaatggggagtttcagggacatttgaatagccagaaaaggagggtagggcaatctggctagaccggtagaatgtttgccagatcagacacgggatatcaattctaccagagaccgtagtcaaattcctgcccagtactctggatgtcaaagtagaaatatccaatgttgctctggtccaatgggagtcaccaggactcaagagaccagctgtgtggagtggtgtcagggactcaaagaagcctggccaaaggagtggaggagagaatactgtcacaagtaacatttctaatcatttttttctcctccccgaagcaacaaaaataacggtaaaatcaacggagcaaggacattgacgatgacaggtggttaaaagccacatcaaggagggcagatctttacagtctcatggtccagattctctgctcataaacaaagtactactgtgtgcttgaccatagaggaagtgctcaacactgctttaaatagagaagaaaatgaccaagaagtaaaggtttaggcaggtgtggtggtacgtgcttgcagttccagcaatgggacctagaggcaggagtaccaaggtcttgtttgggctttatggtgtgagttcagcctgggctacatgagaccctgtctcaaaaactaatttaaaaaaagagagagagaagaaaactcttgagcaatcactagtgtcccagtagttatgccccaccccttgcttaaaaatagggg

SEQ ID NO: 31834 - DNA, 1287 bp, Mus musculus
gagattctggtcaaagaggacagatactccagggtaactgtccagcccgagaacccctgtgaccggctgctccgctctctccatgcctcgctgctggtggtaaccctcaatcctaaacactgtcatccttcttccagaaaaaggagggcggccatctctgtccccaagggtttctgtaggaacttctgccaccgtcatcagctgttcatcaacttccaggacctgggttggcacaagtgggtcatcgcccctaaggggttcatggcaaattactgtcatggagagtgccccttctcaatgaccacgtatttaaatagttccaattatgctttcatgcaggctctgatgcatatggctgaccccaaggtccccaaggctgtctgtgtccccaccaagctctcgcccatctccatgctctatcaggatagtgataagaacgtcattctccgacattatgaagacatggtagtcgatgagtgtgggtgtgggtagtctcgggactaggctaggagtgtgcttagggtaaatcctttaataaaactaccaccccacctttggcttatgctctcttgaatcggacatgtctgtcatcatggttcatgagccccacaattacacacatttgtgtatgactatggaccccttggtgagcttacttaatttgtgctcattatgcatagtagctgggcttcttgttcttgtttgaaacaaggtcttattatacatctttgctggccttgaactcatggcaattctctttcctctacctcctgtgtgctgggattacagctgtgtgccaccaggaccaaaaaaaaaatttttttttttgaaacaggaaacatggtctctataccaggctgtcctataactatgtagaccaggctaacctcaaacgcacaagagatcaaactgcctctgcttcctgaatcctagaattaaaggcctgccctgtaccatattatatccaattgtatatcttaagattttaaaattattttgagaaaatataacatagaaaaatttacgtgagctttaaaaatgttcacttgtttgttttatgtgtgggtgcttgtgtaagtgcacggtgtacatgcaggaacccgtggcggccagaagagggagtcagatcccctgaagttacaggtgatcatgcgtctcctccatgtggatgctcaagtgggtcctgcacaagagcaggcagcgctcttactgctgagccagttcttttttctgtgtaatcctggcagtcctggaactcactccgtagaccaggctggcctcgaactc

SEQ ID NO: 31835 - DNA, 1240 bp, Mus musculus
tccaacattttatgtatctgtaatggtttgtatatgactggcccagggagtggcactatcaagaggtgtagccttgttggaataggtgtgtcacggtagggatgggcttaaatgccctcaacctagctgcatggaagtgagggtcctcatagcagccttcagataaagatgcagaactctcagctctgcctgccccacgcctgcctggatgctgtcatgtcttgatgatactggactgaatctctggacctgtaagccagccccaactaaatgttttttgtaagagttgccttggtcatggtgtctgctcacagcagtaaaaccctgacgaagatagtagccagcatgaccttgaacttgtgctgcttgtgcctccaaccccttaatgcttcagttacagcgctgtaccaccagccctccttaaatagcactgggatccaccctagggtttcatgcatgttagacagtttgccagtgacaactccggcatgcaagtgtattcattcaaaaagagaaggacagtacttccttttccgagtaaccgccaagatggccgaagtggagcagaagaagaagcggaccttctgcaagttcacctaccgtggcgtagacctcgaccaactgctcgacatgtcttatgagcagctgatgcagctgtacagcgcccgccagaggcggcgcctgaaccatggtcttcggaggaagcagcactcactgctcaagcgcttgagaaaggccaagaaggaggcgccacccatggagaagcccgaggtggtgaagacgcacctgagggacatgatcatcctgcccgagatggtgggtagcatggtgggcgtgtacaacggcaagaccttcaaccaggtggagctcaaaccagagatgatcggccactacctgggcgagttctctatcacctacaaacccgtgaagcacggccggccagcccgggatcggtgccacccactcctcccgattcatccccctcaagtagccgaggccagtaaagactggttttggtccctggggaaaaaaaaagagagaggagaaggacaaaaacagaaaagccaacacaggctggtgctcagactgacttccagcttagttttagcaagtcaagtgtggaaattattaaaatttgagaagcaaatcttccacaggacaattgaagtttttacgttagccaaagattttgtctttgtttgtttgtggtttgattttctgagacagggtttctctgtgt

SEQ ID NO: 31836 - DNA, 1368 bp, Mus musculus
tcagaatgtggatttgaaagcccagtgtagctcttcttcttcttcgggaaaacaccaaatggcggatgacgccggtgcagcgggagggcccggaggacccgggggcccaggattaggaggccgtggtggcttccgcggaggattcggcagcggtattaggggccgtggttgtggccaaggccgtggccgtggtcgaggccgcggggctcgtggaggtaaagctgaagacaaggagtggatccccgtcaccaagctgggccgcctggttaaggacatgaagatcaagtccttggaggagatctacctgttctccctgcccattaaggagtctgagatcattgatttcttcctgggtgcgtccctaaaggatgaggttctgaaaatcatgccagtgcagaagcagactcgggctggccagcagaccaggttcaaggctttcgtcgctattgaggactacaatggtcacgttggtcttggtgttaggtgctccaaggaggttgccactgccatccgaggagccatcatcttggccaagcttttcatcatccctgtgcggagaggctactgggggaacaagattggtaagccccacactgttccatgcaaggtgacaggccgctgtggctctgtgctggtgcgtctcatccctgcccccagaggcactggcattgtctctgctcctgtgcccaagaagctcctgatgatggccggtatagatgactgctacacttcagccagaggctgcactgccaccctgggcaactttgctaaggccacctttgatgccatctccaagacttacagctacctgacccccaacctctggaaagagactgtcttcaccaagactccttatcaggaattcacggatcatcttgtgaaaacccacaccagagtctctgttcagaggacccaggctccagctgtggctaccacataagggtttttatatgagaaaaataaaagaattaagtctgctgataaaaaaaaaaaaaaagaaagcccagtgtagtgtagttacacgtctctgcccgtaactctggcattgaggaggtagaggcaggaggatcacagaaatttcaaggcctgaatttaaaacatggggttaataggtcaccaccacctttaaaaagcaaaatcggtgtcttgggggatggagatgactaagcagatgaagcacttgctcttccagtgctgggtctgagttcaaatcctcagcacggagtcgggtgctggtggcacacacctttaatcccagcactcgggaggcagaggcaggtggatttctgagttcgaggccagcctggtctacagagtgagttccaggacaaccagggctacacagagaaaccctgtctcaaaaaacaa

SEQ ID NO: 31837 - DNA, 1174 bp, Mus musculus
atggaagaagaaatttatcgtatttcaaatttggttttggtcatttctttgagatagagtttcacgtacccgagactggcctcacagtctattgctctagctggtcccaaactcctgatcttcctatttccacatcccaagttcaaagtttgccgatcagtccttgtgctcacagataagtgagtgaaagcactctaacccagcttaagtcggcttctgtgtataagcagagagggaagggccgtcctctcgtaacatctcccatgtgaagactctaccacagtgagtattggtaggagtggttcttcctgggttttattctacaaaagactaagcttgaatggctctttttggtttggggttttttttggggggggcggggcggagcgcgggggttggtggtgtttgtttgagttttgttattattctaggcagggtttctctgtgtagccctggctgtcctgggacttgctctgtagaacaagctggcttccaactcacagagagccaactgcctctgcctcccatgtgctggcattaaaggcctgtatgtgccaccactgccgccatggccaccacagccaccatactactactgtctccactgccaccactgtctccactgctaccactgcaccacaccatcattgccaccactgtgccatgccaccaatgccaccactgtgccacagcaccactgccaccatcgtcaccactgtctgcctctgctgccacccctgccaccattaccaccacttcccttcttccactgccaccaatgctaccaatactaccactgtcagcactgccaccaagccaccattgttaccactgcctctgcggccaccacggctgccactaccaccgttgctaccactgtgccaccatggctaccactgctgccccactaccattgccactaaagcctgcaatgcctccactgccaccactgccacctctgagccacaccaaccctgccaccaatgccatcactgccactacgaccaccactgcctcaactgctgccacactatcactgtctgtcaccactgccaccaaggcctccactgctgccaagaccaccacggccactactgcctccattgcccagcctgactgaacctctttttttttttttttttttttgagatttttctctttattctgatgaaca

SEQ ID NO: 31838 - DNA, 1619 bp, Mus musculus
aagcaagaaacgctgagtgctgaaaggaaagccgtgtataaacagagactttggcagcaaggtctgactctttcatgtctgtagaaagaatggaagaggaaactcagatcccccacttgacctgaaacttcccactagagatcgccagggtctggaggtgcagccgtggttaaaagatgaataaagtgaaatgaggtaaagcctctttttgggggggggggatgtctttagatcagaggatgccccctaagctttccctccctcccagtctgggtcaccttacagcttcttttgcattacaatgtccatggtggaccctgcaggtgggattaactgtgaattcacagggctggtggggcgtgggtgccgcctgggtgcctgggagaatagggggtgggtagggtaggaggcttgaggggggaggagcaggacctaccctttaaatctatcgccttgagccgttggccttcagataggctgatttggttggtgtcttgctctttctgtgggaaggctgcggctcacttccttctgacttcttgataattttgcattagacatttaactcttctttctatgatctttccttctagacactgagttttttggttgttgcctaaaaccttttcagaaatcccttccctcgccatcacactgacatgagtgtgggtcttcctggtccccacagtttgcctagttctgaggaagcatcgaattctgggaacgcctcatcaatgcctgcagtttttcatcccgagaactattcttgcttacaagggtctgctactgagatgctctgcacagaggctggtaaggaattcagtccccgaagaacccagtaaattagggtaagagtagaaaaaacgggctgaagggttattgcttctttatgaaccgtagtagtcattaacataagcgggtgtccttatcactcttctggaaacccctctgagtttgaccggtgatacgttggccttctagtctgaaatagagatccgggacacaggacggagcaatataaggctcttgtgtgtatttgagaacctaaatatttgggctctttggaatatgttcgggggcagtgagtggtgtcttcagtagcagggagacctaacatcctagcttggaatgagcaccccatttttttggtgaggttatacagttagtttgcaatttgcccaaatggccgttttctccagcagaagcagttagcatttctctcaacctttgggaatatggatgtcacttagcagttctgggtttgtgagctcagtgctccttccaaaccccaaacaagtgtacacagtttaagtcattcattcttatagctagcatctggagccaaggtctgaagctcattgtctgtacagagtcagcccagtactcaggcttgtaaatggtagaaccaagaggctgctaggctgtgtgtgccacggtgctcaggtgcgtgttgtgatgctcgggtgtgtgcagcgatgctcgggtgtgtgcagtgatgctcgggtgtgtgcagcggtgcttgggtgtgtggagcgctaggaagtgtgtgtccccttttttctgagcttttaagttaatgtctgtcatcttgatttttctgatttatgggttcaattttt

SEQ ID NO: 31839 - DNA, 1969 bp, Mus musculus
tggaagcctttccatgtggggcagccagacttggaccaacccaacttggagcagccagacctggaccaacccaacttggaacaaccagacctggaccaacccaacttggagcagccaggcctggaccgctcagtcctggaacggccagccttggaatgctgctccgctccataacttcggggaggactttctgcagccttacgtacagttgcagcaaaacttctctgccagtgatttggaggtgaatttggaagccactagggaaagccatgcgcattttagcaccccacaagccttggaattattcctgaactactctgtgactccaccaggtgaaatatgagacttacgcaacatctgggcttaaagtcagggcaaagccaggttccttccttcttccaaatattttcatattttttttaaagatttatttattcattatatgtaagtacactgtagctgtcttcagacactccagaagagggcgtcagatcttgttacgtatggttgtgagccaccatgtggttgctgggatttgaactcctgaccttcggaagagcagtcgggtgctcttatccactgagccatctcaccagcccctggtttatttttttaattattatttgctttttgtttatcaagacagggtttctctgcatagctctaattgtctttgaactagctctgcagaccagcctggccttgaactcagagatctgcccacttatctttgcctcctgaatgctgggaccaaaggtggcataccaccacacctggcatatatattgtttatttctatttctatttttattggtgccagagcaaacctaggacttagaacatgctgggcaccaactcaacttctgagctctatttacaacttggtgtgttagtgtatttgtcttagttctgaatttgtcctttttttagtgttaactctaggctttggagacagtgaggtgcatatactctctccttcccaagaataagtgcttgaacacccttacccacgcccacccacccatgctagtcttttttcttagaagcgtgggtcttggtatacactgtgtcattttgaggggtgaggtttaaaagtatatacaaagtataacgatatggtggctactctcgaggatgagacagaaggaccaggagtttgagggtagctcagatatgcaataagttcaaggccaacctgtactatgtttaaatagtaagacagcatctcgataaaataataaaactaaagtctcaacaaaataaaagctttcacctattaaggtgcttgcttgtccttggagtcccccaagagtaactgctatgttaatatctgtagaaagatgtttatatttgactgtaccatgatgaaccgatgccagctggactagtttaaacaaaataaaacactaattttacctttagtggtcttatcttttgtccagtggggtcaatatactttttattttggtatgtgaaggggagggtcttaaccgagggtccaggaaaatgggtttcttttggcttaaccggttgggagggttataccacaacagttggaatggcctggtaaccagagcaggaggccagccactcacaatgcatccagtcaagaactggagagcaatgaataagaaatgaatgttttagtgtgggtatgggccctgaggaggccagaagcattcgatgatcccctggagatgaagttacgtgaagccacctgatcacctgatgtggcaggctgcagggaaataagctctagttctctggaagaacaaatatttaactgggagagtggtttttattcctgtgaaataatagaacttgtggagagagcccctgaggtcacacacctagtgcttctgggaaagaggagggaccacagtctcttgtttttgtgtcacactggagattaatctgggacttcctggctccagatggaggctatcttccctgagcataaccccctaac

SEQ ID NO: 31840 - DNA, 2480 bp, Mus musculus
gactgcttctgagtgctgctattctcaccccacacactccatgaaaactcagctgcacccaatgctggggttgaccagatcgccaatggcttttaagtgtttgatttgggggatacttcccttgtaatcaggaaagaccaaggaagcctacctttatattgggagggaaggggccgcagctccccttaggttctaaaacccgctaactaggacaactagggagtaggagtagggtgcagcaccgcccccaccaccaccttagtttgccaggaaacagatcttcatacccagtgtggagggccctgggggattgaacaaaagaccccctcctcacttgatacagctctgcacagcaaagtaacttgagttttatttattttatcttcaggttgaattgcataaatatttatttttttaattgtaattttaccaaataatgagacagtaacgaaattgaggttggagggaggtgtttaaagagaggttcaggaggaaagaaagtttggtgctggagagaggttacaacagggaggatggatgttactggtggcctgtgagtcacttcctttgtagatgaagggacactatcccttgttatttctcagaagagcgagtgcctgtactaaaaggctcatggctttctgtgggccttttcttttaagattatagtttttatgtagtgttactaaaatctaggcttgttactaaagtggtctttgtagttagtgatattgatggatttttatgttgcatggagtccagacaagggaggggtcaccgcaagcctctcctttccctggaccaacaccctctctgtcctgtgagctcgctttttcttttctgatggtcaagcccattaccaaacgggcgggcgagcgagcgagccgtgtggatgagacacaaagacagtagttgttgagaggcattagtttcttcaacttagtttttttttaagagattttaggtgttggtttgtttcattttggtttaaagggattcatagctaacttggattttgttacctcagctctgggagaggattttcgctggatgactattaatgacttgttttgagggagtacatttgttgctctagagttgtggcatgctagcctatgtctgttacagtctcaggctgcccttgtttccaggttcctgtgctattgtgctacatgcccaaggggccttggctctgctacacacattagagacagtgactgaatgtgcagtgtggtccacgcatgagggcacaaatgtctgtgcattgtcactttgctctgggcatgaagtccctggtcccttggctcctgtagctttttattgatcgactattagaactcaaccctgtgtacagaagcagcactgcctctgctaggtggagcttgcacccaggattagatgccacccattgggttccctgtccctgttggagagaggtgcttccttgaggtctgaggttggaaggctctacctcactacagctaggaggcgcaatggaaaggtgtgaggtcagggctgtggctcctgaagacccagttgtgggccaagggtggctttatttaaagggagttaagaaacatggcatattggtatgttgatatcaccaagattcccttctgccataggtcacagacaccttcccaactgtcccctcctccacttccataaatggagacaaccctgatggacctcaccccttttccacaggtcactggatcccactgtcaccctcggtgcttacacatttcagaccctttaggcaaacccttgcatagagtggtagagccatatctcagtgctcggtttcagtattcaactctccactccctgtggccagttgggatttaaaaactcagattgctatggaaaggggctttgctgggaaaggcgactcctctaacttcacctcttcagttcctccagtggagtttttacatttgccaatggccatcttgtgaatatcttcatacatactttctattaatgttactgtagtttctgttttgaaataaaacttctgaatgtatgtgtcatgtcacaagcttatttttccccctcttgttctttctcattgggctttaaaaaacaaacaaacaaacaaacctttaaatcctggctgtggatctgggaacatagctcagttggtagagcatcctttgggctcagagtcatgggttcaatccccaaacctccagcactgcacaaaccaggttgtagagcatacatgtaacccaaagcactcctggggcagagacaggctctgttaaacagcacatttgagaccaactacaacctgcacgagaaggcttttttccatgttgctcttgtatctttcccaggcttttacacagatccgtgtgaccaccactctcctagagatgcacaggctgctctactcctagtgcagtgcgatcccttccagcgcacttgctgcctttgggttggtttgccttttgtttccagcccttgttcctataaaa

SEQ ID NO: 31841 - DNA, 1184 bp, Mus musculus
agtgtcctcaggcttggtgacaatcacctttatcggctgagccatcttgcaagccatatctaatttaattcctagcagtcatctaggaaattaaggccagacattggctgtgacagaaatcactctgccagccgggcgtggtggcgcacgcctttaatcccagcactcgggaggcagaggcaggtggatttctgagttcgaggccagcctggtctacaaagtaagctccaggacagccaggactatacagagaaaccctgtctcgaaaaaccaaaaaaaaaaaaaaaagaaatcactctgcggtagttccactttacagatgttgccatggtcttggtacagagtgagaagggtgaggcctgtagcttggattcagaaacgctaggctttttactcacaagcggagtgactgcagctttagacagcagctctgaaaatggatcctatgtcataccatgcatttaaacggactttgcttgcttgctttctcttgcaggatgactatgaagccatgagctttgtctgtattgtggctatcttgatctacgtagccttctttgagattggacctggccccattccctggtttattgtggctgagctcttcagccagggcccccgcccagctgccattgcggtggctggctgttgtaactggacctccaactttctggtcggaatgctcttcccctcagctgcagtaagtaaattcaaaattaaacatggcctctcacaaaccagccgactgactccaacacattattaagattcaccttaggggaaatgattgtgctaagcgcttaaatcacacttactgcttccttgtcaagaaaacaggatgggccagcatggggctcacggctgcaatcctagcacttgggaagctgtggaaagagggttggccagcctgggctacaattgagaccctgtatcaaaacaaaacattaagagggaaaactggacatttttgaggacctgagatggggtaggaacagaaggacagtaccaagcacccaaacttatccgaccaatattgaaatcatcatttcagtcagtactgagagccgagtgctcctaaagggtaggtggtcttcaggatttcctgttagaaaaagacgtggagctgatttgttatataaaccattccctattcccatgagtctttctacacatctgtatttgaa

SEQ ID NO: 31842 - DNA, 1038 bp, Mus musculus
gttcaatgcccagcaaccacatggtggctcacaaccatctgtaatggaatctgatgccctcttctgctgtgtctgaagacagctacagtgtactcatatacatgaaatgaatagaaaaaaaaatttttttaaagaaagtgatggagctgggtacccttggtgacagataccttcttataatccttgcactggagaggcagagactacaaagtaacacttgttatacccctactcccaccaacctcaccccaccaccaaaagaagaaagttaactaaatagtggggctgagccttagaaggaaacaggggaaccatgggaggtagagggtgcagaggccgagtgctggccaaggatgccagggctcattcctgggagcaaccagtgatgctcttctgtccctttccaggtgttctattactcaacaggaatcttcaaggacgcgggtgtccaggaaccgatctatgccacgattggagcaggcgtggtcaatactatcttcactgtagtttctgtaagttgagtagttcggattgaggcatggggatgagagaaacaagaattctttcttgaagtgttcaaacataacctgtctttcaacttctcacatctagttaaaaccattttattgctttcccctgggagaaataatagtggatgatgagcatactaagccatcttcagtcactcagaagctgtggaacgggtgggaaaggggcagtgtggacagactaggtgtgcctggagacaagacagggtaaggcagcagcgccctgtacacagaatcagcagtgtcttccttgccttccagctgttcctggtggagagggcagggaggagaaccctgcatatgataggcctgggaggcatggctgtttgctccgttttcatgacgatttcgctgttactaaaggtgagcactctttgagtggaggaatgtactgggtgggtgaggctgtagtttactctctgctgtgggggctggggtattgaccttcaaggtcatcaataaagtcaaatttgagatttccaaaagtaca

SEQ ID NO: 31843 - DNA, 1102 bp, Mus musculus
aagagttttaaatttttttcccctcttaatggtatttgtgcatcttggctgcacactcaggagtcccagggatacctcgtactctgagacaattaagtgggtccctagggcatgggaactatgtgtcgacattttcccagctccctttatagtttattagtctatttgagcaaagaatctcacaggtccgctgggcatggtggtgctcaggaggccaagcaggtttggggctaacctgggctgcacagcgggaccttttaccgccagaatcccaaggcccctcagccactgaaggttctcagggctagtctcttctgtctcagctgtgtcagtggctctgctgccagcttagcttataaagcattagtcacaccagtttcagtactgattagtactaactagcccttaactacttgacacagaccttttgaggattcaggaaaggattaaaaaaaattgtcctaaatatccgaccgtctttgcagtatgagttctgtaatgaaatgtgataaaatggggctggcacggtagctcagtacggagaagcctgtgtcatgaagccgatgacctgaggtgtgtaagtcctcgggatccacataaaagtggaaagagaaccaactccagccagccacaaaggttgtcctctgaactccacatgtgccctgtggcacactggcacctggacactcaaacacaaacacagtacagaataaaaagaaaccctaaggtatagcgaagtggtgaggagggtccctcaagtccacaagcccacagcagcaaaaaggaaagagattgacatctacggaggcttcagaagagcaaaaggatgaggagagacagacaggggatctctctcgcgcgcgcgttactaaccactttgtctttaaccttgcagacgcaactctatgcttctagtcaacttgctggccatcattgcgggctgccttatgggattcgccaagatagcggagtctgttgaaatgctgatcctgggccgcttactcattggcattttctgtggcctgtgcacgggctttgtgcctatgtacattggagaggtgtctcccactgcccttcggggtgcatttggcacactaaacca

SEQ ID NO: 31844 - DNA, 1659 bp, Mus musculus
atggagtctggttctgccctctatgctttgaggggtttgggtctgttatgttttatgttttgagacaagatctcactgtaagcctggactagccatgaactcaccgatagtattccacaaccctgcattcaccgttccctagggcagtcagatacctgtgtctatctggtgacgtttttggttgccttttctttttgagaaatttagttcaggcggactttgaactcaggatcctagggttctaggattacagttgttcaccaccctagtccggctggtgaaatggtcttgtttttgcttttcggtttttttttttttttgtttttgttttttgagacagggtctcactgtgtagcctggctggcctggtactagctatgtagatgaggccaagagaattgacttaaattcctttttaggtctttctctccaaatgcgcctgaaatcctggcattctaagcaaaggcaggagaaatgccttaagatggactccaagcaggcatccttgggaagggaaagaatgtcactggtcaaagtgtgtaagcatttccccttgtctgcttgctctccaggtgaccccatctctggtgttcgccgtgactgttgccacgatcggctctttccagtttggctacaacactggagtcatcaatgcacctgagacagtgagtgtgccgaaatgaaaagggattgcaaactgagttttaagtaggactgggactttaagatgcctggctaaggtgggggagggctagcacactgtggaagaagctaaggcaagctctttgctcctcaggctctgccccctcaccgagttgtgatccttttcctatattattctttagggattcctaagaacgtgggaagtcgtgactgggtggggtgcccctttgaacatctgtgctgccacctactggacgtttagggtgatgcccttttcaaagcacgtgcctttcctccctcctgatcctggcctctaaggaagccaccctaggatttgcctactactctcatcgagatttaatggtctgtcctcacactgtgcattttttcgtgcagatcctaaaggactttcttaactacactttggaagagcggttagaagacctaccaagtgagggactgctgactgccctctggtccttatgtgtggccatcttctctgttggtggcatgattggctctttttctgttggactctttgtcaaccgctttggcaggtactgagcagacactgggccaggagtctgcctgcactggttacccgaaagacagcagagcacatcgggtcagggggataatgctgtgtgggaacgtgttgggttatccttggggaaagctagtccacctgcctagagagctgcgatgtgagaccttgctctcggaagttcccattttagctcccaggctggtttaattttgctagagtgaggtcagcaacggagttccttaaacttcttttaaggacaaaggttgcttctccctcccaccccacccccaaggcagtcactggctaactgtgtagaccaggctggcctctatcaaactcggaggtccagccgcctgcctctgcttcctgggtgccatgacatccagccagaagttatttttgtttctgaaatttttggagacttcttggaagtcttttcattattttat

SEQ ID NO: 31845 - DNA, 1185 bp, Mus musculus
gtgtacttcacttgatccttcttggagcctcaagtcaagaaggctgccttcacacctggatgcgttttcttggactgcctcgcctttccctccttcaaggcgagtacacccagcctataatgaaaacgcattatcaattctctgcttcctgctccttggatgactttcaactaaaagcagcactgactctactctgcgtttagactgattccatcccgactgccttcaaatttgcccgccctccaaactttgttttagtatttttttctgtgaaacaaaaaggctgtcggctcttgaaaaggggaaggaatttggaagcgctttgaggggaaaaaaaaaagaaccacgaggaggatgtggtaaaaagcaggagggggtgggtgatggtggttgattgcaaaggacaggggctgggggtggagcggtgaagatcagataagaggtcactgaattcctggggtcacaggttaaggattggggggtgggaggttgaaggctccaccccttgcagagattataaataggtaggctgggcttcgggctgtgatgctttcggtgatagtccttaagccttctgagagcggcttctgtaggacccgaggaacacttgctgccgagaacattggctggatacctctagatctaccttaagacttgagaactaggttgggaccatggggacaacgaaggtaagagctggttgtttttatttgcttgtttggggtcctcacggaggtaggtcgtggtgcggatcgccgtgctccggtttctcctaagtcaccgagccatccggacggaggccttttcttatcagctccagcaagcaattcgatactagtgttagcgttctaggcatctcctacctgacgaggatcctctcggacaccttcttagcacgtgaaagtcacctcagaagctgtttgcctctcgggtgtgtttgaggtagctgtgatgagagcgaagagggtaggacttggccgcgggggtctcggagccagctggaaggcttgggaaaggcttagaccttgagaggacgtggggttggcttgggtttgctgttcagcatcccgctatcggtccttgggttcccggtactgtggggagggaagtccagttgtccttactatggttgtgagtgcaggatgtatcggagttagtgtgggcggagggaggaaggcagtattt

SEQ ID NO: 31846 - DNA, 1145 bp, Mus musculus
gccagcagtttatgagtgtttggtgtgtgtgtgtgtgtgtgtgtgtgtgtgtgtgtgtgtgtgtgtgtgtgctcggtgtgcaagcctggtgcttctggaagccagaagaaagtgtcagatcctctggaactacagttacagactgttgtgagctgtcaaagttctgtaagagcttaagtgcctcagcgtgctccagcaccatcccccaacttcctggttttgttttggttttttttttggggggttttttttttggggttttttttttttttttttttgacagtcaaactggccttgaacttggaatgtctctcaggctgtctttgaactcctgcttccatctcccaagggattctagttttggctaacatgtctaacttgatcacacttttgtgtgtgtgtgtgtgtgtgtgtgtgtgtgtgtgtgtgtgtgaatggaaaacatttaaagttaccagggttcttttcctttttctttctttttttttgggggggggggtgagggtaggatgagcctcccttggaaatcaggctattggatttttagttttttggcttttgaggtagggtttctctgggtagcccttgctgtcctggaacttgttctgtagatcaggctggccttgaactcacagagagcattcaccacaactttgcagcttctattctggatttttaaccatttattagatatatgacttacaactattttcttccattttgaaaactctggtttatgctgctgattttgcctgttgatacggaagtgttgctgaggttgatggcgtttcattgtttatatattttattcagttgcctgtgcttttgatgatagaggcaaaaaagtaatgtactgttagacttaagggtcagatgacctctgaggctgggatgtagcttggtggtagatgatttgacgtatggatgagtcctgggctcaatcccaggcactttcaaacaacaacgacaaacaaaacagaagaagaactctcggctctctgtgatggccgcatccctgctgttgtcctggacagcagctggcccactgcacgtgaggagacagcattgccccgtggacctgcgtgcccagctgggcctgtggtgggcatgctaagactggtcgtacatcactttggcgatcatct

SEQ ID NO: 31847 - DNA, 1242 bp, Mus musculus
gtcccttaaccctcctcaccaggggatctgcaccccacctccaccctcaaacgcttgggagtcctggggaaattttaattctttggtccattgtttgaataggttgatagctaaggggaggagctggtgtctctcccagattatctcctcctgctgggtccgttacaaaagcctacagtcgctcgaatgccaccgaacaatgaccgggtaacctcagtgagagcatgctgcaggagaatgttctaagagtaaatttgcactctgatgattgcagtggggtggcacggagacaggagactgcaggcatcaaaaattagtcatctacccgaacagctggaatgggtgaacgcttttgcacgcgtagtatatgtaaagctgactgaaataaaaagaagcaggcagcgtgggaaacgtgagcgacctggtgtgctgcacgacgaagccgaatggcctgcggcaaaatagatggacaggtggggagactgccgggcgcaggtggggcattcgccctcgccctcgaggcagactctggcgtaacctgctgctccacagagatgcctcggattcctgacaactgcactttctcagccccatccggtgggcgctggccgaccccgcccggcagaagggacgtgcgtattggcacggcgcccggcagcccccgcggtccctgagtcgcttggatctgcctccccagctcgctgactcattcgcgcatcctgcagtgttccgctccttcccttggtcctcacgttcccttgacgtttttggttgacttgtcgggaggaggcgggggtgggggtattaaaaagaaagaaacggactgggaaaggcggagggtgaatttagaagtaaaaggtagggtgggctgcagaccaccaggaagaaggaaagggtgggcctgggaaggatcagatgtgtgtgagcatgcgcagagcgttgggtcaccctgcaccatccgcagcgaactgcgccactgtggcacgatcgacgaccgacggaaaagaacagccctgcacattagggctatacattttgtgctacttgctatttaggcgtgcgtcggggtcgaaataagcagaagaaagtagaaataagggctttctggtgcctgcctcgccgtcctaacatccgccgtactctacctttctctgtgccccaaaccaaggaagcacgtgaacgctgcttgcatgcatttaacccttaatgacattttaggactttggatagacatgttcttca

SEQ ID NO: 31848 - DNA, 1246 bp, Mus musculus
ttctcccattttctgggaatctcaaaagacaaaaggaagccattctcactcctagtttcttcatgtcatagacatgctgtggaaacctctttccctcctgtcacagcagactcatacctgtgatactgctgacgggaggttggggagaagagagggaactggcggagatgtgggtgggaacctgtcatttgtttaactgcacagggagacgcttctcttgaagtccctgtcggtggggtggaagcttttgattttgacaggcaatgaataattacattcccctgtaagagggagatgaattatacagagacagggcgcagcaagggcaaggcgcactcctaggcacagagtggggagtctccattatcaatgaacggccatgatttattgctgcagaggtcttagtgagggtgtggttgaattcgattcgagagagggaaatctcacttccaccttattttcactaaattttctgaaacagacaaaatgtgtagtgttgacagggccaatctccgtgacttttgttcatatgcttttatttatccatgatttccaagacactgggcttcccattctcacttcccctcatcaatccctttcctttctttagaagggggcttatgtatgagactggtgaagtccagtgaagctaagtaaaggggcaagatggggcagttcactaaagagcactttatttctttgtaaggaaaaaaaaagggagtataagaaaaagtttcctccagcagtgtgcgatgtactggagagcatctggtgggccagtgtatgaagcagtagttcccgctagggaacggggtgtttccctagaggaggcacacacctttgccaggtgccctactagacatctcttgctatgcctcccatccaggtgtagtctccacagcttccctttggtttcctcgaggtctctcccttgcagattaccacctcttcttctaagcacctttcctggtcagatctgtccgcggttggggagctaggctgagtcatactcccaggtgccccggcttctccatgtcttgagaaccagtctccctggtgggcagccagagcagctacagtgggctggagactggagggtggctttaggccccctgaggttctagctctccagggtcaggcttgcagaacggggcagtttaaacctgatcccctctgggcctccgattcccatgccctccatgacgtggaaagggaactacttttattttgttggtccggtattgct

SEQ ID NO: 31849 - DNA, 1585 bp, Mus musculus
cccagaacccaaatcagtggtcagtctttcccgtagcttctctgtgcattcaggctggattcttttttgttacctctgtgtacttgctgtatagccaggggacaatctgctgtttcctgctcataaccaagcaggggagtagtgggaattatcacactgaccaactttgcagagttcagaaggccaactttatgagtgggagtgacctctaacatacgtaagttcttgaacttatttcagaatcatctcatgattccctagttagcaatttcaggagagacaaatgccttgaaactgtcttataagactaaaaatgggcaggctggccccaggactcacaaagtttgggttttcatagggttagatttggagaaagctgtgtcccagttcttttctgtaaggcctccttcaggcttatcccattcagtgagcatcccgtgctgggtggagccccatcaccttcttgtgtgtttacatatttttttcctttgacaagagggttgtgttggtggtaccttactgttttcttgttcaatagtgcagcatctttgaccagtgaatatttctgagatgaagggagtcaaggggctgtgctttccacattgtactccacagaagtgtttaatttcttgcagctccatgtaattgctgcatttgaagcatagcattaatttatactcaccctgtgtttgacctgaagagttttaacttgatgtgtagagcagaaagctggaagcacttagctcccattcagtacccacaatgccttgctgcctggctttgactccttttcataaacatttcatttcagtccatttagcgattcaatggaaagctgctgttaattatgtcagtgtgaaggaggttaagccacagctttctttacctgtgacaggtaggctttgcgctaggctttgatacccagctaggatatcttaaagcaagttcccacccatcactctccagtgtctgtccaccattccttttacagtgctgtgaagagctcccgttgaggttggtgggtactgtcctttgtttgttgggcagtttgagggcagaatgggaggactctcactcctgcaagcacctgcttggatagcacactctggctgaagagggtcctttcaaatatatagttctactcaatgctctccttagctttttctaacttcgggtccattctttcccattgcctcctccccttcccaggcagctctcttcttgcagagccatggcaggacatttaagttccgatacaaacactaagaagaaagtataagatcactagtgactgttgggaaacctattttctcaatcttcctccattttgtgttctttgtattcttaagatgataatatattatgtatttgaattgctgaaaattgaaaatgaagttgaagatatatgtatataagcgtatgctgtattggtgcaataatggtaattaaagatatttaaaaaggtattggtttttcatcttttagtttatgtcctatcccccctcccagggctttgtgcacgttgagggcgggggtaggggtgcgggtgggggaaaaatctttattgctagatatattcctagct

SEQ ID NO: 31850 - DNA, 1151 bp, Mus musculus
ttaaatttaaattataaggttagatgtcattgtttttatatccatcgaatatggtctattacaaaaatttatttgacaactacattcaagcatacaaatacacaatacattctgttcacacatattttcctccctccctcatctctgtccatcctcatagactctccagtctcccaccatgtccctatcatacatttgtctttcacttggctttttctttcatggacttataacccaccatgccttccacgtgggcataagtatgcagctatccaatggggtagcaagaacgcaaaagtgcttcttttgtttttattattacatattttcttcaattacatttccaatgctatcacaagtccccacaccctccccccctcctcactcccctacccacccattcccatttttttggccctggcgttcccctgtactggggcatataaagtttgcgtgtccaatgggcctctctttccagtgatggccgactaggtcatcttttgatacatatgcagctagagtcaagagcttatatggaaccaagggcaatgatcatagtctttgggttttgggggggcttcctaactgccacagtaatttttatatataataatctgtaatacctttgtttaagttctttttaaattgtgttttctctctcactagttcaaacttgtgctttatgtgtgaccccttcatatatcttcaagtttggataacttaccccactatattctctctgatcccatccttttttcatctctctattatgtgattctctacaattctataccacatgtggtctgctattctttccttcattagttacaactttcatattttaaaatctgaattttttatttgaattttctcaagtaattaatagttgtgaaaaattgtgtttattctgaaaaactattttttgcaaaaatttaaaaacacctcattttaatttttcctacttttcaccaaaatcagaatctggtgtccagaatcctccttacatcactgagtgattgagaaaagttcagttttcaaatttgaatagtgttgatagtgttggtaaataccacatgactatgctaacctctacatattgacctactgctagcatgtattagccttatgataaataaatggaacaataatga

SEQ ID NO: 31851 - DNA, 1774 bp, Mus musculus
ctgtgcccttctgcccttctgcccttcctagtgttgctctgctcaccggctctcattcctcttccctacagtgaggctgtggagcactttctggaggctctgaacatgcagaggaagagccggggccctcggggtgaggggggcgccatgtctgagaacatctggagtaccctgcgcttggcgttatccatgttaggccagagcgatgcctatggggcagccgatgctcgggatctgtctgccctcctagctatgtttggcctgccccagtgacagtgggatgggctgccctgtgagtgtctgcttggaggggtccgcgctctgggtgtgactccctctcctcaaacgggcctaccaagggggtgggctgatgaccacaagcggtacgacctctcaggagctgcctcagagtaggggtgcatagctgtgtcttaggtcctacttaattgtagggatgagctgtctctgtcccttggtaattcaagggctgtctacccagctacagatctctttctgttcatcaggccctttcttggtgctgcttcttgggtcggacccaatgacataggggagttgtcatctgccgtttctgatagggtctgccacatttgtaagtctctccttgccccatcttcctgggaattggtaacagtccagcttccttgggcagttgtgtgtaagaggctcccctgagcatctgtgcgacgccagctgggatggatgttaggagctgccctgctcgctgaaatggtgatgcggctccctagagccgaacttggaacaagtgctcgcagctcggtcactccgggagcgagcatggatcttctgtgggtggacactgaagcagcagatgctcatgtggttactgtactgtcctcagggccagggcttgtcactgcaggtggcctggcctatgggggagggaggttcatttgtggaatgagcccagagatgcgacagtagtgatacggtcagcactgcagtcctctcttcttgggagacttggaagtaggaactaaacaaactcttgtagcaacctggttcagaagttgcattcttgccaaattcccaaccaagggagggttcagtgttaccataagccttcttgaaacctttataggggatatcattgaaaacccccttcccctcgattacctccacaaggtgaagatgaagggattctgagggagcagctggagacgtctccactgtttctgtgtggggagatgcacagacccccataaatgactgctaagcctcttaccttgtcttcagtagctaatgatcagattttttttttttttaaactgccatggtcccaaaatcccatcctgaaatttatttttctttgtatgcatatgtgtaaatgatttaaaaataaaactgtaaaatatttgtatgaagaataaactggactgacgtgggtaggttccgctgctgacgttggggtggagggaggcagactgatgttcagatttccccttctctgtcttctagtttctcactggcgtacggttacttagccctctctccaggatgactgggtgccagcgacctgctgcagttatgtactgacactcacttttttctccctcctccctctctccctttctcttcttaaatcattcctgttactgttacaaagggaattgtgtgtgctgtataatcttgactcttttcttctgtgccatggatttacttctgctcttgacctaggctgtaccttgcctggttgtacaggtccacatggttctggagaaggggtgtggggggt

SEQ ID NO: 31852 - DNA, 1203 bp, Mus musculus
aggatgagactggggagggactctgcaatggcgcatgcttgtgtgtgtcctcaaggagaggttctgcctgtggctaggctgttgagctctcgctctctgcttttgtcttctccagtcctaccagaaccagcagacctgtgtggcaggggtggctggtggccagcaagaggaagaggacagcagtgactcggaagcagccgactcccccagcagtgatgagagacgcatcattgagagccccccacaccgctattgaggcgccaaccctgccaagagagagaggcctgccctggggagacaggcactcaggaaaaaaaagggagaacggcattttgagagaagagagaccgaggggggagaaagagctcttcatttggagcagtccttcaatctcagaaccccaggaggccccacaggagttgccctcctccttcagcctgcccctgccttgggctgcccttcccctggtgtactcctgaggtgtctgccccagctggctgccctgggagagtggctggatggctttggctgccctgtagcctacctgtggcagcatactgtgccagccatgcactgtattagggagggggatgtcaacagccttggttgaggtgggaatgcaattgatgggagcctgctgctgtgtccttctctactctgttctgtccgtgagggctttccttctgttgcccctccccctcccgcttcccctaggatcccctcgcctctatttccatttcactctggggatccctgctcctccctcttctcagcctcctccctcttttgtcctcttttcctctcctgcctgagcagtaccaaggtcttactgtctctattcctttctccatggcctgctttgcctgggttgtggggaaggaggaggagggggaccctgggggtgtattatatatagtgtatattttttcaatgttgtcgtgagcgcagctcctgtgtttctgtgtgcagctcacagccttgtatgtgtgcgtgtgcgtggcattgtcatgtcctgggatgagggtagggggtgggtgtggtaaaggagggccgcaccctagggttttcaaataaaacaactagaaaaaagttcttgcttgctgtttacctggctgattctgtgtgactgtgggctttctgatcttaggggccatttaggcctctgagcaggttgaggtgacagggtagggttggctctggctg

SEQ ID NO: 31853 - DNA, 1180 bp, Mus musculus
ctgtatcctagactggcatgttcctcagcatatacgtgctgcttttgagactagtcttgttcatgaactcttgtctgattctagaacttaggtgaccttgagtgatagccataggccttaaaagcttaatgtggcatgacttgtctcctttattgtgtgagatagttatcctgtgtgtgaatgtggacatatggcaatcctctgaaaagctttctagccctacttagtctttctggcttaggtctagagtgggctaggtgataggattcccattgctctcatcatgttctgttctgcaggtagggaaaacttacgagctactcaactgtgacaggcacaagtccatgttgttgaagaatggacgggacccaggggaagtcagaccagacatcacccaccaggtatctgtgtgggcagagctaatgaccctctgagcgaatgctgtttctcaggcttcaccacgcctttccctcttcctttctcagagcctgctgatgcttatggacagccccctgaaccgagctggcttgctacaggtttacatccacacacagaagaacgtgctgattgaagtgaacccccagactcgaattcctagaacctttgaccgattttgtggcctcatgggtgagaagccttaggactaaagttctgactgaactggcaaagtaaagagaggagacaggagaatcacacacccattccttcagtggggagtgactggcaggacggagtccagggaagttcagccccctgctctctgaagtctctctgagggtaaagctgtctgagcttgtcatcggtattagtgaaatccataactgttgtgtgacgtaaaggacacatagcccagtttccccaggctgtgtagcttaggcggaagagtgtcggctcttcccacgtctgaactctctttcccccccagttcagcttttacacaaactgagcgtccgagcagccgacggccctcagaagctattgaaggtaagccggagaaaccttttggtaaggttctgggccagttctggcgctgactcttctttttgtctttaggtaattaagaatccagtgtccgaccacttcccagttggctgtatgaaaattggcacttccttttctgttgaagacatcagtgacattcgagagttggtgcccagtagtgacccagttgtgtttgtgg

SEQ ID NO: 31854 - DNA, 1237 bp, Mus musculus
ccgtgggtctggggaccgcaacgtccggccagcggaaggaggctgctcaccggtgaacacggattcgcggacgccgtaggccaccgccccggcccccagcagcagcttcagcgccgtgcccatgccccgaggcccggcgggcaggcgtccagctaagtccttcaagttctgggccatgtctgatcctcccgaaggcggcggcggcggcaccagcggtcaggagggggtgcccgccagcctctgccccgctccagcttacagacctcgccttgcacacgaggatcggcggccttagagctcgcgggagaaagggcaccggaagtgcgcctccctccggacccgcccccctccgcccgggcggccctgaactccgcgcacaggaatggcgcatccggaagtcccgcctcttggtgggggggaatggtgtgccctcccggagaggcttccgtacgggcatcgccattttcgagcgccctctttcaaaatggcagctcgaaggaagttggccgtgaggacggacgtgaagttctaacttaaggacttcggtgcaacttccggtctgcctacaagatgtctgcggccagtggtggcttccaacctcgtgagcggcgattttcagtgcaggagcaggactgggagactacgccgcctaagaagctccggcttggggcaggaagcaagtgcggaggccggaggctcattgtggtgctggaaggggccagtctggagacagtcaaggtagttttgaacagtgagtgcggaggtagggaattgatggatcagattgtgtgggaaccagggccgcagagtgcatggaaaagcggagccttgaaatttgctctggaagaatgacctagttttccaggctgttgatatcctgggggtagtccttttgctctggactttcatttcagccctcgccttgcttttagttgacttatcacggagtctgtgatgtataatgcaaaatgagggaagcattgtctattgagggttcccacgtttccaaaggccagtgacttccccagccttttactaccaaggacttgatgctttattttgttaaatggggcttgactggcagcttgttctgtatttacctattctgaagtatgtctggatcagattatttaaaaagcctttgtctttgcttttttaccctcccccttaaatatttactttacctttatttatgcatgcaagtctgcatgtggccatgagccacctcatgaaggtg

SEQ ID NO: 31855 - DNA, 1341 bp, Mus musculus
atgcccccaggtgtccctgttgatccgaagagagctgacagagcgcgccaaggacttcagcctcatcctggatgatgtagctatcacagagctgagcttcagccgagagtacacagctgctgtagaagccaagcaagtgggtaagtccatggaggcaggcactggtcggggggcttctggaggtgggaggaggggggctacatgttcttgggcttcttacacctcacacttaatccacagcccagcaggaagcccagcgggcccagtttttggtggagaaagcgaagcaggaacagcgacagaagattgtgcaggctgagggggaggcggaggctgccaagatgatatccttgtgttgcacagagcgtggcctcatcccggggtcagcctgtttcccatcttccaccatgggccggttgatgagaccaaggcgaatgcgacttggcctactgactctttcttggcttgggaatgggggttggggggggggggacaactggtgagatctgaaatcttggtgggggtacctaaggcctgactccctgctgtaaggccagatcaatagcactactggccttgccctcatgtcagctgccacacagtactggcagcatcctgtagggaggcccacagggggtagccaacatgtgagtagccatgtgagcgcaaccttgaatctgacagcccaggggattcgagggcagagggagcttgccaccaatgtaacctggcccagaagaacccttaaccctgtctgctcaccttggagaagcactgagcaagaatcctggctatatcaagctccgaaagatccgggccgcccagaacatctctaaaacggtgagtggaaggcttcaccatccaagggctgctacacagtcacacagtggcattagaactggcttgagtttctacttaaacaatgtctttgggcacccttcctcctgcagagtgaccgaccccacagtgctccccgggttttgtttatggctgttacagagctatgacactaagccttcttgcatcgggtctttgtactagagcaggagcctgttctgttactgtgtcttccactgggtggccattgaatcaaagacttgaagcctgttaacacgtctgttccatgtcctgtagatcgccacatcacagaaccgaatctatctcacagctgacaaccttgtgctgaatctacaggatgaaagttttactcggtaagagatcccactgtccagagagcaaagcacccgtccactaccctggatcctggactatctagttaccagggccgtggacagtttctctgaacaccagtcagaaaagtgggtgtcagtctggttggca

SEQ ID NO: 31856 - DNA, 1180 bp, Mus musculus
ggatgtcttatgggaaaggcactttataaatatctaaatgagaagtgacgactggtagcaatttcacgtgagacccacgttgctgggaccgcacagatagtggcaaagagccgtcctcactggggagtgcgggtctggagcagctgagcctgtagctgactaacgatttatttctcttttcacatatttcctgctcacttcatggcatgctggttgcaggggaaggtaagtggctgcctccttgctatggggtcctgggggccatctgcttcctggacctgcccctacaccccctttctccccattgtcaggcctttatttaggaagaagctgtggtttggggtgttgtgcacctcacacttacatccccgataataggaatgttccctttgttctccagtgacagcctcattaagggtaagaaatgagtgtggacatcaagaaccccaccaccagagaagttggcacacttgtccagcttggaggagccagctcgggggtcaagcacagcccaccctgccccaggcatcatgtgatggacttttctgtatctgccctcttggattaaggaagactgagaccagccctttcagaggctttcctccttcctgtgttggctgggaagcggggtgggacaatgtgatttctccgtgatttcctacagccttgagcctctcccagagtgggggagataaccaccatgccaggaattctcaataaaatttttattacttaaagccaaaaattttgtgtctgagtgtgtacgtagattgcgcgaagacattgatcacactgggactcggccagcagagggcacaagcagtctggcctgtagcattcggactgccgccgggtcctcaacaggacctaagctgggagcagccgatctcaggcccaactacaccttcaccccacccgcaggtctaccaaatgaacccacagacttaatgacatctttttaaaagctgaagcagctgaggctttgctgagccaaactaaaaacgtgatgaccccagggggagctgcttccttggtaaccagctcctggttagctccgggagatggcgtgttcctcccaagggtttccgtgttcctaagtcccggtgtgctgttacttagtcaccaggtacgatgagctatttgcactgaagtttctccctgtggaggaggccttcccacc

SEQ ID NO: 31857 - DNA, 1202 bp, Mus musculus
tgaccacagtcacttaaattacaagaagatgggggtggtcctagggtctggtgagggccacaggtctcagtctatcgggtggaagcctctgcagggatcaaggctgatgctgcaaataaaagagaggaagtggatcaaaggttgtctgggaaggggatacaagagctagggacaccctagcagggtagcgtgagactgtgaccgtgccatgcacgcacgtctgaactgaagttggggaaatgggggcagggagagaaagaacacacagaaggggccgcaccatggccacctgcagacgaatgcccagatcacttcctcttgagagaacctttgttcttctccttgtctgccgaccgctgcttctttactttctcttccttcttgctcttgctatgcacgttttcgtacacctcctccttgtgcctggggttgggaggggacaggaggcatctggagactgtgcagggtgacccagcaccagcagcccctctgagactctcggtatgtgaagccaggagaacaagagagcctgctcactctgtacagtggacccacatggcccggggacagagacggcttctcacacaagtccatagcacgggcccacgtggggtcctaacgggcacttcagggaaaatttaagaacagagggaataggaagaaacttgaccttgaaccagggtttctctagcctccacactaatccactccagaaaaggacagttagggctgggcagtgggggatagagcctaggaaggcaaacagaaccactcacttggaggaagtacgcgaggctttggcgtgggcactcctcacagcgggagggtacgtgatattcccatactccgactcctggcccttctgggactgtgggcaaaggtgcggtgggaggatggtggtaccagcaggactaggtgatgcccacactcccctaccacccaccagccccactccggacacacttgtatgatctccagtttcttcttggtcgtttcgatgaactgggcaatggccacgtaaataaacttgtactgggcctcggtctgcaccatgccggagcgctgtgctcgtaccatctggatggtcttctggatatcaatgtcacagtctagccctggacaagggtggcaggggaacttcagggtagacaaaggccaagggatggcttgcccccctctcacacccacacacactccccagg

SEQ ID NO: 31858 - DNA, 1234 bp, Mus musculus
cagaagctgttgggtccctgtagcttggagttagggcagttaggaattgccaagcagggtgagccatctttgcaacccctctatttttaatgaagcagggccatggagcccaagctggccttgaacttctcagcttttgtgctggtatcacagaaatgtggcgctatgcccggtcgggcctgatgttccagagtctttgcagtgtggggaacttgtaaggatgagactacaagacatcgggccacatcgcctgccactacttaagtccgattcacttcggctttagctccaagcctttaatctcgcgaagctctttttttttttttaacaacataggagctgtgattggctgttttcagccaatcagcactgactcatttgcatagcctttacaagcggtcacaaactcaagaaacgagcggttttaatagtcttttagaatattgtttatcgaaccgaataaggaactgtgctttgtgattcacatatcagtggaggggtgtggaaatggcaccttgatctcaccctcatcgaaagtggagttgatgtccttccctggctcgctacagacgcacttccgcaagtgttacagctcttttagaatttgtctagcaggttttctgacttcggtcggaaaacccctcccaatttcactggtctacaatgaaagcaaaacagttctcttccccgctccccggtgtgtgagaggggctttgatccttctctggtttcctaggaaacgcgtatgtgctagagccacgctctgagacttccgcctcgtgcggtcccgcttcctttctgcctcctctggcctgcatccgtgggggaggtggctggctgcagggttctccggatctcttctgtgttcccactactcaagcaccgagtggcgttctatggcgtccgcctcggctcagcccgcggccctgagcgcggagcaggccaagggtgaggaaagagcctagtctgggtgtgggccgtcttctggggggagggcgcgatactattctttgcctctccaagtggggcccttgcccattagggcgaagggttgggaggacaagcttatcgggttgcttgcaggcctcggcccactaattccctgcctcttccctcctctgggctcgcccgccgtcctccgcggacctctctgggatgcttccgtctcgcagtggtcctggcggaggtgattcaagcgttctcggccccagagaatgccgtgcgcatggacgag

SEQ ID NO: 31859 - DNA, 1459 bp, Mus musculus
aagcctggtgggattggagccttgccactctctggtcccggggcttttctggaaactcaactctatgtgagaaccagtggtttttactccttgaatgatagataggaaggagcttacttagtagctctgcctcctccttctaggcacaggaagtacacgagaagctccggggatggctgaaatccaatgtcaatgatggggtggctcagagcacccggatcatttatggaggtgagtggctttggctctagctaagacggaaatgggctaagacagactgaggctgccttgcacagagaggtggggcttaagtgttctgatcatagacctgaccaaactgtcttcttgttcctggtacaggttctgtgactggagcaacctgcaaagagctggcaagccagcctgacgtggacggcttccttgtgggtggcgcatctctcaagcctgaatttgtggacatcatcaatgccaaacaatgagcactgcccatccctctacctgcctgcatagcatggactaggttgcccagaagtttagtaactgctcccaccggtcacatgcttctgatgacatcatctgccccatcttgtggcctaatccacgctgtaccctcctgagccgtttccaccgccctattatggttgggaccaggccaatccctttaccacttacagtgggtagaatcaactgtcaccaaggtggctcctagtgaggggagggagtagaactgactgtccctttgggccctgacaagtgaaatcaccttccattggtttgggctggaaactcatggttggagcacaggaagtgggcttcgtgtcactttggcctgtcacttagatggccttggctctagcttcactcccaagttctactggatgtctgatgcagaaattcagagctttcgggtctgaattcggtatacatgagaccctaagaggcctgggatagtcccctcccccacggtgccaaagcccctgtattgtgtttgtgaaccatcctacatgtaagggaaataaacacctgggcctgagctttgtgggttgtcataattccttaagacagtgatggggctctagcctggggtgggggagtgtaaaacaaaacaaaaaacaataatgaaacaggttgtgacaatacatctcattttttacttcaaaaacctctttgtcccaggctgccatggtgtttaatatcatttctatatgtcttgctcctgtgagaaggggaggtgaaggggtccagccccccccccccagcttcaccagctttttaaagttgtctaggccagcgggtgcctctccacctgtccccacggtagggtgccagcacaccctgtactactgggtcatttgtagagcagatagcgcttcatggcagggggcaaaggcagagtggatatttgacccagccgggtgtcccccagagcatggcgcacacacaggcggctcaggtgcag

SEQ ID NO: 31860 - DNA, 1328 bp, Mus musculus
tgtctctaaatgaacaatctgaggtcatcaaatgggaaaataagatttcgaagctccatttagatgctagctggatggtagatttggggatgtggcatagaatcagtcgggatccttcccagaagcccctccaggttgatgtggagagcccaccgctcacccttctctgtccctttccccactccccaggtgggtgatctacaatgaccagaaagtgtgtgcctctgaaaagccacccaaggacctgggctacatctacttctaccagagagtggtcagctaagagcctgccctcagcccttccacttgaagcaggggacagaccatctggcatgagggacggctgagggatggacttcagcccctgctctgtaccctttttgtttttgtccccagcagtgggaaggagctggaggtcataggagaatggccaaacaaagaggaggggtactcattagactctggggacagagcagggatgggacaggaggggccaactgcctgtccacagtgggaccttgttgcttccttcccctgccccttgaatccacagtgctctgcttctctgtgatggcccaacccctgatgtggggcgggctcttacctgtgtgtgtgtgtggatgtggctttatgcatctttccaggggagggagcgactgcgcctcccctccccttaagtgtttgctcccttgtggtggggcagaggaggctctgagggaaataggaccctccccacaccctttgcccttctgcctcagcctccggtctgtctttatggtcctctggaaaaatgccaaaatacatgatgtgaataaaagtacgggggctgactggtttcagttctttgggggagacttactagttctggggaggattactggaaggggaaggtttagagaggcccaactggggtcctttgccgtcccccccccccaggcaatttccttttctctagctctagaaatgctcagaaaactgaggtggggggatgggaaataaagggaaaattcagaagcgaggctgcatcacccccccccccccaactgaccatgcacttggtctagccccactgttgctgggcaaatgaaggacctagggcagggtgggcagtccacactgactgatatcagctgactcctttacacggctgcagccagcctgcctccctccctgccccccacacactagtgtcccactctgctccatttggccaaggtctgacaactgcaaggaccccgtaatcaccagcgacgttggtgacacacttggcccccttccttgtgattactggaagggctcctcaaccgtgactttgctttatgctatga

SEQ ID NO: 31861 - DNA, 1464 bp, Mus musculus
aagatggagggaagagaagctagagtcacgtcctgggataacggaggacaagtaaactgtaagccctcgactttaagtccttactctaacaaaacctttcttaccacaggttctaagcgcagcagacgaaaagcaaacagcaaggttctagggaggtcccctctcaccatcctgcaggatgacaactcccctgggaccttgacactacgacaggtaaaggaagaggggggtgaaaattgtcaccaagtatctgtcatgggctggagagatgtctcagcaattaagagcactagctgctcttccagaggtctgggcttcaatttccagcaaccacatagtggcccacaaccactatataaggggtctgatgccttctgtcatgcagccatacatgcaaatagagcattcatacgtataaacaaaaaagagtatccctcattaaagtgggaggccgctttccccagctcttgcctctgcctccctcacagcacccctctggcccctcagctcatgtcctgccttctacagggtaagcggccttctgccctcagtgagaacgttaaggacctaaaggaaggagtcgttcttggaactggaagatttctcaaagctggaggaggagcacgggagccaaaccaggaccacgacaaggaaaatcagcattttgccttgttggagagctagggctgtgctggagtcatccccaagggcaccaaagaaagccctgttctgattcctctcaggcaccaactctggtacttggacatcgttcttttaaaatgttttatgtgtttcctgtatattaaagtagatgattttaaatgatgctttaagaagttagagcaaagctacaccgggtcttgtgtgtatagaatggcatcctaggggcctgtgagacctggatagatctctctcctgccacttctgagcctcctttatgtagcttaagctttgatgtccccagagctctgcctttggccctcttcacttcttgtttgggtttagctattgcttacctgcttgtaatttccaggtccccctctcgacataaacactcaacgttagttcccctaaaataagattcatgatctttccctcattgcctacgcctctccctgtggctggggaaaggtggtcatctcctagctactcaagcctaagcctcggctttgggcatcatattgaacatgacgtgtctgtgaggttgtcactagggcctggtgattatatattcttgtcgtcttctcccttgtcttgtcttgcctgaaagagggagggagggagggagggagagagagagagagagagagagagtgtgtgtgtgtgtgtgtgtgtgtgtgtgtgtgtgtgtgtgtgagtttttgttcatgttagatgattactctgttactgagtctggttccccttgcatctcttaccacctgcctcatccctcgatgggcctctagagggccaggcacttca

SEQ ID NO: 31862 - DNA, 1165 bp, Mus musculus
cctttaaagcaagggattaggaagggaggcgggtgagcctctggaaggggttgaatgatgaaaggggagaagtgctataaacaaatccctgacgttgggcgcttgagcggagtgggagagatgggggtgggaggagagtgagactccaagaaagtcaaagacagaggaacccaggagtcgggcctggatagtgtggtcgggtgagcctggggtttctactcatttccactcaggagtgctcagagaatgatctccagggagaagcagggaatagataaaggctcagggcagctagccgtgtgacaggttgaagagtgacagggcctgtggagctgaagaatagaagtggaagcaaggaatggtcaaaggagctgggggattgagtagtggcgggtgaggactgagacagggaaccccaaatgtcaggagacagacagacgagaggacggtagatgccgggctggagatggagcttttgcgtggctggtagaactggaaggccctgtatattaaaaaaaggctgaaggacctcaatctcaccaaaatgggcacccccgtgagtgagtcatagagaaagacgatggcgctgaccaagttggtgacctgcaaggatgtcttggcagattcagagccatccagcgaggaccgccgcttccctcgagtatcctccaccacaatggctggcacctcaaaagctggccgggtacccaacccccccagcccccctgctttggtgcccacactgccccccgctctccgggcctgccgagccctccggggccgggcccacagtgtctgatagaatgtgatagccacacagaccaaccccatgacaatgcccccaagaagcaggaggctgaagcagacaccaaaaccgaggccgatcttggagactatgaactggcagcctcgggcatagtagcgctccccgttgttgtgccagccgatggagggcagcgtggagaggatgaagctgaccatccagatgcccatgacggcatgcagcgcctgcttcttggcgttgctgaggcggtagttaacgggccatcgcaccatccacatgcgatggtaggagagcgaggcgaccgtgaagcaggtggccagggccagcgtgtagtaggtggacacaaagaccttgcagatgctctcgttccagtcatagtca

SEQ ID NO: 31863 - DNA, 1149 bp, Mus musculus
gagcaagtcaagaagaaactgtggggacagtagaggaagcttaaagatacagctgtagttctaggcagaaatgcttggcagagagagagagagagagagagagagagagagagagagagagagagagaggagacagagggggaagaggtgaagagggggcggtagggagacccgagtctgaggaagtaaacaaggggagtgccaccaccgagaggagggctcggctgctgggaatcagccccctcacactttccactgcgaagcgaaaccccgcgccttggtctgggggggcgggcagtggggaggagaagcagaaggactgggtctggaggagcagctcaagttctagctagctgcagtgggtttgcctgcactctgctctgggtcccagcccgggcctctgatcattatccatcctgctgtctccagtccccactcctggggcgtcctcttcaccctacattctttccctccgcctcacctcctccttgtagaacttctctctctctctctctctctctctctctctctctctctctctctctgtgtgtgtgtgtgtgtctgtctgtctgtctgtctctctctcctcccaggacctttttctaacctcccttggagggctggggaggcccgggccatagaggagatgagggaggacctgctccttggctttttgcttctgggactgctttgggaagctccaggtaaggtggagagtccagcagggacctctatggctgtctctttagctgtggtgatattccaatgcttttgttgaggggaggggtgtgtgtgtgtgtgtgtgtgtgtgttttgagacagggtttctttgtgttgccctggctgtcctgggactggctctgatgaccaggctggccttgaatttatagtgatccacttgcctctgcctccccagtgctgggattagaggcgtgcaccatcactttgtataagggcagatcccaaagctgcctcagcctcccttcaacagggaggcatgatgtttctttcttaggaaagccagggcatttctctattctccaatctcttggctcaatgcccttggcctctcttttgttccactagttgtgtcttcagggcctgggaaagagctccccgtggtgtgggcccaggagggagctcccgtcc

SEQ ID NO: 31864 - DNA, 2404 bp, Mus musculus
tgtgtttgttcttagacccatgagtgattacgtatgctagtgttgggcctgaggaatcggggcggttgtgatgcgagtttcccatcctcacgtattttgaggaagatgtagcaagagccagcagctgaagggagctcccttctgcagagtaggccctcattcagtccctcctcaggagcacatggctgcagggggcaactgccagaccttctcctcctccactgttatctcctactccaacactggggacggcgcgcccaaggtttaccaggagacgtcggagatgcgctctgccccaggcggggtgagtaaggaacccctctatctcagaggaggtaggatggatcggcatccacaggaaccagggtcatctgttttcaggactgggtcgtgggtggctggttcgtcccggggagatgtagccagggctttgtggggagaagtgaatgagcctattcacctcgtcccagatccgggagacacggaggactgtccgggactcagacagtggtctagagcagatgtccattgggcatcacattcgggatagggctcacatcctccagcgctcccgaaaccaccgcacaggggaccaggaagagcggcaggactacatcaacctggatgaaagtgagtgagcctgtcttcttctgggcagcagtccctgagctagttgctgtagactggagcatagctttctctaccatcccacaggtatctcaggcagagctgtgggtgagccctgtgcttaggctctgttgccagcttcagggctgagtcaggtgttgccagggagggggcagagcttgactgacgtcaggtgctgatggttgtagtttcctctatcgggattggtggcttttcttttccaccctttactttgtctttctcaaatgagtgctttattagctttcgtgatgtataactccagtaattgtgcctccccatggtgtgtaaccccagtagttgtgcctcaggcttgccagtggcatccaggaactgtgttgaagctaagatggctcccaacccccattctcccatgcatgatctcaacctttgccctggtttctgatctcagaatactgtggcttccatggctgctctctgtcctctttaggtgaggcagcagcatttgatgatgaatggagaagggagacatcccgatacagacagcagcgtcctctggaatttcgacggcatgaggcatctgtgggtggggggcgaagggctgaggggcctccccgcctggcgatccagggacctgaggactccccctcccgacagtcccgtcgttatgactggtgaaggccccaggctctcagcttctcatgtaagtgcctgagagggaatagtgggaatgtgacagaccagaggaggctggctggcagatcaatgtagttaagctgtcgtgggacaggagacttgctccttctgagtggctggaagatgctcctgaccccagacttctgtgtcctttctctgacaggctcatctttccttcctccaggtgcaggctgagcggctgagtaaccatccttgaaatgactgtcctttccaacctctatcccaatttaatattaaattaacaggcaagctggccccgcctctccctgggtctcagggagagccttctactgccccccttacctacgtttccatcttcacccctcactgcgtgtcccacccatcctgtatccactaacttgagttctcatgttgctgctccatctccaagccgcctcatcttcccgagcccctgccacgcatcgaagggttttggggaaagctctgggtttagggatctccgtccctcagctcccctgacccttgcccacctcttcctcagagccccactgcaggtgccatggtcctataagggctgtggagaaagtggactagttccaattctttgtcccttcccccacccatcacagaaacactttcctttacccttctctgcctttataaaaactaatgatttgtgcaacttgtaactaggtgtttatggaataaaggagaatggaaaaaagtgaagattctggctgtacttttgccccagttcaaccctgctcaatcctaccttctgccatcttggctccacatgtggcccagctgtcttagggtttcttttgctgtgatgaaacgccataaccaaggcagcatataaaagaaagcatttaattgggggattgcttgttgcagaggtatggccatcagggcggggaacagagcggcaggcaggcatgatgctagagcagttggcctacatctgctccacaagcaggatggagagagagactggaaatggcttggccttttggaacctcaaacccagtgacacaccttagtccttcctaaatagtccaccacaactgggcaccaaacattgaattatatgagcctg

SEQ ID NO: 31865 - DNA, 1457 bp, Mus musculus
ggctatccctcattcctttcatcctgataggttgccaaccttaagaaaaccattaaagttacgacagcagctgctgctgcagccacctcccaggatcctgagcaacacctgacagagctgagagaaccagcttctggcaccaaccagcgccagcccagcaagaaagcctccaagggcaaggggtgagcccatgcgggagccacttgtctctgggtaccccacttttacctcagggacctggctgctccactgctttagtcatttgcatggggtcgggagtgggggtgtcctctaggaattaggggaccccttgcatcccctctctctctcttccccttgccagactccgagggagcgccaagatttggtccaagtcgaactgaaaggacttgtttcttccctgggaatgtggggtcccagctgcctacctgcctaccccttaggagtcctcagagccttcctgtgcccctggccagctgataatgctagttcattacttttcatctcctccacccccaagcataagccacaccctctgtagggaggaggccagtgcaggtcatgttctgttggtacctcttatgtgttccatgctcttccccagcacgcttgctctcatcgtttttccgcactgtgtctgcccattacccctgtcattgagcaggttggcagtcctatggagggtgctggctcttaaccacccacacctacccctgcatgcctaatctgcagttcctcctcctccccttgcctagtgggctgcatctgaaaagccatggggaagggggtctccaccttcattccagccttagagttctggagccagtctgctaccctgggagtcgctggacattttcctcccagaaccccatcacactacaattgtttctttcctctctcatctccttgggcctggggatactgctgcttcagtgaccccagagcctgagaacagctatttttgagatgttaagaaatggttctttgttgctcatcatcttaggaagcccaatggaaatcctggaaggatttatatctcctcctgtggttctggtggggaaggaaatatagattgtatattaaaaataaaaaatatatatgaataggtctatatatattgacacatgacacagaaataaatctatgagaaatctatgtacaaaaatgccaggaactgggcctcttctgtctttgatgtttgttaacagggagaagattaatccccagtccactgtaaagccaagtgccaagtgaaaagaaccagacactttgcagactctgggcctagcagctaggaggcctagaccctggacagattgctccatccctcagcccatggtcagcagtcacgggcacctgctgaacaccgccatgtcctaacaatggagatgcagacaccatcactgactgtcctgcccaaggacctgcagtgtggtctgcttcctgtcacctcagag

SEQ ID NO: 31866 - DNA, 1127 bp, Mus musculus
cctgtctctagctgaagccaggaatctccccccactgactgacgcacagaagaataagcttcgacatctgtcagttgtcactctggctgccaaagtcaaggtaagtgacagccttgccagctgccagtccaaagccagagacgacctgttgtgaatccagggagtctaaggagagccattggcctcccctgtctgggtctgaactgaaactccatttctgcagtcacttagttaggagtctgtcagtttgaactgaagttctaagtcatcgtcttttgtgattggggtaaaaatagccactagaaggctggccggctcattcatcagatggagttccaggccaacagagcctcagagctagaactggggtccttctctacttactatagtaagatgtgtgtgacctacagtacctgtgtgcccctgtgggcacagactttttatatcacattctcccagttgttaactagaattgagtcctggtgatttttgctggaattaggcttgtggttgtagattcttccccaaggtcattccagtttgtaacatggctaagtcaacatgataaacagaaactccagacccctcctatctatcctctgatgtcaagctgatcaaaaacagtttccttagctacagccaaagaaatggcaccaggaagatgtcacactcgttctttcactatatagtgggaggtgggcataggagagcatctaccacatgtttttggattgtcctttttgagtctggtgccgtgtctcatgtcggcccagcgcttgggactctgaagcaaaaggattaatgtgaggtcaagtctagcctggactacataatgagttccaagccagcctgggctatagaatgagaccctgtgtcagaacgccatgaaagaaaaggaaggaagattattcttttctggtgatgtttttgaggccgtaatagggttttgctttagaaccaacattttccagaaaatggcttacggataggagtggagggatgtgggcctggacattggggaaaaactggaagaggattctgggaaatcctcctctgcttttgaaccccacaaattccggtctaacctctggacccagtgtatcccatatgcagtgttgctggaggcc

SEQ ID NO: 31867 - DNA, 1229 bp, Mus musculus
gggacactcactaatcccatgggcaagcccaagcgtttgtcctccagtgactggggtctcccattcccacccttgcacattcacatgaaagccttgcacactcacccacaccctcacaggccatagcacagtcacgctctccacgctgctcctctgccgtgtccccattcacgtctgctcagccggctcctagctctctccctcgtgttgcctatgtcctgccccctttacattctctgtgcccatctcagactgggcacgagcatttctggctccaatatatggcatagtgtgcccactctgcctcatcagcacccactggtctagcttctgtggcccttgcatgctgccctagaggtgggtgggaggtgagctaggggctccttgtaccatttgtcatggccccattcacatctgtgtctttccattccattccaaggatgctggtattactgagggctcccccacaggaacgggggtagtgaggcccagttgttaaactctgtcatcagaagtctgggtttgggggagtctcctgctgcactacatgagaagggactcccatgtcctcccttccctcccaagtcccttgttttgtcggtcctggctgtctgtgtgtatgtgtctgtatggaattcggagccccctcaacaggtcctccatctcccaccctcccctaaggcctcccttaatgtacctaggctgccaggaactgaagccagctggttcaaggccattgggagctctgcctccatatccacccttctctccctgagcccctcacgttccctcctcccctctcccttttccgttttttcagattcttccagtttctcgctcacctctccagctcccttctccctcttacctggctcctatgctgtgatatatatttttgtattatctctttcttcttgtggtgataatcttgtgggatgtaagtttcaaaattttcaaataaagcctttgcaagataatttagttgcctgttttgccttataattcccaacccctggcaccgtcccccagccccatacacagaagaggatggacaggaaggagaatgggagagaaaggggagatgaagaacttcttcagactagattgtcacctggcctgctctacctgaagctggagactgatggataccttaacttaggacaggatgaaggaaggaaccggagaggctccagaggagaaagagccctgaggggggagaacttgcatct

SEQ ID NO: 31868 - DNA, 1152 bp, Mus musculus
actggtttactacttcagtgccgagggtttccgtaacacccttcgcaacctgggcgccccgctgaataccaggcctttggctaccaatggggctgcaggcgtgctcaccgaactaccctcagaaagcacccaaaacactgggcaggatgccacaagtcaggttctactccagcctgccactctgggtacacccccggacaactgctcccaggattcggctctctgagaggacgcagtctaagtgaacgtagacttgtgcctccctcagaggcttagggtgtacatttgagggaggtgggctgggtacttggactttgaaacaactccagctctagtgtgcagaagggaacaagtgtgtaagcaaggaaaagaagagtgccactgctgacagctttagcttctgattatcacacagagaaaccctgctccagtatgtaggaagccaagcagtgagcatgcgcatggctaagagctggtacatggagcagaagagagatctcctaggtcgtcagtctgagagctaaagatctggtgaccttggtgaatcaactacacagacgctcatctgtcatcttcaaaaataaaactctgggctggtggtggaaccgagaacccacagcccgcacatgctgggccagtacattcccactgtattgtatcccagccttacctgctggcttttgtgtttactcaagggtgatggccactgtgtcaccagccctggcttccctgttcagatgggaggtataacacaaaggtttatttgctatggaccaaatagttctgacccatttcccaacttgtaacaatttcgacttgacacctggcatgtggtggctggggcagggcagagccatgcttggagtccctctcacttgctagttcttggttccttttctaagtcatccttttcccttctgcagctctcggggcctcttccatcctggatctttaatattcagtctcacttccctctctttcccaccccgttccttctcctcaccccgcccccttatatagtacatagcagagtctggccttgaactctttttgttttgttctgttttcaaggcaagagtcccactatgtagttcttgatgtcctggaactcattctgtacactaggctggccttgaactaacacacagagat

SEQ ID NO: 31869 - DNA, 2102 bp, Mus musculus
cctcacctgtgctgttgctcttttccctgcctgcctctgtttgccaatctatgtagaaaatgaggaagacccagacgaggatttatccgaagcagagactccaaagctcaagaagaagaaaaagcctaagaaacctcgagaccctaaaatccctaagagcaagcgccaaaaaaaggaggtgagtgggtgactgagtgttctggggagtgagaagagagaggaggaggaggcgctcaaggagagttgtgaggctgcgggtagtttttctcctggagctgggggtcaggttctggggcgagcctcaggactgtcctgggtgagcatgtgtgtagcatgtgtgtctgtctccctccccccctgctccagcgtttactcttatgccggcagctgggggacagctctggggaggggccagagtttgtggaggaggaggaagaggtggctctgcgctcagacagtgagggcagcgactatactcctggcaagaagaagaaaaagaagctcggacctaagaaagagaagaagagcaaatccaagcggaaggaggaggaggaagaggaggacgaggatgatgactcgaaggtgcctagatctctgtctgtcaagaccctgcccgtcctctctgtcctttctcccagataccaccctgccctgtagcacagcatctccatgtaggtgtgctcatttcttctgtattatttcctctgtacctcgctcgctcttggaagctgcagtttgacttcccagtcggttgtcttagccagtgagcactatgaagcagacccctgactctgccttctctgcaggaacctaagtcatcagcccagcttttagaagactggggtatggaagacatcgaccatgtgttctcagaggaggattatcggaccctcaccaactacaaggccttcagccaatttgttaggtaagtcaggaggagcctgtgcggtgggaagggaggagtctttctagaatttcttcttgtttgtttttctcttttctctttatatacgaccttactcttgtccatttctcttccagacccctgattgctgctaaaaaccccaagattgctgtctccaagatgatgatggtcttgggtgcaaagtggagggaattcagtaccaacaaccccttcaagggcagctccggagcatcagtggcagctgcggcggcggcggctgtggctgtggttgagagcatggtgacagctactgaagtcgcccctccccctccccctgtggaggtgccgatccgcaaggccaagaccaaggagggcaaaggtgcagtggaatttaatgaagagtctgggtgggcttgacaagtctgacagctaggaatgcggcattgcccctaagtctgtccctaatgggcaggagtgagccttgggtttagaagaaagccagggtgagccagctcatttcccatcatttgccttgtggtctacatttggctgtatcctgatcttaggtcccaatgctcggaggaagccgaaaggcagcccgcgagtgcctgacgccaagaagcccaaacccaagaaagtagctcctctgaagatcaagctgggagggttcggctccaagcggaagagatcctcggtgagacctggctcttgccaccggagaagggggagctgtgtgggggaggggcacatagggtactactgcttcagacaggtgtgactcggctccttctgggcagttctctccttggcctggacttttaactttgttttctgttttttcttccagagtgaggacgacgatttagatgtagagtctgacttcgacgatgccagtatcaacagctattctgtttcggatggttccaccagccgcagtagtcggagccgtaagaaactccggaccgctaaaaagaaaaagaaaggtgtgtttcttttctgtacttatgcgtaatgggataagatggcaatggccaggggaaaatctcccttaggagataagggttggggggaggtggtttttttctaataattgggctttccctcttccttgcccaggcgaggaggaggtgactgctgtggatggttatgagacagaccaccaggactattgcgaggtgtgccagcaaggcggcgagat

SEQ ID NO: 31870 - DNA, 1103 bp, Mus musculus
gagttgacctttgagttcatgctcatgcttgtgcgaccgtgctctgcccatagacactgatattcatattctttcagggtttgatgcatctccctgtggtactgaattgagattaagtggtgtctttttaacagtgtccagctcttaagggcaaagtgcagaagatcctaatttggaagtggggccagccaccgtctcccacaccagtgcctcggcctccagatgctgaccctaataccccgtcgcccaagcccttggaggggcggccagagaggcagttctttgtgaaatggcaaggcatgtcttactggcactgctcctgggtgtcagaactgcaggtaagcctgggacaggctgcacgtgtgaggtgacgccgcagaggtaagggcaggaagctggttggctgcagctcccggagggtctcctttctctttctgctccagttggagctgcactgtcaggtgatgttcagaaactaccagcggaagaatgatatggacgagccgccttctggggactttggtggagatgaagagaagagccggaagcgaaagaacaaggaccctaagtttgcagagatggaagagcgcttctaccgctatggaataaaaccggagtggatgatgatccaccgcatcctcaaccacaggtaccacgtctgctccctgggctcactcactacctgttaggtgccacgtctgctcctgggctcacttactacctgttaggtaccacgtctgctcctgggctcactcactacctgttaggtaccacgtctgctcctgggctcactcactccctgttaggtaccacgtctgctcctgggctcactcactccctgttaggtaccacgtctgctcctgggctcactcactccctgttaggtaccacgtctgctcctgggctcactcactacctgttaggtaccacgtctgcccctgggctcactcattacctgttaggtaccacgtctgctcctgggctcactcactccctgttaggtaccacgtctgctcctgggctcactcactccctgttaggtaccacgtctgctcctgggctcactcactacctgttaggggccacgtctgctcccgggctca

SEQ ID NO: 31871 - DNA, 1128 bp, Mus musculus
tgggttctattgactgggcctgcctcattgtggatgaagcccatcggctgaagaacaaccagtctaaggtgaggtgtgggaggaaacggcctccagttctagtccttggggaaattcatctctttgaaagaaccctaagtagagaagaagggaaagtggtctttatttccttcctcaccacggcagcccttctctggccaggcctttaagaaggatgccagccatgggatgagacacttagttcactggacagtgaaacagcttggcattctgttgcaatactctggtgccctcgtttcttgatttttatttctcttcaccagttctttcgagttttgaatggttactcactccagcacaagctgttgctaactggaactccgttacagaacaatctagaggaactgtttcatctgctcaactttctcacccctgagaggttccagtaagtgcgcctgtcagtcagtcagtccctagctctactcattcttgcccatttcctgtgttactttcctttcttccttgtttccccttctctaacaacttttttcttttttctgaagcaacttagaaggcttcttggaggagtttgcagacattgccaaagaggaccagattaaaaaactccacgacatgctggggcctcatatgttgcggcggctcaaagctgacgtcttcaagaatatgccatccaagacagagctgattgtgcgcgtggagttgagtcctatgcagaagtgagtgtgaagggatagaaacacactcagccttgtaacagacaccggccgtgctgccagcagcttcttccagagcttccaggcatctggtgacggaagcaagcggggcctgaaggaacctgatacctgggaggcggagcttgtagttcttagttttaccttcctgtgtcgaacatgaggatggcgtggtcgctgcttgttagcttagctccacagtgaggaatgttggagagatgatctcaggctgttggttgcatcattagtcattcaaaagaccctcagtccaaccggtccttgtgtcttgttcatgtaggaagtactacaagtatattctcacgcggaatttcgaagcacttaatgctcgaggtggtggcaaccaggtttctctgct

SEQ ID NO: 31872 - DNA, 1184 bp, Mus musculus
cagagcaccgtgctgacaattgcttggttttctgaagcgtctcaccttccttctctccttatttattggaattcaggagagaactcatggtgttttttgtttcttagcaccgggtgctcaacagttctgcttcttgctttccactcgagctgggggccttgggatcaatctggccactgcggacacagttattatatatgactctgactggaacccccataatgacatccaggtgagtagagtattcgctttgggaggtcctagcacttcataggaaccctccaggagagggttctgtcatgtgaaacgtaggtgtgaaacaacagacttcttttttttgagtgtcactatcttttaagcctgggaattagaattggttgcagtcctgttttaggtgatgtgactggaagttggtttctggagagagagctgggaaagagattgtatgtgaagaccagcttccgcttctgtctagtgttgtcttgatatcagtgacaagtcaggagaacataagattgctggttttgcttgaccaactccaggcctttagcagagcccaccgtattgggcaaaataagaaggtgatgatctaccggtttgtgacccgtgcatcagtggaggagcgcatcacgcaggtggcaaagaagaagatgatgctgacacatttagtggtacggcctggcctgggctccaagacaggctcaatgtctaaacaggagcttgatgatatcctcaaatttggcactgaggagctattcaaggatgaagccacggatggaggtgagctattcaggggcttcaattttgggtggagcttggtttctcagactctgggaagaaaggacctttgatagcaagggtcctgagggaactgcattttctcctgggctgctgctgaactgacttgggttgtgggcccctggttcttcataggaggagacaacaaggagggagaagacagcagtgttatccactatgacgataaggccattgaacgactgctggatcgaaaccaggatgagactgaagacacagaattgcagggcatgaatgaatatttgagctcattcaaagtggctcagtatgtggtacgggaagaagagatgggggtgagtatgggtccaaggcagtgctgttcttggtgattcctctcaacagtggaattaagagccagatgatatttg

SEQ ID NO: 31873 - DNA, 1193 bp, Mus musculus
agaagagaaaagctgagcccatcattgtggcagtggtgccacatgccacatcccagcacttgggaggcagaggcagatggatttctaagtttgaggacagccaggcctacacagagaaaccctgtctcggaaaaaaagaaaaaaacaaaacaagtcatattggggagggcgagaaagctgattttggtttaccatttcagaagctccagggatggtcaataggtcccagtgctaatgggcaatgggcttcgcttaatggggcaaacatactgaggaaactgctcatggggcaaaagaagaagagcagactgctttcttaatcgctccgtcgcgtgcacacttcagctctggaacttcttcccagcaggtctgaactccgtggagcctcgaaagctttcaggtttcaccaaagactggctatccgagctgtactgaaacgtggttcaaaactcaagacacctattctgtcctgcctagttcttttctggggacagtgtgtttgtgtgtgtgtgtgttttagttatacccagggtgaccttgaacttacggtgatcttccagcttcatccttctaaatgcttagattacaggtgtgaactatcatgttatatgtgtatctgtctgtctgtatttgtctgtctgtctgttatggagttacataataagtggtttggggagtaaaggcaggctaaatacaccttacctgaaatgcttgcaactaattgtttcagatatgggagaagttgggatttaggtagatttacagactgagtatccatacaccaaggtcagtagtctggactgctttttattgacgtcctgttaagacatttgtgggggtgggggggtggagggcacttggagggacggttcagcattctgagcactgattccagagttacaaacatctgtagctctagttccagggagtctgatgccatcttctggtctcctcaggcaccaggagtaattgtggtatacaaacttacatatagacaaaacaaacataaaattaaaagactaaaagtttcaaaggcagttaatacatttctatttcatatttttagattttgttttctttagttagggatcataagcctattctgtaattcagttgtggaggcaattaggttgtttcttgaaaatttgttttgttttttagtgtttatttggaggatataagtctgcagagtt

SEQ ID NO: 31874 - DNA, 1194 bp, Mus musculus
ttgagatacataaataccgtgtatgcgtgtatctgtgtaactttgttgttgttgttgtttgtttgttttcaaacagttgctaatttcttctgaggttaattaagaccagaatactttctgttctaaagatctcttgcagtgtttgtttgcgaagctcctccattttgcttgctaagacactaacctttttattctgctgtttctggaccttgccaggaggaaggccccgctatgtctcgtcgtaatagtttcttttactcaggctaactaagctacacgaaacctccgaggagccatgtcttgtctgttaaatttcttccaagtttttaggtccaagcaggcacatcaagtgtttacaaatcgagccatgcaaaggagctagcagatgggaactgtgaggaccaggggtagctggtggtgctgacttcagcacccctgagtcctggccctccctctgtcccaggaggaagaggaggtagaacgggaaatcataaaacaggaagaaagtgtggatcctgactactgggagaaattgctgcggcaccattatgagcagcagcaagaagatctagcccgaaatctgggcaaaggaaaaagaatccgtaaacaggtcaactacaatgatggctcacaggaggaccgaggtgtgtgtggccggccccgccccccacccacgggccgttccactagagcagtgggccccgctcatctgccctctctccctccagattggcaggacgaccagtccgacaaccagtccgattactcagtggcctcagaggaaggtgatgaagactttgacgaacggtcagaaggtgagagcggggccatcttgcgagttgtgtagctgttggcattgttgctgtcctgtcagagccgctcactcatctttctctttacagctccccgcaggcccagtcgcaagggcctgcggaatgataaagataagccattacctcctctgttggcccgtgttggtgggaatattgaagtaagtaccgtatgatcctatagtgggagaaaggcctgagattgccagacagttggtctttggtgagaagagatttgcttcctcttacagaggttttttttccttaggtacttggttttaatgctcgtcagcgaaaagcatttcttaatgcaattatgcgatatggcatgccacctcaggatgcttttaccactcagtggctt

SEQ ID NO: 31875 - DNA, 1140 bp, Mus musculus
gaagaaggaggaggaggagaaaaaggacgtgatgcttcagaatggagaaactcccaaggatcttagtgatgagaagcagaagaaaaacagcaaacagcgtttcatgttcaacattgcagatggtggttttactggtacggaatgcgggtcctgcagggaggctgggcttctggccagaaatcagggcagagtgggaacttggtatggactgtttgtccttctgggctctatgttagcgagctagatctggaccatattgagatggattggcgggggtgtgtgtgtgtgtgtatgtgtgtgtgtgtgtgtgtgtgtgtgtgtgtgacagacaagggtaccccttttttttaatctttggggatttttggagatagggtctcactgtagccctggctagcctgggattcagtatgtaaaaattgctgtccaccgcctaactttttcttttttaatttatattctcccagattatttgtcttcctttccactttctaaccttctgctaaattcctcctcagagttgcactcactgtggcagaatgaagagcgggcagccacagtcactaagaagacttacgagatctggcaccgtcgccatgattactggctgctggctggcattataaagtatccttgcctgagttgagattggggtctctgtgtaggggcctgaaggtttagtctgaggctcttgttcctttgtttttcctgagctctttatcaatagccacggctatgcccggtggcaggacatccagaatgacccacggtatgccatcctcaatgagcctttcaagggtgaaatgaatcgtggcaattttctagagatcaagaataaatttttagctcgaagattcaaggtgagcagaatgagacagatgtgccctcagttggctctgaaggtctctgcggaaaagaaggttctgtgaaggaccatcagccacacttgcacctccccccaagatacttacatttttattttatatttatgaatgttttgctttcatgtatatctgtccaccttgtctgtgcctggtgcctgcagtggtcagaggagttacagaaggttgtgagctaccctgtgtatgctggtagctgaacctgggctttctgtaggaacagctagtgctcttaaccatc

SEQ ID NO: 31876 - DNA, 1434 bp, Mus musculus
atgtgagaccagagccacttgcaactagaatgggaggaatagctgggtgggcaggccaggtaaagcgagtgtcaagagcgtatcctgtgtatgccagcgtgacaaccagccctgtgggccacagctgtgcccttgactaccacagctcacggcctctttctttctttttccctctgcagtcctgaaacagctggaggaactgttgagtgacatgaaagctgatgtgacgcggctcccagccaccattgcccgcatccccccagtcgctgtgaggttacagatgtcagagcggaacattctcagccgcctggcaaacagggcgccagaacctcccccacagcaggtagcccagcagcagtgaaagacccagagtgatatccacctccaccactcagcagtgaccttcctcactttctcttgtcccggctgcccctgggggccagagagacccttgccttccttctgcccatcttctgagttgtaaaggaacagccctgcgcagtggggcagggagggagggagaagcaatggtgcccttcctgctggagagacaagcagcagtagcgcagcgcccgcccgccatgtgcaggagctggcgggctggctgccttctggaccctggcttctccccaccgtgcgcctgttacaaactgttgtggattctgccaggctcgaagaaaatgatctgaatttcttcctctttttggttttattttgttggtttactttgtgttttctcctttttggggggtattcagagtgggccgggcccctgggcgagacacagctacctctgttggcatctttttaataccaggaacccagcggctccagccactgagcagctaaataaagttggaaaaaaaaaaaaaaagaaaaagaaccaaaagcataaaaaaccacagcaaatttcttgatgagaactgaaaataaaagtttccttgtattttagtgatctggttctgtgtgggtgagtgtgggttccaggtaccccaggaactggcttatcctggaagactgcctgtgctcctgacagggtgacattctggcgaacaagaggcttctggaccattgtttataggctctgatctttagcaaactgttcgcagagcactcctgcaggaagtagccacttgcctggtacagttgtgaagacattgggcaagtgttctaccatggaatacatatgcgtgaatatgtaattatagaagtataaattttttgagggtctaagtaacaactgcctgcccctgcctctcaagtgggggaattaaggatgtgttaccttaagtataaattttttgagggtctaagtaactactgcctgcccctgcctctcaagtgggggaattaaggatgttaccgtaccctaaaattttttccttggtttattgttatcactttttttttgtttgaagatttatttattattat

SEQ ID NO: 31877 - DNA, 1104 bp, Mus musculus
gcgagttcacaagcggatccaggacatcgtgggagtgctgcgggatttcggagctcagcgagaagagggccggtctcgagctgagtatctaagtcggcttcagaaggacctggccacttactattcttatggagacttcctgctgagcaagctcatggagctgttccctctgtctgaggtaccggcagctgctgcttccgcttcccttccctttgtacggctgtgatgccgtttacccgctcacactgtgtgctgagctcatgggctcttggctcagccctgatgcactgtctccatcgcagttgatcgagttcttagaagctaatgaggtgccccggccaatcacccttcggaccaacaccttgaaaacccgtcgccgagaccttgctcaggtcagtgtccttttaattcagaactggactctggctcacccgtgaatcaccctgcccagttgtagctgggtgtgttcttcagacctgagagtgccttgttccaagcctggcccccaggcctgcgatctgtgtgcctctgtgctgcctgcgcctgggatgcggcaccagcgtggggaagaactgcgacctaggggattggagggagggcaccaggaagccgagaaacgatgctcgccccaggaaaacataaaaaacacacaagagtaagattttattcttacacaaggattcgggagccccaggttaaagactttgcttctagccaggcagtggtggcgcatgcctttaatcccagcactcgggaggcagaggcaggcgaatttctgagttcgaggccagcctggtctacagagtgagttccaggacagccagggctatacagagaaaccctgtctcaaaaaaacaaaacaaaaaaaaagactttgcttctaaaatcagtagtgttaaccttgcatactgtcttagtcagggtttctattcctgcacaaacaatcatgaccaagaagcagttggggaggaaagggtttattcagcttacacttccatactgctgttcattaccaaggaagtcaggactggaactaaagcaggtcaggaagcaggagctgatgcagaggccatggagggatgttacttactggcttgctttctt

SEQ ID NO: 31878 - DNA, 1226 bp, Mus musculus
ggctctcctgggactggctctgttgacaaggctggcctggaactcggatccatctggccctacctcctaattgctgggattaaaggctgtgccaccaccactgcctggcaactgccttggtttttgtttgtttgttttttgagacagggtttctctgtatagccctggctgtcccggacctcactttgtagaccaggctggcctcactcagaaatctgcctgccttgtttcttaatgatcaagccatctgtttaatttttacctcaggaaactcggcagcagctacccctacagagcctgacctgaaggatcaggtcaccccaaagtctgagaacggtagtcagcccaccaagaaagcccgtggggctgtgaaggcaaagcagcagttgctgagacagccacattccaagaagcccttccagaagttgaacggcatcgccaaagggccaggcttgtccactgaaccttctgtcccagatgcccaagtgtctaccaggcccagtcagtctgctgggaatgctgacgtgaacagcaaacgaaagaggtctgagaagctgaagcagcggggacctaagtggaagccctctaaggaggctgctgtcccaaagccgagcgccccttccagggttgaggactcgagaacacctcctgtgccgactccctctgaaatccgtgctgccccaaggcctaaggactgtgctccatcccttggggaagccaaaaagaaacagaaaggaaagcagcagttagcacagcagcctgctaatggagctgctcccctgaaagaagatgctgtttccaagggaccctcagccccctttgtgtctccccacagttccaccaggcccccaccagcaaaaaggaggaaatcaatgacaaagggcaacagccagcctctgttgtcttaaatggacttggaaacttgacattgtctctgggttggaacttttagatcctgatgcaaggctggcctccccctgtgcatacatatgaaatttaatatacatattaccactcctagttgctgttgtgttttttgaggggactgggtactggcggtttgtaggaaagtgggcctgggtttctctggggagagacagttgtgcactattcaaatgactattcaaatggtaaatttctccctccatttcttagtcttcatgggaaaaagtaaaggagtccgacccagggtaccaggtagaagagagggcagtagggaagactgt

SEQ ID NO: 31879 - DNA, 1122 bp, Mus musculus
actccgcctttgcggggatgagcggcccggagtcttaagtattaggaacaaccccacgcgcccgttcagacccatcccgtaatccccagtccggggcttctttctttactttcgcgccctgaggagtcacgtgccaggagggaagcccctcccccatctcccccttcctcggggtcggtggcatggcgttgtgaggtgcatacctttgcgcatcatctcccaggcttgggcttcctttagggtaactggccgccgccatgttgcaaacgggaaggaaatgaatgaaccgccgttatgaaatcttgcttaggccttccttcttcctagcttgtgactaacctcattcctctcggctgggtggagtgtcctttatcctgtaggccaggtgatgcaaggcttccgtgctctcgagagagttctacctcacaatctgtctcaccttattagccttaaaagcccttgagccttattgtcctcgggcataatgcgtattctagattattctctgaaaatcaaagcggacttacagaggtccgcttgacctcccaaccccagaggtagttatggcgtagtgcagagccgtgggatggggagctgagtcatggtggttctgaaaagaaattttccaccacaaaatggctcctgtagtagcagccccttccatcccctgcacttcccatcacagcctcgcactgacccaggccctataggccaggatgtaaaggtcattaagaggattgggtgtccctgcgcctcagaatcctgcccttctccccgttccatcctccagaaaccagatctctccactccgccctgatctgaggttaaatttagccgtgtgacctttctggatctggggtctgagcgggctctccaccctgctccccctacacacatctgttgctccggctctcatttttgcccgagaagaacaggtgtttcgcgaacgagccctgggattagggttggaaaccccccacatgttttctcagtctttccccttagttcgagggacttggaggacacaggtgggcccgccctgtgctgctcacgctgacctttagccttgccctttgagcttgctgatgaatgagttcacaggtctgccctgtccagggggtg

SEQ ID NO: 31880 - DNA, 1375 bp, Mus musculus
ggatgcaagcccacatggggctcctatgagtggtccccaccctttttttgttcctttgtggtttgtttttggttttgaaatggtccccttgcctttcttttctagtctcaaggctacagcctctgacttctgtagactcagacaatgactttgtcacacctaagccgcgacgtaccaaacctggtcgtccacaaactcagcagcgcaagaagtcccagaggaaagccaaagttgtcttcttgagtgacgagtccagtgaggacggtatgatacaccctcccaacagatcagctgcctgtgtggggtcttccagtggggcttgcctagctgtggattcattcttcctggccatgtcttcctcactatgcagctcggctgactttcacagtgtgccgtgtgcgtgtgtgtttgtgtgtgtgtttgtgtgtgtgtgtgcacacgtgtgcgcgtgcgcacgcgcgcatgtgtttactttgagatccattttgccccatctttatgactcagcttttgttcctataattctttgaatagaactttcagcagagatgacagaagaagagacacccaagagaaccacccccatccgcagagcatctgggcgaagacacaggtcctaggagctgcctttgcctactcccgtccctgccgtgcagggtatcttactggatgatcttggattcagtgcccccccccccttgtagaagtgcttgttgtctgtggttttaacatggaaatggcctttgcattgaggtctttctcttagagccctgctgccactttccctttctccgagcctgtgccaattgctgttttctaatgaataaatgtttttatagacttttaagcatcctgtcctggctggtctgtcccatccttagccctgagctgtgtctggatcttcatggcccctgtggtgcctcatccttgcacaactgaaactctgctgtgcagaattatgcggtttctaggttcacgtgaacagttctcagcagtctggggtactttgcaccccagaaaacattcggtaatacctagagacttatttctgtttgccttgtggggcagggggctgcagtgaaagccttaagatgaaggccaccttcatgcacattgtgccccataacacagcatgtcaggagtacacaacttgagaaatgctgctctagacctaaggtttgtttcctctgtgcgccccaccccatcccccgaagactggcaaatgactcagcctggctaatggcagagattatgaaccccactcagttctataggtgacaaggtccatcgccccagagccagtccttcactacactaaggggtctgcaggaggtccagctgtaagccatgctgtgtgcccaccatccccaagccc

SEQ ID NO: 31881 - DNA, 2081 bp, Mus musculus
ttagcaaacttaaaaacttacaaaagagacctagtcattcccttctccattcagaaattctttctctttatggacttatttgtcattcctgtggacggttttataaatgatgtcttacggggagagagatggctcaagaggttaagcgcgcttgaagagaacctgagttcagatcccagaacatacatggtgtctcctaaccatctgtaactccaactccagggaaacccagtgtcctcttctggcctccgtgtgcagtgcacacatgtacgattgcatacatgccgggagagagactcataaaacaacaaaagtttaaagtctgtcttaaagcagggtgaagcggtgcacgcctttaatgcccgcccccgcctctctctctttcctcctgccactccctaatgccatctcttaagagacagaggcaggcagatctctgtgaatttgtggctagcccaatctacataaaagttttaggaaggactgggccatgtaagcacctgtctcaaaaaagaaaagtggtcacccaacatccctggcttctcttcctgcagactgcaagctctgaaactacaatggaggaagaactggggctggtggggggggccactgctgacgacacagaggcggagctcatccgaagcatctgtgagaaggagctgttggacggtaagaaagatcgctatgtgccctcccccagttgaatcaatctgtccctaacctggacatgttcttttgtcaggcaaccaggtactagctgcctttgttccactgctacttaaagtctgtaacaaccctggcttatacagcaacccagagctctgtgcggctgcgtcgctggcccttggcaagttctgcatgatcaggtaggcctagttggcttcatctcaaggaacatgagatggtacagccctcttgctttcctgatgggtctctctttgccctcagtgcccctttctgcgactcccagcttcgtcttctattcaccatgctggaaaagtcttcactccccactgtgcgatctaacctcatggttgccacaggggatctggctatccgcttccctaacctggtggatccctggactcctcatctgtatgcccggtaagagatccctgggccacctgagacccactaagagttcacgggctcctcccccacccgtggcactgacttcggtacctgctggctgttcaccctgtacaagcaggcccgaaatgggcactgggagctgaagcttccctctaaaatcttgcctacagatctcgtggtccctgactccagccttggagctgcttctaaactggcgtactgtggaacaatagatccttgttcttaaggccttcctattgttctcaaggtacaaacacgagttcttgatcttagtgactagagtttttattcctagcctccgagacccagctcaacaagtgcggaagacagcggggctggtgatgacgcacctgatcctgaaggacatggtgaaggtgaaggggcaggtgagcgagatggccgtgctgctcatcgaccctgtgcctcagatcgctgctctggccaagaatttcttcaatgagctctcccacaaggtgagagaagcagcttggggctttgtcggggagatggataggtcccacttctgccggctgctccccgcctcatctcatccttttcctcctacagggcaatgctatctataatctactccccgatatcatcagtcgcctgtcagacccagagggcggagtggaagaggagcccttccacaccatcatgaagtatggctctttagatctagagtagtgggggggggggcacacagacttaggatggatggatggatggatggatggatggatggatggatggaatgcaaagaatgaagaagaatgaacacagggtcttgcatgtgctaggcaagcactctgccgctgtcttcagctctagatggacattttagccgtactttctccacaagttacttgacctgtttgcccgtcttaaccgtatgaggttgacaggacttgctgcatagttgtggaggctcttacatagggtagggtgctgcttgagggtgagggtga

SEQ ID NO: 31882 - DNA, 1063 bp, Mus musculus
cctttccctagaggaaaaccagaaattgtagggagcaacttagacgccctggtgagggtggggctggatgagaagtctccccaggactacaggctggcccagcaggtgtgccttgccattgctaacatctcggacaggaggaaggtaggtcatggcgggtggctgtggctcagctgaggagagtgaagagcttcctgctggccttccgcaccctggcattctgttctcttctcctcagccttccctgggtgagcgtcaccctcccttccggctgcctcaggagcacaggttgtttgagcgacttcaggatatggtcacaaagggtaagctatccaggaggtgtaacgcaggtctgcttggtccctttcccagagagatcaccttctcctttctctctaggctttgcacacccagatcccctctggatcccattcaaagaagtagcagtgaccctgacctaccagttggcagagagccctgatgtgctctgtgcccagatgttgcaaggctgtgccaagcaagtcttggagaaacttgagaagaacgccactgaggcagaccccagtaagtgggcaggggcgtcattgctcaggggtggggtggacagccagcctctgtccaccccaaacctcggcccacggcatctcagtttgttcaggttgatgttgggccattctttgccgcgtctcaccttctccatgagtgaggagtgggtctggaagtttaatgggacttggctcttttccttctctcttctttagaggaaacagcccctaggctccccacattcctgctgatgaacctgctgtccctggctggggatgtggctctacagcagctggtgcatttggaacaagcagtgagtggagagctgggtcggcggcgagttctgcgagaggagcaggagcacagggccaaggagcccaaggagaaggtgcgtgagtggccaggggcacttccttctttccatgccctcagctccggacacacctttccagggacctctgcttctgtccttctgtaatgaagaatcggtctctctcccctgggaaggttagtgtca

SEQ ID NO: 31883 - DNA, 1190 bp, Mus musculus
tatgaagtgggaggattgggagttgaagggcagcctgggatacctagtgagttcatggccatctgacctcactgtaaaactgtttgtttacaacagttaagccataaaagtaacaaattattgaaagtctggtgcttccatccatagcaggttttacacaggtgtttgcagtaggtttttattttgctttggcttgtttttacatttacagcatttgtaaaggtcagaggacaattttggaaatcagttccctctctgtgggttctagcattgaagtcattaagccctgtggtaggcactctttcctactgagccatctggctagctctgggtttatgattttaaaagcttattcaagttctttgaggaccacagtaaaggctcaggggttttgtatttgactgcttagtaggaactgcttgtctttttaagcatgagacatgccttttctatagggtactgcatgtagggctggatgaagttgtcagatcccttacaaggccttcagggacatggctctagagctaaattggtgacaggctgctgctgttcttcttagacaggctattgttctcactcgggaagctaccagtcacttccaggagtctgaacccttcagtcacacagagccagaggagaacagcttcctgaatctcttgggactcatcttcaaaggtaatcctttcagtcagcaagcacagccttgggctgaaggagtggacacttgctctggaaggggagcagcccagtcagtcgtagggcacctttgcaaactagggaggtctgcaggaattgagaaaggaaccaaggtgcttcagagcacattgtaatttcatacattcacgttgttgaaagagatgtgcagggatgttggtagccactggactcccggtacacttgtgcaaaactgtcctgtacctctaattcctaggccccgaagcttccacacagggctctcatggggacacagacccagggctgacaggcagtaaagactctcccagtgtgcccgagccagagggatcccagagcaacgatgagctggtgaagcaggagatgctggtgcagtatctgcaggatgcctacggcttctcccagaagattacagaagccattggcatcatcagcaagatgatgtatgagaacacaactacaggtaggccgggtgctgatcggaacacagtcctgcc

SEQ ID NO: 31884 - DNA, 2022 bp, Mus musculus
tccgtcacctatggaaccactcagcaattgaagaagaatttgtcaggtggggagttaggacgcaacttgagcagatgatcttgagccgtgcaaaatgcggttctggtgctagataagccttttaaatccgtcatcccttagtgctgtttgcagtagtacataggagtgtctattacatgcatacatataatacatactgaatggaatgtgcgtttctctcttgtcccctcccccctttttgagagacaatgtctcactgcagccttggtcggcctggaagtctatgtagaccaaactgggtttgaactcacagaagttcacctgcctttgccttccaagtactgggattaaaggcatgtgccaccacaatgaaattctcatgttaatacccatacattcatgaagatgtgtttactgaaaatcccctaggtgaagctggtgcatggtgcacacctttaatcctagcacttgggaggcagaggcaagccaatctcttgagagtttgagactagcctggtcaacataaagacttctgggccatccagggctgtatagtggtgaggttctatctccaaataagtaaaggtcggggaggtagctgtcagtaaagcacctaccatgcaatcatgagggcttgagtttgatcctcagtactcacatcaaaagccaaatggagcgcagtgttaaggaggttgagacgggcagatgtctggatgcctggccggccagccccatatcccagctagaggccctgtctcaaaaaacaaggcaaacagctcctgagaaatgaaacccaaggttgacctctgatttccacatgcgcagacacacacacacactaaaaccaaagtgaaagtaaatggtcagttagctacagcagatgtaatttaaaggtctgtaaagatctaacttgccatttttaacaatgagaagtcttcgctaaccttgccttaccatcttcatcttatagtctggctttttgttgtcatggtaactggctgcaatttactaaatcctgaaggaaagaatccttggtgtagaatacgattagactgaaagagcggagaactagaaactttgagatggacatagtagggacaggattgagtaacggcagctgcctggtatctcgacttcagacagctcatttcttcctgttcattctttttttgtttagtttggttactggctgttgctaccgccttttggagaatcccaccattagtcaccagaagaaccgctccaccaaggaggccatagcacacctgcttggggtggccttggtccgctacaaccatatgctcagtgagttgccttccacttcgcttgctcgcttccgccccctgctctgcagctctccctgaatggctaacgttccatctcccaggtgccactgtgaagatcatccagatgttgcagcactttgagcacctgccccctgtgttggtgacagccgtgagtctgtgggcaacagactacgggatgaagagcatagtgggagagattgtaaggtaatcctcccagagtgtctgtgttcctggggcgttgggggagaaaggaagttaggggtcctttctccatgtgacgttggattccttcagccctgaagcctgttggcttcccttactgggaactcagtagctgagctttcttactgtatctgctttctcccctgcagagagattggacagaagtgtccacaggagctgagtcgagacacagcaggggcaaagggctttgcggctttcctcactgagctagcagagcgaatcccagctgtcctgatggccaacatgtgcattctgctagaccatctggatggagaggtagtctatctggggaagctcagatttgtagaggggttttagtgttgaaatcactctttctttcttcactttaatgtggttctgggaatcagcccaggaatttattcgtattaataataagcatgctctaaaagtcagaagtttttcctttcctttaaactttttttttttaaataaattttatgtgctggccagt

SEQ ID NO: 31885 - DNA, 1815 bp, Mus musculus
aagaactgatcaagggcccagtatggcttcgaggctggagaggaaatgaattgcagcgttgtgtccgaaagaagaaatttgtgggaaacaggatgttcattgaggacctgcataaccttaacaaacggatcagctatctctacaaacactttaaccgacatgggaagtacagataggacgggaaatgtgtcaccctggagaaggggaacaggacttatcccagcaaggagagagctttgtgtgctcgatgtaataaaaaaatggggctcctttggaatctgatatgcccagtgctacatttactcatgcactctgacgtctgcctcgttcctaagtcacatgatcttttgttactattacttacagcccagttatgcttgtggcctttataacaatcatttattgctggcactttctgacactggcacctcgtgtaagtttttaaagaatttatttttatttattttatcttatttttttgtaatcttggagctgaaacccagggacttgctcattctagggaactctgccactagccgcccaggcccttggaagtgtagctgctatttctaaagactctgccaccccaaaatgaactaggaaagtgaaattacactttgtactgctcttatcagttataagttagggaacttgtctgagtaccacagcatttcccatcctcttgaatagggcagttttgtggaggctgaccttgagtcatgcccagttttatgaagtgttaaagatcacacccagtattacccctgtgtgtgctaccctgtttgctttttttttttttttaggggaaaaaaatgtcatttaagaaagatattttagggctggtgagatggcactgactgctcttctgaaggtcctgagttcaaatcccagcagccacatggtggctcacaaccacccataatgagatctgacgccctcttctggtgcatctgaagtcagtcacagtgtacttatttttaataataaaaaagtctttgatcattggaccagagcaagtggagttgaccagagagagcaaggtcaactgaggcagcagaggtcctaaattcaattcccaacaaccacatgaagcctcacaaccatctgtacagctacagtgtactcacatacattaaataaatctttttttaaaaagaaagatattttaatacaggtttgagcatcagggctatgagagaggtgttcagaggtaaaacacttgagagcatgagtgtgggcttccctgagagactcttctatatggcatagtgctggcgtcttggatataccaagtactttatagtgagctatagaccctctgctgcactttgcttttgttagtatatattacaaaaataataggttttgctatgacattcttcatttacttcttttggttttttgagatagggttttctctatgtagccttggctatcctggaactcagtatgtagaccaggctagccttgaactcatggagataataccttagtgttggatctaaggcttaagccaccacattttccacaggtttttgaatttatgtttcaattgaaatcaattcagtgagaagtctggagatgacagaaaggtaatccagggaatttttcttgcattttttttttttttttaaacagtcttggggctggagagatgattccagccatctcccagggatgctcttgcaggttgcccaggttaattcccagctcacacatggtgactcaaggctgactatacttccagtttctgggcttcccatggagacaggcatgcacatgtgcacaggcatagctgcatgtattattgcatgt

SEQ ID NO: 31886 - DNA, 1199 bp, Mus musculus
tctttttaaaaagtcacagagtggagcaggccctcagtctctgccaagtgggatgcctggccagacgctggctgcatctgctaaccacctctgggtatcctggctgggtgcactgtcaatccctggcgcctcctctttgcaaatctgacacccagctgtccacagctctctgcctcaacgtccacggcaggtcaaccaagtcagctctgcctcgggctctcggaggtgggcctgactgatggctagccactgtctctgctgcccccctttcggccagcaagcgatcctaatccgcaatcccctctgagagccaggcttccgaagaaaggtggaggccgggttccgggcctgcagctctcacgtgctttcccggccaccccctcccgccctgcgtcgaggcggccaagcctgttcctcttccccccccccgtcgcgattgcgacaggccggcctctgctcccagggctccctgcccccgcccccggccggctcgctccactcccacttcctgagcccggcgctggagccctggaggccaggcccggccgctcccggcccccgggggcacgtcggcccagccgccaggcttgggaagtcgtggccaacgctgctcaggacgtccgggcttcccaccttcctcctaggactccacccggtctggtcagccgagccgaaaggccgccatgcgcctgccccgggcctcctctccctgcggcctggcctgggggccactcctgctgggactcagcgggcttctggtggcctctcagccccagctggtgagggaggggctaggtgggatggaccaggtttctctctagcccttctgccctccagagctgaccctgcctcattcttctctttctccgcctcctctggaaggtgcccccttatcgcatagaaaaccagacttgctgggaccaggacaaggaatactacgagcccatgcacgacgtctgctgctcccgctgtcccccaggtgagaacagtggctccaagtggcttgggtggtagaggtgagccagaatgagccagcactgctaaaactagccaggaaggagagtctacgaagcattagcattgtcccacggacactgagatttgaagaggtagcggcatgtagccatgaagacaggatggggacaaagagaccaaggagaggctccgaggcatgcagcaagcagaggcagcggacgcag

SEQ ID NO: 31887 - DNA, 1236 bp, Mus musculus
gctgtggctcagaggcagggcacttagctggaatgggcaaggccctgggtttcagtcccagcccagcaaagaaaagaggatggagagagtcctaatttgcatgctgtgttggaaacactgaagttaagacttaaagctgcatttttagggtctcaccctgaatattctctaaggaaatatctcggcagctgactgccggaatccgagtccctgccatccttcctgttatctggccttcatatctcctacaccagtatccttcctagaccttgctgttgccttgggcatttgtcttggcctgggtgatggtccttcccctcaggtcaggcagaccacgcccccttcctgtctttacagatcttcggcatgatcttcagcatgatcctgtgctgcgccatccgcaggagccgagaaatggtctagagtctgcccaaccccgagcaggaacaacggccctgaagactgtccgggccatttgggttttttttgccactaatattagtattcattatgcatttctaaataacagtcattctgtttgtctttttaatgctttattcattattgacatttgtagttgagggatccgggggttcaatttattttgatttttttttttggttgtttatttttgcttgttatgttaagcaaaaatcctgcaatgaaaggtactatatttgccagactctagacataagatattgtacataaagagaattttttttgcctttaaatagataaaagtatctatcagataaaaatcaggttgtaagttatattgaagacaatttgatacataataaaagattataacagtgtctcgggctgattgctggtattgctttctaaattagtttttagaactgcttgggtcaaaggtatttttcaggttttttttttttttttaaatctgttatcctgtctagccaggcatcattctctctgtagatcaggctgccctcaagttccaggcagccttccaatctcccaagtgctgatatcacccctgtgcaccagcccgcccacctctttcagctgtcttgtgttctttgggcagtagatgagaagtagactggaaggtaagtctcctcatctactagtaagggacccgaggcgtgatagattgggaaattctgatgacctacccgaggtcacagttttagtccacactaggatgagtccccagctcagcagtgtgtggtgtcttgggctctgctgagtctttgctatactcat

SEQ ID NO: 31888 - DNA, 1201 bp, Mus musculus
gggggatggtggggaacgttatacatgatttggttttgttgttgttctggggcccgtgaacttcaggaacggccccatattgatttgtttcccttggtttccaggtaacctctggtttgtcctgaatcccatgtttctgacatgagtgatttcctggaattgaatgggggaataatagaaggttttaaaaagtactgttagaaatcctaaattgccaggcgtgatggtgcacgcctttaatcccagcactgtggaggcagaggcaggcagatttctgagttcaaggccagcccggtctacaaagtgagttccaggacagccaaggttacacagagaaaccctgtctcgagaaaaaaaaaaaaaaaaagaaagaaagaaatcctaagtttagctgggtatagggacgtgtgactttaatcctagcattccagaggcagaggcaggtggatctcatggtctatagagtgagtttcaaggacagccaaggttacttatggataccctgtctcaaaaacagagataatttaagaaagaaaattactgaaataaccaaggtaatgccatctgacacacacacacacacacacacacacacacacacacacacactctagtcacatctatcttagcaaaacatttgaaatttccatgaccttgacaatggtccatatgtctaaaataaccattgtgttctgccaagaatgaccatttcaaggttactctgaccattctctattatctgtgtgggttttacctttaaaaacattgtacccctgagcttgggcaccgagagattctttagaggctcaagcccgctcttggtctggtcatcaatagaaaaaactaaaaacttttaattggcttaatcagcattgacattagtctatgtctcgcaggttattacaaaaagaaaacaacacaaaagaaactagcctagattcaagactggtgctgtgggaactggagagatggctccgtgactaagagcacttgctgctcttacaggggactcaagttaggtttccggcaaccacgcggtgtctcataaccacctataactcaagttcccagggatcccatgcctccttctgatctccaaaggcatcatgttgtaggcaaaacagtcttacacataaaataaatcttaaagactggggttgttgccaggcgtggtggcgcacgcctttaatcccagcactcc

SEQ ID NO: 31889 - DNA, 1194 bp, Mus musculus
cagtcgttcgtgcctcttgtcccacgcaactccagcttgtaccatgccggtcaaaggaggtagcaagtgcatcaaatacctgctcttcggatttaacttcatcttctgggtgagtgagaggcgactgtcggcgcgctcctctccgaggccacctgttctcaggcccgagacggcgtccggggcggagagtgtcccggcggccgagagcgccgggagccgctggtactgcgcgcgccaggcggactccgggcgagtagagaaaggcgcagcggctgccagctggccaggcgggactggcaggtgggcgggaggagcaagtgggtgggagagccgagggtcctggtggctccggctgtgcacttcgctcccgggtccttctaccgccgagtatttgagatgggctctgtgcctgctcccacccggagcacccccgagtgtgagagaggagtgagggaggagcggagcaaccttttcgagtaactcgatgccctccccggcccgcaaggctccttgccagcagggcagtcgagcgtctcccacttcggtggtcccacaagtgacaaggggtgctacggagggagaggaagtgggtgtggggagtcttccctgcacctggaggtcggacattccttgtttaggacctgaactctcaactgaaaacgtccatgcctctctctaagctacctgaaagactagattgtcttgattctttttcaagagcgataactatcttggctgtagagaactctgggagagttaagagaaaagaaggcggggaaggtgcctattggcgcctctagatgggataaatccggtgtttctgcatttcccaggtaatcaggtactgcgggcttgaagcctcgctctaaaaatgtccaggtggggccaaggggaatggccgttcacctgcagagggtccagaggcaggtgctagtagactctacagatgggcctctgggtagggcaacaagagagtgtccactctcccaaaactcagggacagaagcaaggaaatacacggaagacccttttgtcctgattctgagagggcacactcccaaacacaaatggacggaatttgctcccaggcaatcaggaaagagcttaactaggcaactcctgtgccaccagagactttgaacaacaacaactaaaaagtccactattccctttggagctggccaccgggatgct

SEQ ID NO: 31890 - DNA, 1578 bp, Mus musculus
tattaacaattttgtttgcttggattttttggcaacaaggtttgaccctaagacctcgtggcctcctcagtttaagagagcacccaggcctgagcactgaaacatgtaacacaaatgccttggcaagtttgtctttgtctttatatgtgtgttttgctccacagccagaaaagttgaagactttgaaggtgtcggagttggggttttcagattaggatgctttgcctgcctgtgcttttcctgattgtcagtgtgggtctttcttctgatctgttgcagctcatgatgggctctgtagagccggacctaaccctttgcttgcctttggtttctcctgcagctgcctctgggagcaggaactctagcagcaatgcattggcaggaacacctgccaagtccccgagtcagagcctgcgtctgggcctctcccgattagcgccagttaagcgcttgcatccaagtgccacaagcagccaagtgcggtagcaggaaaggactgctgggacccttgggactgcaagcagggttgtcatattcagcttccacataagagaacctttaatgggtcacatgaaggaccatgtctgtgtgtgattctggtctcatcaaagcctttctgtccttcagcaaagggttctgggacctctccttgtggcactcctgaagagtgtgttgtgttttcttgtgtttataagccactgtcactcgggctctgcggcacgtctgtaatcacatgtctcccagctctggcatgggagcatcctgggtccttcaggaggcattgctgaaatctttcccatactacatttcttcaggtttattccaagcttactctctttgtctaggtctttttagtaagaattctgcttttgtacatattaacatgttgactctactgcagcatgtgttcctacatgggacaggtggttagtgtacagcagatagaatctcatgacgctgtatgaacttttcaaaacctttaataaacatgaaaagatgtaagctatgctcattgataccatgtatgtacctgcatgtgtacgtgttgctaaaatgagtcttctgtggtcaaaataagcagggggaggagtgtcttcatcattgagatgaagcccaaggttgaaagctgtcacctccacgcccctgtcacagctgatgcatcgtctcaggaagctctggtttactgtcagtaaaagcaattatttttatagtaagaaatcaacttgtttctgattactttaataaagtctaatgtttactgtaaaatgtgcatgcctcgcctagttctcagctatgagacatctgtgttaccgtgaggacaagcagctttgatttaagtgaccattgcttttgtacatcttcttactcatatatatgcttacactgtattctccaccttacctgctccaccgtccttaaaatcccaatcttcagttagcaatctgcgtgattttggttctgatttttgagacagggcttcctatgtagcccaggctgtccttgaacctaccatccttccttctgccacggcctccctagtggtggtgggtgctgtgacacccacctagttacctggtt

SEQ ID NO: 31891 - DNA, 1345 bp, Mus musculus
gtctgtgttaatacgtgttagtgcttcaatgatcaccttcctgcttttagacaatggctgcttaggatgcatctgaagtcctttccttcctgtgttaggcactgacaaacaaggcaaagagaaaacagaaaatacgggtaaacctcctcatgtctctaactgcagtgtagccagtgatgatgtaggtaagttttgatattaataacagttttcattcacactgctatttttctcacttaagtttttatactcatagctagaacagccttccttgttaacagtcttcctatgataaggctctctctcatctcctggcctttgtttctttaagctttcgttttgttctctgactgaggacctgctgtcttccacactaggcagtcatgactactcaagcccttcatcccacagtaggtgcccacttaagagagggctgcatcttcccaggaacatctgggaaattctttggcaatgactcactggggtctcagacttacccttaaaaccagagtctgttcctgggagactaatggactctgtcccagcatggcctggtagtgtgttactaggcgcaaaggagggcagcagaggtcctagagtctgcctggagttctcagtggtgttcgtgtctccagaagatttggacaagatcacagaggagggggacgcctcgagtgttgaaggggagaggaagtcaccatctcaagccaaggctccgcggaggagagcaccttctgaaggcagcgatggcagcagtgctaacgacacggagtcggagagcgccactggtgagttgtagcccgcttcaagttaattctacgggaattcagtaagacttcttggagaccaggatgcatacaaggcactgtactgagcctttgaagaactcatagaacagttaaattgaacttggccacatagagagaagctgtctaggggtaacctttaagccatatctggacaaacagcattagaaaacaaaaagaagcaagtcacatttctgactgagggaaaggtgtgtgcactgaaacagactagcacgtgcgagaacttaaggaagttaagactggagagccaggctgggttccactagccatggaacaactcttgacctgttccaacaggcttcagctttttatataactagtagaaacatatgaagtattttgagttgaaagtaatatgaaactattttattatcagttgttttcagacttaatagaaatgagggcaaagggaaaatatggtgaccttgacaaaattgtaatgtgttaaaaatttaaaagaataagtctgtacattaataccaatcagatacggtgttttagattttaccatgctgtca

SEQ ID NO: 31892 - DNA, 1235 bp, Mus musculus
cttcatcatagactgtgaggaagcacgccagccatcgattcagtgcgtttgtatgaacctccaggagcacctgaacggagtgactgagaagcagcactgagtgtggagcccgtgcagtggagcctctgaagggagggacttggcctctgctgctgccattttagaagcagcggagaattcatgtgttgaagccccactggggttgtggctgtgtcagacgttagtggggaatccactcacagccagcctggcttttcctgtcattttctacactgatttttgtcactctgtcccattatgtctctgatctgttaacttatgaggacattgaggcttgcacatccggggatgagcagccttctttccacacacttccttttccttggcccttgtgatgtctaggtggtgttggcttttgaagataattgtatgatttcacactcgctcaccaagtgcttgcaagaaagaatggtttcagtaatacgctgcgtatttgcagtgatccaaagtgttcagagtgaagcttcagatcagtgttcaaggtaaagtgaccgaacactctagtgtcctggagaaactagctcttgggatttattattattattattattattattattattattattattattgcctcagaatacagcagagggactgaaggggtgggtgggcagttaagagtacttcctgttactcagaactccagttcagatcccgttacccatgttggggagctcacagctgcctggaactccagcattggagagccagtgccccctctgtgcctctgcagacacttggcacacatacacacaaataaaagtgatgaaagcagcctcgggggaagaaaggaatgcaccacttgatcaaaacacactaagaatcccctgagcagaaggaaaaaggagctctccaggcaaacagggtgggtgaggggttgctcaaattgtcctctgctttgtatctggcttgccagttgatctaaagaagaggtgctgaaaactgctatctagaaggcacagatgaagaaccttccctctaggtggccctgtaggaaagggattttgattgctgctcgggagtccttaattgggaaaccggattgaactgctgaaatgccagctcacaccacagcctcagggaaaggaattacatggggaaactgtaatcataacagcgggcccagataggcatcaaacaaacttaaacctagaaaaaggaaggaatatgtc

SEQ ID NO: 31893 - DNA, 1627 bp, Mus musculus
gatttggcttttaatttatcctgcagttgactttgataaatattgaagtccacggatcccagacagtgatggagggatgacactagtccacaagacccactgcagaaaaattgtgaaacctattttttcaggggtggtgccgcaaacctccaaccatagcatgaagaagaggatgaaggagaggaacaggagagtcaccagctgaaggacaaactggattacccagcaacacccctgtcttacatacacatgtgtgtgcatgcatgcagttctcatctctgttggaagggaccttccaggccccctcagcagctctgaacatccatctaaggaactccttccaggtgctcctgtgttgccctggctgcaaaccaaggtcgttacagataatgtgaaagactggagcaaggtggtcctggcctatgaacctttgtgggccattggaactggcaagacggcaacccctcagcaggcacaggaagtacacgagaagctccggagatggctgaaatccaatgtcaatgatggggtggctcagagcacccggatcatttatggaggttctatgactggagcaacctgcaaagagctggcaagccagcctgacgtggacggcttccttgtgggtggcgcatctctcaagcctgaatttgtggacatcatcaatgccaaacaatgagcactgcccatccctctacctgcctgcatagcatggactaggttgcccagaagttgagtaactgctcccaccggtcacatgcttctgatgacatcatctgccccatcttgtgtcctaatccacggtgtaccctcctgagccgtttccacctccctattatggttgggaccaggccaatccctttaccacttacagtgggtagaatcaactgtcaccaaggtggatcctggggaggggagggagtagaactgactgtccctttgggccctgacaagtgaaatcaccttccattggtttgagctggaaactcatggttggagcacaggaagtgggcttcgtgtcactttggcctgtcacttagatggccttggctctagcttcactcccaagttctactggatgtctgatgcagaaattcagagctttcaggtctgaattcggtatacatgagacccaaagaggcctgggatagtcccctcccccacggtgccgaagcccctgtattgtgtttgtgaaccaccctacatgtaaggaaaataaacacctgggcctgaaaaaaaaataacaagcctctgattaagccccacagagtgactggttcagatgacgggtctccaacctagagttcaagtcccaactctctagctgtgtgacctacttcttcccctgtagaagtgagatcaagaggtggcttaccaagagagggtcttagttcttaatcagaatggctcctccaaatatccccagtgtgaagctgaaacaagacacagcaaatctcaagaaggagggggagggggaggaggaggaggaggaggaggaggaccaccacgacgacgacgatgacaacaacaacaacaacaacaacagaaaacagactaaacactcttcccaaagccatggaaacagagaggggttgaaacaaaccttagcgttaggcacgatggtaca

SEQ ID NO: 31894 - DNA, 1147 bp, Mus musculus
caacatactcttgcatgcttgtgtatacacacacacacacacacacacttaaaacctttaaaagaagttgtcccattaaacagtaatgtctcaaattctaggtctgtggaacaggctctgcaccggcagagtttacgacaatttgacacaagctaaagtcattttagaagggggaacctctactgagaaatgcccccactagttaggcctgtgatgcattttctcgactgattattgatgtgagagggcccagctcgctatgattggtgccatcctgggtagtgtaagaaagcaggctgaagtggagcgagcgagttgagcagttgtctggtcacgtctcaaaaacccgtagcccttgcagtatggctgaacaactgactgaagagcagattgcagagttcaaagtagctttctcactatttgacaaggatggggatgggacaataacaacaaaggagctggagacagtgatgaggtccctggggcagaaccccacagaagcagagctgcaggacatgatcaatgaagtagatgcggatggtaatggcacaattgatttccctgaatttctgacaatgatggcaagaaaaatgaaagacacagacagtgaagaagaaattagagaagcattccgtgtgtttgataaggatgacaatggctatattagtgcagcagagtttcgccatgtgatgacaaaccttggagagaagttaacagatgaagaggtcgatgagatgatcagggaagcagacattgacggggacggtcaggtgaactatgaagagtttgtacaaataataacagtgaagtcaagacactgtacagaatgtgttaaatttcttgtacaaaattgtttatttgccttttctttgtttgtaacttatctgtaaaaggttccctcccctactgtaaaaaaaagatgcatgtatagtaattaggacttcattcctccatgttttcttcccttatcttactgtcattgtccttaaaccttattttagaaaattgatcaagtaacatgttgcatgtggcttactctggatatatctaacttagatggagttggtccaatgagggaacatctgggttatgccttttttaaagtagcttttaggaactgtcagcatgttgttgttgaagtgtggag

SEQ ID NO: 31895 - DNA, 3395 bp, Mus musculus
gtcttctgcacacatggttcaaagggactgaggtccactcacctgtgtgcagtcccaggctaggtctccagggtggcctcccagacagtatttcctttgttttctggctcatttcccagcacaccaggttatgcacactttacagtaggttctctagggcagtcccaagcgatgaaacggaggactgaccccaggccacaagagcatccctttaaagtcccctccttctcttccagatcctgggaatggccttttccatgacactgttccagcacatccaccggacaggtaaaaagtacgacgcctgaggctgcggcagcgcctggctccacccggacactgcgtgtgccagggaagaggacccgagtcatgtctcctgcctgctctccgatggccaccctgcaccacctgccggcctgccctcccctgcccacatccttggccttagacctcatggagggcagaggcccagggatgaggcatcatgcagagacctcagggcttgggcaactggattcctgcacctgcagacttgccaaagatgccggggcgggcagggtgtcagcgaggaagccccttcaacgatgggtgtctgcccctggccttcctcacactgacacttgttcctatgtggggtggagagtctgccccatggaggccactgccgtccatggctgcccagccagagagcctgccagggtgcagtgtggcaccgccaggtcaggccccctggagcaccctgcccgggtttttatactatagtgtaacttttttttttattttactctgattatgattattcaggaatattatctctcagataagtttagggttagctctctgatttataactttttactgtgttgatttccataatggtttgagtttccttttcctgtgggtggggatgggtagagagagaggacctccgtccacgttcagtcaggacacaccactgtgcaacactcacgaggctggaggtagggtgagaagtgccagccgtttttccaggactcaccttgagggagagggtgaggccatgatacggggccctgccaggcctggagaccatggatgaaggccagaagaggctggtggcatacacagcatgggccatgctactctggggtgagaggatgctgcctgaaccagggagccacatcagcagggcatgcttaggtcaggggacagtgaaacgctttgccgggaggagtggcagtcagaacactgtggcatttcctcttcctccctcggtcctccgtgggctttgacccgcgagcatcctgcatcccgaatggtcactctcacacattcctgctgctgcaaattcctctggttcagaccccgctctcctcaccctgatccggagagtggaagcagacatgttcctctgcccagactgaaacagagtctcaggacaacccaggaagggaggcagaccccaccagactcactcagttgcttactgccctgctgaggggaaaggaaagggccatgtgggtctcaggaccattcctccttaggatccattgctgtccacactggggggcagacactgtagcccatgtaacctcaaagacaagatacagaaactctgagaagtcaggcttccactgcccccacagcattggggagaagacccttgttagatgcccagtgctaggccaagcagtcttgccaacactgatacccaacacatgtccttccgtaaagacaggggcctgtggaactgactgagcacctatctgggatccagatcctcactctctctcgggccttcacgtggtagctgcttttctcgtgctatttggctctttacgctgtttcccaccaggccaggtgttctctggtctagcaatgacatccaaccaacctaaaacccctctgaccaccttgaataacagtgatgaccaggatgtggaactttcagtacgttcaggattcaagttttgggggtgagagaggatagcggggagctctcggcagattggtcccacaagttgccagttccaggagatggaattgtggtgttattggaggaatgacagctatcttcccccaaggtgcagagttcaggtagaaacaaacagaaagcaagcatggcgcctgctgcattatgagtgtggatgggtagggtgggtttgtttatgcctatctatgggtgtttaaaccttcattaacttcaacattgaggtcccactaccctaggaggcacttcgcctccctgcctcgtcacatctgtagagtgcttcagggtggtgctggttcctggagccttagctgaagtcctccctcctcaccaacctcacctcacctgtctgttcagcagagccagatcataagtcccaaactgccttttttgttttagctgtgtgtggttgcatagtcatctgcagagtcttcacggcacagaggtctccatgcacagagtggatgtcctgagaccctcacttatcgtggggcaatggccctcacatgctagaagaccacaccgagtaaggctaggggagatggctcagctcttctctgacactcttgggtctgagttcactgaggtcctgccatgaaatctcccttacctgcggcctcccttgcctaaggcagagccgtttccttcaggtaccacacaagcaatttgcagacctgactcagaaagtcctcttggtttgcaggtgacctcaaggaaatgcctggcgcagcctctggcatttctccacagccagctgcctcagtggggctcagagggtagggtctggacaggtgtctggtgcaggtctccttgcgcctctgtactctgcgctggcacattgtcatcctgtctccgccagcctggaccagcacctcagctgtcccccttgcacatgctctggcctgacttaagagttaagtggtcaagcccccagctcacttcaggtggatggaattggttgtcccctcctctctggacccctgcccaccctctggtggaggtgctaactagcagggacatggcacaggacagggagctgggtgccagatgcttggggtctgttctttgccccacggcccctggcatcccttctcatgttcccgttctctcatctccctcccctcctccatgatggtggcattctggcctcaccttcctgagtgggcattctgaggggagaggcctttgggcctccacttgccttgctgtcccttggtggccagagagccaggagtgcacgctattggtttcgaatgcactttctgcttgcaatgccttgtctgcatttccttcatcccaggtcccgctttaacgaacaccatgtttttagcatgtttttaaataaaaactgatcatgtgtcaaaagcacaaccagactgttatttagtggtgtgttttctccctggagccatggccaagatggagg

SEQ ID NO: 31896 - DNA, 1189 bp, Mus musculus
tctctctgggtcagactttcagactgtatgtgaagggtaacaaagacacctctccccgaggtctgcttgatcgtatgctagcttggctccttgtactcacccagtctccatgtggcctgtacttaagtgaccctggctgggtggtatgctctctggcctaccgctcatcttccttgagctctgtatcgtcacagtagattatatatttgcaggcaaagccacaaacagtctaaaggcaggagccagcatagtagggttctgagagctcatacccagatttcaggctgctgtttttttttatcctagtctctgtggtgatgggagctttttaaaataaggtcagttaatcccattcctgaaggctccaccttcacgggcttgtcaccctcccttcttacacagtcacattggggttaagatttcaatccatgaattttgagagggaaacaaattcagctggaagcctggtctatgtatgtgagcccatgcatgtgtgttatatatttgcttgggtataaaacagttgacactgtcacaatctatgcatctacgtgtaaatgtaaatctctctaagttacatgcttcttgcagtttactctctgagtgtgtgtgtgtgtgtgtgtgtgtgtgtgtgtgtggcataaactgccattttccaagcatctgcttctatcggtggatctagatgagcaaaagctctcagactgaagcagcatgccccctcctcaggaaaacacccctgtattgaacccgctaagaacaaatctcggcggtgctgttccgcacccagggtgcagtgcagggcatttggtttttctggcccagcaacttcagttttggggatcagcacctcattctcctctctaggcaccttcctcagcgtgtgaaagggtgcagcagttcacaggcccggaaggagagctgagccataggccatggtgggctggaccacggcggccttggatacctgagtatcaggtactgatgggccgacccctggcactggataggtgtgttcttattgtgtttccttgtcaggagtcagcctcccaggagagggtctggtacggccgtgtgctcagccctggcactcgagcagagtgccttggttggacgagaccttccacgatgggatgatgctgagttctccaatggagattgatggtatggacaccaagaaacgggtgag

SEQ ID NO: 31897 - DNA, 1190 bp, Mus musculus
gtctgagacaagtcttctgtagtccaatctgctctcagacttactatatagctgaggagagacttgaactcctgctccttctgcctgcatctcctctggactaggaccgggtacattatggaagccagcttgagtaattcaggatttttttctatgtgctttcctgtctgatgccattgatgactatgggagagattgagctagcttccacccacagggaacatggagtctcagatgcctacgtgttcagcccattcatcaaccttgatgcagagctgagaacacagataagggatccacggtggcacggtggggactgtgacgaaccaaagatgctgtgcatgcgcaccgtgagcgtgatcttcaggctcagctgattgtttgttgagcccggcgttgccagaacttacatttctttttctccctctctgggtcatggtcttcttgctctgtagcagaatgcccagacctgtagaacacaattgcaaatatttggctatgcaaaagaggagctaagtgcttaaagtccaaatgggaaacatgattcttttgtttaaaataactacttccaagcagagctccattcctgccggcatctgggctccaggtctgcgtagcaggagcggccgccactgtggaccctgagcgaggtgctgattctctttgtccttgacctcaggggttggggtccccatggtcagacatgaacatggtgaagtttcctttctagagtcttccccagtcctctgctgacatgacacggtcggcaagcacctttggaattccccagaggtcaagggtctggatctgttgaggaacctttatgcttcttttcttcctgggatcttctgatattcttttctctgcctctctcttttctctttcttttctttttctttctctttctctttttctcttcctttttctttttctcttcctttattttatttatttgtttattattcttttgaggcagggtttattggctgtcttggaactcactctgtagaccaggctggtcttggactcacaaaaaattcacctgcctcttctacctaagtgttgcaattgaagatgtgcaccacgactttcccaggaaccttccgttgttaaagggaagctttaactcttggtttccaggttaaaaatctcttagcctgattctaaacaattgacatttaaaaggcatg

SEQ ID NO: 31898 - DNA, 1156 bp, Mus musculus
tttatttgagaaccagcaggagctttggttaggtggtcctagcttcagggcttacaatgagagtggctattactcaaatcatatccattgatcccctacctgaaagcctatgttcacattaattcacagggtgaagaacctgcttagtaatacacaaggagcagtctgatggagagcttcactcatggcatcccagtccgtggcttcacccatcacatctttgtctggcctgtaggttatcgtcaacagaggcttgcttgcaggagacttgctggggatttcacacaccttttaggtattaaccaagcagcctggagttcaacacccaatctaaaagctgtggacagaaagaggaaagaaatgagtatggttatcagggacttggaagccctgcagtgacaaaatacggagcaaaacaagtgcccaaagtatgaagcaaaagtgcaccaccaggagcgaactgactgatcctgtggtgccagtgatcccattgtaccttgcatttttcaaatgaactgaagtgtctgaatgagctggcagagctgagaaggatgcacccgagtgcccagtggactcagccaggaacatcaccagatgttggggatccacacccaagggtccctatgcttccactctaaccggggctggtgctgttggttacactgcttcaagcaatctggagcagaggtggaaggtccaacctgggagggtttgtgtgtgcccagctcgaacgaggtattctgtgggaaagcagacgtgagcagggcagcagaggtggtggtgcagggaagaggtgagcagcactctggagtcagtccacactaactcagtgcacagccttagggcaacacacttattttgcactgtacctcagtttcctgcctgtaaagtaggtatcaagttatcaaccctatttatgagcaatgctttacagtgctgagcacatcctccagttcccaaatacatgcattggcatgaactgacttgaatggaggggacaggctagtgaactatgcagtaaggttgtgaggtccccacaacaattggcctccacagatgggagagataagactatgaaagacatggaagaggtctcccttgaaagatgagaaatatttattgatgttatttcttcattttgaggagctaggagttg

SEQ ID NO: 31899 - DNA, 1159 bp, Mus musculus
aaataacatgaaccaagataattagggatctcctggggcagcagaactgtagggtaagaaactaggaaggctgagaaaccattggtccttctattctggagaattataagtggcctgccatgcacatatcctacactcccccaccaaggaagttatggtgttggtgctgtgtctcctactttatccatatagcttgctgcctaagtattttattttgaccacagccaacagatcactgaatgggaaaggtgccatctgcctctacaggacactctgtagtactacttagctgtcctattgcagcagataagaaatagcagaaatagcctcaggaaaactctagaagaactttctctggtttctcctactcagcagtttttgtaggaattttctagattagagggtattcttcctgttttcctcaaatgttttcattttcttcatcagttgctagtggccacttcaggccagtgtacctgtctctgataactttggagctgaccataccaaggccatcttgggagacctatgtgatcaggggaaggtgattccttaatccatgtcctcttggggctgagggcacttggttgggaatctagtgatagctagaaatgtctgggaagctcagggatcatttctatactggttaggaatgcaaataccacaaagctgagttattgagaattacctgggctgagcagagagtgtagggtgagaagcagggaaggctggaaatccctgtatggttcacatggccagtatttactgaagtttcatggcaaccagtgcatatgcagggaaaggatgcacgttggcctaaggactatggtggtggaaggcaaagcaggaagcacccactcttgctctcaggatcttgccactgttctcagtacctctcaggatccaaaacattgcttccttgaagaatatcttgcaataaatctgagccagattgagactctatgtggctaagaccacaggctagtagatagaagcactaggcctcagaacatagttgggcaacactgaaatttgtttacccctgttccacctgcagtgatcacagcagggacatgaaggaagccttgcagtacattgcatgcacgcatggacacattcagaaggactggctctgtgagagcttctctcaggaggcttc

SEQ ID NO: 31900 - DNA, 1416 bp, Mus musculus
aggctaaaggcaaaagagagtgaaccaggcatgaccagtgtcattgggtctgtgagatgaccaagagtccccagagtcctggggatagagagccctccatcttgggagtggaaaccttatggtgtgttatctagttagcaggaaatgttagagacaggtgaaaatgtagggacaggtgaaaggtctgttgcctcacagggtctgacactgatggagcagattgtgtcaacaatgtgtcacaggaatggaaagaatgtgccctgagtccacctccccaccccaccccaccccaaaaaaaccccataaaaccaaaaatcaaataaatgaataaacacacacacacacacacacacacacacacacacacacacacagagagagagagagagagagagagagagagagagagagagagagcttgtctatgtatatgtgtaagtggctgtgtcctagtcctcttccataggccttgtgtccctagtctatgcacactcagtctttcccaggctgggggttgagtcagatggcagaggttggaggactgagggaaggcagtgactgtgggccagtataacacctctctggccaccaggccagaacagtgggagctgcctccagggttgctacccaggggccacctgggtctgacccctgctgaaaacctgctagagctatggttgcagggttcggtggcaccttggacaacctatctaacagatcagaaggaaaactacctttccccccaaagacttgactgtgtagaatgtagctaactaatatgcccagccaggcacctggctgcacagctataattccctctgccccccaactcccaggagaagaacgagatcatcatggactacacagtgaagcctaatctctgaaataaatttctttaaaaagtgtctggaacttggcttttgtacatacacttagtgaattagaaagggcacaggtatgtgtgtgccttcctagagagccagagcccaggccacgggaatggtggcttttattattattttttttttacactcacagatgtctaatattcaattttaaggtttttgtaattttttttctatgtaagcccccttcatctcttcaaatcctcagtaaagtctgctacaaacacagatatctgcgctcgtgtgatttctttgtacagaaatggagttctgtgcctgttacggagcacccagaccaggagtgcccatagggcaggtgcacactggagcacacagaccagcggtgcgcacagggcaggtgagcactgggacagggcctgctgagcagagcctatgggaacaggacccgaactcagtgctgaaggagttagaatactcttgaaaagggcgtcctaggaggctggctgtggttccacagcactactgggcatcttactcagctcaactgctc

SEQ ID NO: 31901 - DNA, 1123 bp, Mus musculus
agccgcccagtctttctgtagccccaaattccttctccttaactcagagcaatttaacccatatgctgctccctaccgtgttaggatggtggctagacccaggcctcctcccttcctactgcactatgtaaaggtcctgctatcaaacagggccagggtcccagaaagactactgcatccctgaccttgtgaccaggattcaccagtccacgtgcaggcctatgtttgcagcccttccctcccccccaccccccaacatcctagccctggcctcctcccctgcttatgccgcccaggagcagagctcctgcaagccccagcctcagacatttcagacttcgatgtatgtagtcagcctttttggaacatgaagggtataaccttttcctattggaagcaggtccgttcagatgttcggtcccagtgtgggtcctaagtttttcctgtgttaactgacctcagtggcctaatggaaagtcaccatataagactgtcttactgcctctccattcaagttaacatggcacttgacttagggaacctcacttatcctgccaagctggtactgtgctgaaaccatttgtcttttttaggtgagatcttcctctcttgcctgggctattgattccagtgatcctcctgcctcagcttcctgggactacaggtgttcctcactgtgccctgctttcctattttaaagactgaaaaaacaaggcccagagagctttgggaagttgcttaggttgttggttgtatttttttcatttgttttgtgagtggttgtttgacttctgaggtgtggcagactctgggaatgcgtccatgatcagaatagacagggtggctaggagtttactttggactgaggggagggcagtgactggaaaccagttaaggagacttgtaggtagtgggaagtgctgggtgtgtgtgtgtgtgtgtgtgtgtgtgtgtgtgtgtgtgtgtgtgtgtgtacccaaggtcagcttcactttaagggaggctgttgaggtctgacctctgcactgaccactgtagagaagacaagtggatcggaaggaacattccgagggagaatggagaggcctggagacagggaggggatgggtgtgccccaggggtg

SEQ ID NO: 31902 - DNA, 1209 bp, Mus musculus
gttgtggcccctcaggctttcctggcagccctggtgcctgctcactgcttccttcatccccatacagagcctctctgagttgggtccagacctcatgtccctgtcctcttttctgttctcttccctctgtccatgctgatgcggtctgcactcagatccacccaattcttgcctggaatactgcagtctcctcttcactggctccctgtgattcccaaagctatgcttctctggccatgctattcccagcctttaagatgcttctaggcagcgtggttcctgttggtgagctctgagctctgcagtggatctgcctgactcctgagcctcagcctcctgtgctccctgctcggcctctgggctgtggccgctgctcctgggccatggatcctctcacctgcccccacccaggttaggtgcccactgtttgcccacccagggctctgcagacctctgtctagccgaggtagtcttctttgccgttcctgtttgttctaggccagctgtatctgcgtatccttgtgggtcctcacactctgcacaccttcctgggtgccctggggctaaaggaaggaaggaaaggatcaatggatgccctcagcatgggctggtgtgttcagcatggctggcttctctcctggactgttctttcttggtctcctctgccttttgtttaccctgggctaagtccacggcttctgtccaggatgctagaggccacgaggctcacagaagaaaaatctggatcctgaagaccttgcctctaccctgtctccctctgtcccatcccttttccacaaggaagaaggaatgaaaaactgcccagctcagcagcagggagcttgcctagattgctatctgcatcagaaccacagctcccatcttaaatggaataagggatagtttactctggagccattaggattgagcatggcctgggaacacggatttaggctaccccaaactccatgtcccaacgtggaaatggactcacacatgaatcaagacaactttaaaatacactggtggctacaccagagaggcaggcacaatgagatacagggagctattctacaggtctaagatgctctgtgctgacgcccttggcttttagagtggcagaaactagtgttctgctaagttaacagctttgagaggtggctatttattgccacgtggtattagttcagatacagagtgaggtaagga

SEQ ID NO: 31903 - DNA, 1235 bp, Mus musculus
acttcaaggacagcataggatctataagacccggtctcaggaaaccctaatgaggggctgaagtcagcccttgagagcactgactgcccttccaaaggtcctgagttcaaatcccagcaaccacatggtggctcacaaccatccataatgagatctgacgccctcttctggagtgtctgaagtcagctacagtgaacttaacatataataataaaaaataaatctttgggccagagcagaagtcctgacttcaattcccaaaaagaaaagaaaaagagaaagagggccgagcaggaggcgccatcatgggtgttgacattcgccacaacaaggaccgaaaggttcggcgcaaggagcccaagagccaggacatgtacctgcggctgcttgtcaagctgtacaggtttctggccagacggaccaactccaccttcaatcaggttgtgttgaagaggttgttcatgagccgaaccaaccggccacctctgtccctgtcccgcatgatccgaaagatgaagcttcctggccgcgagaacaagactgctgtggttgtggggacggtcacagatgatgtgcggattctggaagttcccaagctgaaggtgtgtgcactgcgggtgagcagccgggcccggagtcgcatcctcaaggctgggggtaagatcctcacctttgaccagctggccctggagtctcccaagggccggggcactgtgctcctgtctggtcctcggaagggccgagaggtataccgacattttggcaaggccccaggaaccccacacagccataccaaaccctatgtccgttccaagggccggaagtttgagcgcgccagaggccgaagggccagcagaggctacaaaaactaaccctggatcttaactgttaataaaaaaaagcattggaaaaaagaaaaaagaaaaaaagaaaaagagaaagaaagtgaaagagaaagagaaggagaaagagaaggagaaagagaaagagaaaagaaaaccataatgagtatgtaaataaataaattgggttaaaagggaaagaaaaacctaaggaaaataaaaccagaaactgtatataatatccccctttctagatcagtatgttgcctacacagtataagaaagaactttttttttttttttttttttaaatttcaagacaggctctccctttgtagcctgagcagtaaactcatgagtgtcctgcctcagtcttcccagtgttagagaaac

SEQ ID NO: 31904 - DNA, 2345 bp, Mus musculus
ctggactataactacccactgtgcgcacttcaagccttcgccatcgggctgtccagctttgacagcaagctggcgtgtgaatgagaagcagcaagcaggggatttcttcaccacagagccttcaagagcagaaagctgctgcctctgcccctgcccctgcccctgcccctgcccctgcccctgcccctgcccctgcccctgcccctgcccctgcccctgcccctgccctagcacaagaagagcaacattctgcccctctggtgaatgatccagtgtgtgtgtgtgtgtgaatgtgcatgtgtgtgtttgtttatacatgcatacacattcacacatggatgcatgcttccacgtactcgttcatgccttctctgaacttcagagacctggtcatagattacaacttctcatgtgtgagagatggcttaaagcacagggaagtagacacccaggcacactggtgtctcctgatcgcacaacagactctgtgtggtgagtgtagctttcatgtgctcgggcacttccaacagaatcaggttctaatgatttaatacttgggcctcctgttttgaaggccctttcaaaagggggcttttcccttggatgcctttagcccaggagcctgcagccttcctcagccaatggtctgatagtgtctcttgcactgaccccagtcaggtcctttagcacaaaacagccataactagttggtgcacaaagagtgtagctgtgtcccaataaaactttatttacaaagtgggcattggcctagtttggcctgtgactctggttcgcaggcctgccttggctgtgtccctgtcctccaaggctggagcatcttccaggctagatgtggagaggcggggggtggtttacttttcagtagcagcagactgacattttatttttatttttactttatttttttttcccatggatctctgtgtagccctggctatcctggaacttattctgtagaccaggctggcctcagagatccacctgcctctgccccccaagtgctggaattaaaggcttacactactgtgcctggccatagacagactcttaagaggaattcttgccgaatctactcttggtagcttttgcctcatggagattatggctgcagagtgtcatatatcatcttgggacatgtgacactagtttgttcgtgggtctgaaaggctctgctgtccccagcctgcctcttgcttattctcagagtaggttggtgggcagccatctcagaagcatgactgtggccagatcttcggaatctttgctctctggaatcttaatctagtgtctccttagaggcagcaagagtcttggtgaggaggtcacctcgccgacactccacaggctttgcctgtcagctttgtcctccagcctcgaaacctggcccacaccagtggagacactgccctgcatgctgagtctttgagatcttgaacatctcgaacatctcccagcgaatcatgacaaattcctcaaggtccccagcctacagtgtacctgaacttaagaattcaaaaactttgggtctacattcagtggtcccccactctcaaactggcaactgctccgtggtttttcctgtatggaggaggtccctgcatccctgcatcctgttgctccatgctcacagctgtgtgacgactacagcgtgagatctgggaggtgagacctgtgctaaggccagtgtcttgcctgtcccttcagatgtcactgtctctgcctctggcaggcgtcccatcaagtgccttgttcataaatgtgctctgaaacctgacacacctctgctttcccagacgagccacctttgttgagtgaaaactgctctctgtctccacttgaagggggtggggctatgactttctgcccagcctagagagctgtatactcccatttcatggactctgcttgagtgtgcaggttttacatgaattctatttataccttttgtatgccacataaataaagataatttatataaagatgtcgctttcccagaataccatcccttgggtttctcctgttgtgttctttaagctctttgagccaagtagcagcagaattgggtctttggggtggaggtgggggcaccacagactaagaacccagtttaggaggcagcataaaagtgtcatactcacgatcttggagctctgcatgaattgtggaactcagcagactgcactaggggcccaggatggccaggccaaatcatcttggacactggtcagcctcctggatctaacagtaaaactgtgtgtgtgtgtgtgtgtgtgtgtgtgtgtgtgtgtgttaggatcttgtggctattcaaggctatactggaa

SEQ ID NO: 31905 - DNA, 1202 bp, Mus musculus
ggaccccacaggggaccaggagtgggctgcagctgggggaaggggctgctattctaagtgctccttggttttcctgttcctttgttttgtttgggattgaacctatagccttaagtatgaagcattctacagctgagctataccagtagccaattttgttttgtctttgagacagagtcttactatgtaatcctggctgtcctggaactcactctgtagactaggctggcctcagactcagagatctgcctgtccagtgctgggattataggcatgagctaccacctcctggccatttgtgagggttgctttaaggaatcatagaaacaagatgcacatacaacacttaggccaggttgtcttgggacattctgagtacttgatatatagtttaaaacaaaaagaaagagccagatggggctcaatgcacaggcttagcaggcttaaggccctgtaccatccccagcacaaaacaaagcaggggggagggaagaagagagaaggcagagagaagaagaaaaatgtctctagcatgggcttgtgttagcatctttttcttagcttttgtgggcactgatttcctctgggcccctagaggctgtgtggtagtgggtgggcctgtgtggtagtaggtatgcccttttgtgaaagtaggcaatacctgggaatggacactttctctaaaggagaattgattggttgcaattagcccatggtaacgtatacatggaaaaaaatgaaataataggctttcagagtgattttgtctttatgtgctttctttcttgttgtttttgaaacagtgcctttgacgatgagaccctgaggcttcggcagctgaagctggacaatcaggtgagcaggggctcctggaggactgcccaggctggtgctgaagtcccgtcagggtctcacagcaggactagaagggcagggtcactaatggttactcattaatactgtgtgaacttaggagtcgctgggccaacacttgaagacggtagcaatacacggttttattaataatcagcgaagagcccctagctcctataaggcttagaagaatgttgtagctgggcatggtagcactaactgggaatcccagccccagagaggctgagacagctccctgggagttcactgccactctgagcaaagaggataaaagaattatttactttagttagcccatataaaagaca

SEQ ID NO: 31906 - DNA, 1383 bp, Mus musculus
acttaagcccttggctttgtttttttgtttgtttgtttgtttggtttggtttgggttttcgagacagagtttctctgtgtagccctggctgtcctggaactcactctgtagaccaggctggccttgaactcagaaatccgcctgcctctgcctctgcctctgcctttgcctcccaagtgctgggattaaaggcgtgcgccaccaactgcccagcaagcccttggtttttgaggcatgttctttactgctgagctacctttcctactctgtctacagtgagcttgtaattctctgaattcacaagacagctgtttggttatttaaggtttcatgtaactcaggatggtctctctagccacaggcaaccttgagcttggcattctcctgcctcccctcctacgggctgaggtcctgggcacgctccaccatatcctacttggtttggcttttgagaggttttatgtgtagcccaagcgtgacttgaactcctgatctcttgcctcagttgggctaatgagcatgtgccccatgttcagctgtagccatctttgcatgtggtgcctgcccctcagcctccagtgaccttcctgctttctgcttctcccagctctccttctacagaaagccttctctgacgtgaaccgtactatactgagatgtggctgtttccttctagtcagctctctcttctccttcctttccttcttccttgccattgtcccctcttttgcagttctggggactgaaacctaaggctttgtgcatgttaggcaagtgctgtaccactgtgcctcaaaaatggggacctctgtatcattgcaggaacttagtactcagtactgtgactaagtacttgctcatctttaattcctggcatttagcatggcacaataacatgagttcagcaggtgctcattgagtgagtttccttgaatatatatatgaataagataatgtttctcatggtggtataggaagctgttttcagccgggcagtggtggcacatgccagcacttgggagtcagaggcaggtggatttctgagttccaggccagcctgcttggtccatagagcgagttccaggacagccagtgctatacagagaaaccctgtcttgaaaaaccaaaaaaaaaaaaaaaaaaaaagagagagagaaaaggaagctgttttctttacaacctgagtctgattggtaatttctggtagccttgttagcctgatgtcatgaagaattggggggagggtgtcacccacatgattttccccctctctcctttttgtttcttctttccaggcatggtttgcaactggatcctgacccagaccaggaaggcaacctgcatcatgtggttaccaactgctcttcatttacctattgatgc

SEQ ID NO: 31907 - DNA, 1195 bp, Mus musculus
taaaggagctgagaacgcggtgtaagatctgttacccattacacagaagagagggaaaccctgaagtaaatagagaagggagagctgctttgaccgggaggaggcctgctgaatacaaaggcctaagatgtagtgagtgtggtatgctatgagacaggaggcagggtcttcgcctttctgaattttgttcttatttaatatttgaaggaacccggttagaagttgtaagcagctaggtatgtggcacgtaccaataatcctggtgtgagacaaaagggcctcacattagtctagtctgggctacataataagactgtgtttgaagagtgagcagagtgtggtggtgcacacctttaattccagcacccaggaggcagaggcaggcagatctctgaattccaggccagccaggtctacattgccagccccaggctagccaaggctacataacaagactctatctcaaagattaataaaaataggcaaaggctgagcagaaacgagccaaaacctgacttcgattttgtttgggtaagagattatatagctaaaactgagatgggatgtggccctatttcctatttcatggattgtggattgattgactaaaagcaaactgagccggagaattcacctgcttcctgtctgctaaggtgatgtgcccagctgctgtcaagttcccgctgctgagactcctcaacactgtaccctggatctgtgagccagagcaggcccttctttccttaacttgccttcccagtggggccagcctgtgatcccatcatgtgggaggtggagactacatagtgcatttgaagccaggggaggctatgcgagaccctgtctcacaaaagccaaaataattctatgagggctggtctatagccaagaggtacagttactgcctaatgtgctgaggcctgaggttcagtctgaaagccaaaaagaatatattcaaaaccatgcaaagtcgggattgctggatgctaagtacatgcgacttaatccgtaactcggttgacatctccttatatgctagagaatctgggctgttctttttgttgttgttgtgttgttgtttgtcttttaacaaaacctagatgtgattacaaacttctatttgaaaacctagtggttactcaacccaaccccacagtcatgtggcctcacctggttttcagacccaatgttgaca

SEQ ID NO: 31908 - DNA, 2125 bp, Mus musculus
tctgggccctgacaacatcaactggtctcagttcatcccttagctgcgatagaggcaaggccttgcccctgccactcaagccgcctgctatcctggcacttgtgtggctcagggtaccccaagccgtctgagggaagctagcaggcaagggctgagctgtgccctttgacctaattatgtcaagatgatagccgcatctaagccacaccaggacctatgcaagcagtaggatcccccagagtccgagtcctccactccctgctggcaagtgaagtgggtgtgacgagccatgaggaccaggaagtgcccattagtcactcggtgctcctggcagggtaacccttataaatggtgtcagctccccaagttgtcctgtaactataaatgtaagcgtatttccttagctcattatccagagatggccaggatggggagagggacggggttgcactttgcttctgcttgtggcctctgggggaaggacctgcagtgcagtctctccacactgtgggttctgctataggcttctagagatacaggttgccgtgccaggatcctgcttactgccctttcctcgcagctccccaagtctccaagtcagtggtactgcatgaagaaatcctgctgtgaaagcctattggattcgggtgtagggagatgggtgtgcctgaagcaaaagcatgggtactcacaggagtcctattaggtgtttctctgatagtgttcccaatcatgccagggagtctaccactgagatctcaggctgaggcctgagaaggagaaagtgacccctcacttgcctggcttccttagcttgctcctgagctttgcaaaaaaccaccctagaccccactctacaagctacagaacaacactactgtaactacctactaaataaagcccgtggcactggtcttggaattgagcgagaggtggagcctgggggtgatgggcaaggcctgcccctgctgcatgggccttccacagatgctctctcccgcacccttcttggactctgaggttgccagctttgtctgttgcgatgattcatatctataatctcagcctttgagaggtagaggctggaggatcagccctctatgctacatgagatcctgccaacagagtccagttcccactgttccctgccctgcccacctcttccttgccaccccagaccttgttccatgggaccagactctgacttaggtccttgttgatcccttggtaacaacagcagttatagtcctccaattccctcccattccattcagtattcaggcctgaaagccgaaactgttgtaggtgtctcattaccacctctatcccagctccaagcccaggagccagcccccttcctgctcctgagccttcccaggcaaggctctcgctcagcagctcctgttaccaagtttgtaaccagaactgacagcgaaaagcatcagggactgaggagcctcccaggacaggcaagggcctcctcccagcagcaccagtcaggaagcatcaccatagcaaccctagcagcaaacaatggtaccagaaagggctttcctccaaagccgcctctcctggctctgtggctcagaggaagaatggccaacatcccgaagaaaacatccctccaaaagtcaagcctgagccaagtatctcgtaccagggagcctttcctgaaggtagagtggggcccaacaacgcagccagcctttcaggttgtcctgagcagtagtctctggtacataagccagtttctgctttcatcctgtggtaccctaagttggagctcagaacagaaaggagaagcctgggcaacaggttgaagaggccttatctaaaggacttgggatcagaaatgtgcttagctttgggatttacttttggattttggagtatgtgtatgtatgtcaaactatgttgggcaaggaccccaaacttaatataaaattcctttgtttcatatgtacctcgtacacagcctggaggtgatttaatgcatgcagcatttttaggatgtctatgatttgactgaggctcatcacaaaggtcaaatgtggaattttccactttgagacgccatgcctttgcccagggtgggtgggtggatatttttttagcatttgtgata

SEQ ID NO: 31909 - DNA, 2125 bp, Mus musculus; identical to SEQ ID NO: 31908

SEQ ID NO: 31910 - DNA, 1194 bp, Mus musculus
tggcgtgcggaacagaaaattttgattgacagtatcgctctgagaccgtcactgcaggaggcttagttgggccagagcctctagtagttattttttgttttagctttaaaatttatgtgtagagtgttttgcttgcatgtgtgtctgtgtaccgtgtgtgagcagtgcccgtaaaagccagaagaggaacgctgggtcccctagaactggcgttagagacatttgtgagctgccactgctggggattaaaccccattcctctggaagagctaatgtcctatcgctgagtcatcactccagccatattttatttttttatcattaattttaagaagacaggttgttggttctcttgcacagttcagtgattgtcaggataggaggttgtaaaagcctgtttcccgcgttatttcctttcgtagccgcaattcccttgcaaaacatctttacatttcaaagcccattttttaacctgtaaattgcatttaataatatccctctacctatagctttccctccccccccccccattccccatgctaccatgcttgcccacactcttggctgctattgccacactgttgtattgctcctacactggaattaaccggtagatatctctgctgcctccaacctaccgcagataccccataatcagtgtggaccatgcgaggcttctactgtgcctacccagaattgactcaggtgtctggcgactttgtagtgttacctcttcgttgaaatacaaaagcaatttctacctactttttttctttcctaggcagttgatgcttttctcgtcatttaaataaataaatgcacattaagcaggtagaacgatgacaggcacacagttaaggctctggaactgttagtgttaacagtattagcagccccaccccacccccgccgccaggcctaccataggaaatattaaaaaaaaaaaaaaatgggactgtacctagtatgttcagatttctttctttctttctttctttctttttttttttttttttttttttggttttttcgagacagggtttctctgtatggccctggctgtcctggaactcactttgtagaccaggctggcctcgaactcagaaatccgcctgcctctgcctccccagtgctgggattaaaggtgtgcgccaccacacccagctttcagatttcatttcttgacaccattac

SEQ ID NO: 31911 - DNA, 1641 bp, Mus musculus
aaaaaaaaaaaaaaaaaaaaaaaagattttagttagcatataaagaaatgggaacagaaaacctcaaaactctgtgatatatgtccttgctgggcagggcctgtgctgatatatccttaggacttagtaccactgaagaaacatgggatcaccattaaagaacattgttgactgctctaggatatagcacaatagtagagtgcttgccaagcacactcaagaccctcaggtcagtcccagaagcacaaagagaaaatagtttccgaaatctctgacatccagcagtagtgtgctgaatggactcgtcagttcagaacgcgcatgtgtgtgcagctgctgtaaacaggtgcaggattgctgtgcctatgcaatttctcgtgttggaaagtgtcttgcttaggaattcagcctctgcctcttgctcatcttacaggtgaaggcagaagtggcagcaggagaccatcccactgatgctgagatgaagggtgagcggaacaatgtggccgagaaccagtctcgggtggagacagaagcgtagcctgcctcttccgctgcccacctctgcagctgctccctgctcccttcttactccaccctgttagttttgtaaaaactgaagaattttgagtgaattagacctttatttttctatctgtttggatgatggctttgggggagaagggagaagagaaggctgagggtgaaatggggggtagttttagatggtgtcaaccctacttttcttcccccgttacacacaagtgtatatcctttcacacgtacatcagaatgttaatttattttgctccctctgttagctccattttcacgtggtagaaggggggacgtgatagggatggggtctgataagccagggtggagaagaaaactcctggacagccattttcccatctcttccctctgtggttttccaagcctgtgtctccgtgcaggtgctaggggcatgggtacaccgctgttgcatccattgcctctcttaccttgctctcctgagttggtattcctgataacgccctctggtatcacagtgatcacctctagacagcccctaccagtacctccgctcctctcagtttcctcatccaggttgtccctgtcctgtccctatcccctcagcctctttaatgcacgctgaaggtccaggcacacctcaagtcctgtgcttgagcaataaagtggaaacaacaaaacctgggtgtcaggcaaccctttatgttgagttctcaggtggggcatgcagagaatgtgggcggggcaggatgaataagttcctattttggtccaacctaagtgtggcgtgtgcagactatggcaaggcaggaaaccgtccctctgctcgaacaccctgagctccattgtagactccagcagcccagcagaatactggggtggtttcccccaaacaagagggaaggtgcacgcctttaatcccagcacttgggaggcagaggcaggcagatttctgagttcgaggccaacctggtctacagagtgagttccaggacagccagggatagacagagaaaccctgtctcgaaaaaaaaaaaaaaaaaaaaaaagagttgtgagtcacaagttggatgcctggaatcacacctaggtcctcagtcaaagaaaaac

SEQ ID NO: 31912 - DNA, 2519 bp, Mus musculus
gtaatacttgagtctggaaggacagaaagatgctctctgttttcacctaatttttgagttagttgcttagtgtgataggtttcctctttcaaatttgtcttaaaaatatattcaatgttctgttttcaaaagaacaaaaccaaaaatattcagtctttctttgccattgatactcctatttgttgtctccaaatcttcttggaaagcttaaatttaagtgcaatagtaaactgactagggtttgtagctcttaggaggttgagactcatttatggtagtcactgcctagtccttaacagtcacatgaccacagtatgcttttgttgtatgaaagcctttataagaacagaaagaaatctcctgtagtctgtggtcagttggtttagatggctttgtttccttgaacctgggggcagtggggcagacagcagctgttgactcttgtcgacatcatctgctaagagcagtgaatgtctacactagaaagggaggctgactatgtgaggggggtgtaaatccacccaagtatgagcatacctagttcctgtgggaagaaattcattctctatgttgcaataatcagacccagcatttcgtcggggataacatgtatgatggtaacgtcttcgctcatcagtttcctacagagtactgcacgtatgtcacaggtggtattattgtcagtgaactgggaaaactcggtgtagatcaaggtaccatacactgagtgtgatccacttctgtggctcagcactcaaggtctcaaaggcctgtccgccattgctgacttagctagccttctggctatgttacagcctgaagccggtagataacacatgggttgtgaatactcattggaggcttttctgagttaggccccagcagcctctgggtctggtcccaccttgttaaactcttgcacagtttttaatcactctttttccagctcctggttctggatcatctcctcaaaggcatagaactgtttctgttctcaccagtgtggcttttgctctctgtccctggtgcttgcaggatggccatgtgctgggagcattccgactctcccatcttttctctatagtttccttcttctttcatatgtttctgcaaacccaccttgggctagtttcgttctttcatatgttctctaaacccaccttgggctagtttcgttctttcatatgttctctaaacccaccttgggctagtttcgttctttcatatgttctctaaacccaccttgggctagtttcgttctttcatatgttctctaaaccggcctcgggaccctctgcccaggaatagcaagtccagtaacctgctgactgttgggagcgacggctacttttgatcctgctatctagggacttggctcatgaagggcttgacgtacttgctgtagaggataaaggcatgttcaaggttgcttgctcaagtaaacagatgctgtgtagatgacttgctccagagtgggtgtgctgacagggtggagtattgaattccactgccttctcaagctggggaaggaactttaccctgtctttggtggaagggtgataatttccatggtcaggcatgagacccaaaagcctctgattcagaaatctgccttcagaatatagccacattggaggaatctgttgtcctgagatccatcttgtttgaatacgggcatcttctgacacagagaagaggtaataatgtcagtcacagttacaggggattaaggatgcagtaatatggtttgtctgggttgctgacgctcaataccatgtgtgtccaatatggagactagtcactggtcacttgggattttccaatttatttatggatgattccgtggaagctcccaacgttctaatgggtgctgatagatttggagggagaatggtgtcataaagcaggcagtagctaataggaaggccagatatctagccagaagatggggttgggtggagagaatggtggggagatacagcaaccctgactggctgagtctaggcaggtgagagcctgtaaggcaggcatgacaatactttcctctggctcctaacttagggagatcatctcagtgtgtcttataagtgttcattaacaacgttacttataatttgcaggtgatattttcatgtgggttcccaaatagggaggatcataaggaacagggcagccataggaacccagtgccaagtgtgggctaaggtgctaaggcaggagatccttcagggaactgtgataccctaaggagagtaggaaaggaggtacttggactgaggcttggaagatgataggtgtttcccagtgcacaaggccaagaagggcatcccaggtaagccagagcacagcgttacatatgcttggctatttaaagaaacaggaaagtttgtcctgctccaaagtgaaaaatgtcttcactctcttctctcctttgaatcagattctctttattttcagaatcaaagactattgctcttttaagtctgaaacttaggaaggcttctacaggcttccttcca

SEQ ID NO: 31913 - DNA, 1152 bp, Mus musculus
cagctaacagcatcgaaaagtcaaagtgccaccatgcgcagccacaaagctttctcttcaagtctgtttgaagaggctctgtgtatgacgcacagatctccccttcacctcagcaaaggccaaatcagcaggtgaaattatctgggaaacatcgacagagaaacttttgtctagtaggatatataaaatctttgtggcatgcaggtagatgacacgattcctgagtaatttatcctaaaagagacattgtctttttaaatggacagagagggtagaaaaagagagactgtttgatccctctaagaaccggacacaaaaccagctgcatgcacatgcaatgctttgtgggaagggaagggggttgcaagtggtgttgagttaggaggacagagactccaaccagagaggacggatggtccgtgttgcaatctggggctgtttgtctgcgtggatttcatctctctcaccgcggcatcgattgtatgcaaggcctcgctgcctaatctatatgattttaacttatttattttgggactgtttttcagcatatgatatataagatttgggggcttgaggaaagactgtgatagactgaggtgtttgttgatgagagactgaatttgacttgttggatgggcccatggattttgaaatgctcgtggtaagcagaattctaatcctggatacctagacctggaaatcattaagtgtgttattttatatggcaataaagcctttgcagatgttaaaccaggaccatgagatgtgaaaattgttttgagctacccaggtggtgtcaatgtcattctaaggatggttataaaagggagacaggcaggtgaggtttgaagatggagtgctgcgtgctagctttgaaggttaaaggaagggagtggcagaggtgtttaggcaaagcaagaacattgggtcttctctggagttcaagatctaaggtagtcctgccaagaaacctgtgttgttatgtgcccggaaatgtgtactaacccatcagggcagcaatagggatccaacacacaaattcatgaagaaaaatggcttccatcatttttttttacatttttgattttttctttttgaaaataattatgaaattagtatactttacttcagaaataaaaccctaaaatccag

SEQ ID NO: 31914 - DNA, 1128 bp, Mus musculus
acggagaagtaaccttgaggattccaccatcatatatgccttacacttgtccaattcataccgtattccttcacctcaaaggagtgttctattttcttccctgagtccttctgcactacaaccttgtagatacccagagctggctcaacagacagtgggaaagagagctggtggagtcctcctgccagatggatattttgccattgaaaaattcggttcctcttgggagtctatggaaagatattatgagttgtgtaaacaattgagacaattgtgtaaataatttgattagaggtcagcttatcaggtaataataacactgggagttaatagggagttggtgaattagtgctaatgtcgttaaccaactaaacaaagaaacaaagaaacaaacacactgtagacctgagtaagggacagtgatgtcaccagcgatgggatcctttgacccctgcagctgtgccaccccagatgctacaggtcttgtctgatcttagaagccaaccgggttagtacttagaagggagaccctgcatatgtgtgtcacagtggacttccttctgatatatatgtccgttctagccagagatatttggaaagccacaaaatcacaccatcataaagtactgcggtccttttcctttcctttcccaaagaacttgagggagcagagaagataggatttgcttagtggagaggaactggaatctgaaaggagacacaaagatcttgcggaacttgtagggcatcgtcattctgaccgagatgtacagtttggtacttacctcaatataaacgacagggaactgagaagaaaaaaaaaagcagcatgagtgtgcggtgaagtttaaaaagagagcatctttgtaattacagtctttaaactttaccgagcttattgcttcctttttcatacaaagacttatttccttgttctgtaccagatgtcctttttaattagttctttgagaattttgtaaaatgagtttggaccatattcactcttcccacactccctcctctacccacccgccttcgtgtccccctccccccatcaggtccaatggtgctgcactcatagtcatggacgtcagagataaccatgacatcaggtgacagagcctacat

SEQ ID NO: 31915 - DNA, 1221 bp, Mus musculus
caattcatcctcgaaacaaacaaacaaactgctccgatatggaaggaaatgaatgaaagaaacatcggagctcacagtcagagccacagagtcaccggcagacaccctgagaccttatcacactcccctgccctcaccagcacactagagatctaattctgcagtctctttacctggaccattgtgtctgcttacctagaaaaagccctgggcactgcaagagggcgcaagccaaggaggaatacagagaattcagaggaatgcacgcctgaaggtgcgggagtgtgtttgctggggtgaccggcagggggcgcggggcgaaaagaggcttcgggcggggctcgtgaggttgcggttccctagagtgaggggtggctgacgttaggcgggaagtgtgcgtgagaccggcagagaaccgcatgagccaggttgacggtgcggtttggggcgaaggcctgctgggcgttgtaccctacaatctcctcgttggagaaagcggtgacgtcatagaatacatagctaagtagaatcgttgcagcagcaacgcctgccggtcctggtggcgcaggccggtaggatttgctgaaggaggcagaggcagaaggatctggagttcgaggacagcctggtctacacactttttttttctttaattcccagttttctcctggaaaacactcactttttttctaagtacaacacgaaaacaaattcacggccacacgccacccccaaacacatctctagaactgacaccattccgagatccagtttcctcacagaccctcacgcccacgcacccagatcgcatccttcgcgtcctccgggcgcataggcaccagtgcagctcacacgctcttgtccacgcagagctgcacacgcccgaccctcctgtcttctccccacgccacgcttccgtcctgacacgacccccttcttccaatccgtgtcctcagttctcgggcgaagcagcgatcagtagtcggccggcgagaaatggtcgccgccaagagttcggttttgtttgtatttgattttgagaggaattcggggaatgatgaaagtttcaatagcaatgacgttcagccacgcctggtagctacatgagctcaagaatgtgcctcctgggcgggctggagagatggctcagccgttaaaggctaggctcacaaccaaaaatataagagttcggttcccagcacccacggctgtctctccagc

SEQ ID NO: 31916 - DNA, 1167 bp, Mus musculus
ggaaaaaatggatgacaggtttaggtcctaccatgtacaaaaataaatcagaatgagttaaagagataaacaaaactctaacattctaaaatttcgatagcaaaacatagaggaaaatactaatgtcattgtatgtggtgacttcttggttgtgacatcaaagtactgtccagagacgcgggaataagcaaaagaggctgcatggatcttgaagatgttttacaatggtctcagttaagtctgaaagcatagctgctgctgctaggctcaggaattgcctgagggtgagggagtgcgcttcccgggaagaccggcagggggcgcagaagcgagaagcgccttcagggcttttgaggcaatgattccttagagaaaggggtggtggtcatgagttcgggagtgttcgcgaggcctgtttaatgctatggtttgggttgcctgaaggcagggcttaggactgcaactaaggttccggactcctccttcatgggcggggctagtgacgccatgatagatcatagctaagtatgttcgaaacggccgctgtaactgccggtactggtggtgcaggccggtaggatttgctgaaggaggcagaggcaggaggatctggagttcgaggacagcctggtctacacatttttttttctcgccaagaaaagaccagctaccgaatgaaataaagtacccatgcccactaaaattccaacacccaagaaacctcatcgcagcctcgggtcaccctcttcaagctcggaaaccggcacccagctcataccagttcttacagacacacaggcacacatatacctatgcacgccctcactccacactcctctctcccccgacgggctccctttccctcacaatacccctgctcagccagcacaacccttaagttacatttctctacttctacacgctcaagggctctgcctctagacatcaacttcagggctcattgtctggcctcacagggaacagccagcacagagatccgcattcccagtctctgctccacaccctgcatgtgatacacagatttgtcctctcctgtctgccctattctcctagcatcgtgacctcttttcctcttcactgtgcctggtacactttctgtctccaccagctgcctttgctggtgacccatagtctttccccatcctc

SEQ ID NO: 31917 - DNA, 1206 bp, Mus musculus
atctggagttcgaggacagcctggtctacacatttttttttcctcccagtttcaacaaaaccacaaatccacggctccactgcgccccgaaacaaacttccaacctccacaaggcctctttttatgtttcttcctcctgaaatctgatcggctactcgcaccccaacccgaaccagcttcttcagccgcaccggctactgctccacgctgcttacaaacctttatccacgcacacgtccgaccctcacgcctgcccacgccgcactccacacccctctcttccctacaggccttctctacaatccgcctgcttagccctctcgcgacccttttctacagttctgcacgtgcggaacgagtcagcagccaccgttcagagaaaatgttcgctgcaaagagtccgttttttctcgcttcgagtgttcggttttatgtacaaagaaagaaagtgaggattacttagagtcagaaacaggctcagcggaagcgcggttgcgcaacgcctaacttgctacttcagggaaagaatacagggcgtcgtcgggctggagagatggctcagccgttaaaggctaggctcacaaccaaaaatataagagttcggttcccagcacccacggctgtctctccagccaccttttttgtcggacaccgcacccacacacacagactactaatatagataaaagacaactcttagaaaatgttatcggctgtaacgaaatggaaaacaatgatttaaataaagcaaacaagcaagtaaagaactaacgttccacaccctgcgtatggccggaggatttgcgcgctggcgtctgccctagtcacttagcgtgatgacttctttcatgctgttgctagtgactccaaatcaactcgacgtcgtcctctcctccctcctctctttactactcctctcattttgaaaaaagtagttttggcatacatggaccgcctcaagcaccaggacctaggaactcctgacagctttgctcttctcttgggctcagctggcctcaactattcaccaggttgcttagagttctcccttccctagatagtttgtggcgattccatcacatccaggatgggaccactctcctcgtctctggcaaccattgtgtttgtctgctcactgaccgaggtccggaaagaccgactcgtcactgcacctctggtatgcccccatgtggtcaagacccctaa

SEQ ID NO: 31918 - DNA, 1207 bp, Mus musculus
tccctgtgttcaagagaatttctttttaacagtgttgcagatctattcaaatgtttaaaataatgcttaaattcaaagagttttgcttctagtgaactgtaatcactagaaaattttgcctctaggtatggctaatgtaaccttacattatgtaagaaaaaattttattgtttctgcttctatacaagaagccaagagttttaatctttcagtgtatattgtttcttaagtgaaaagtattttattaactaatgcttcttaaagtttaccttaaatccttgctctcacccaaaagattcagagacaatatccttttattacttagggttttagtttactacaaaagtttctacaaaaaataaagcttttataattgttattaattggtaattaaaaattagttgtgcccaaaacaattctctggccaaaaagaaaacattattgtaaagtcatttttctcatcctcccagccaatcgttggcccatgtgggcccaactagcttctgtggggcggagtcttaagacacagttttccctgttccagcacagatgatctagttgtgtgctgtagatggtgttttaaaatgctgaacaatcaaaccttaatttgtatattaacagtcaatgccatatctctaagctcgcaattgcttaaattgttcatccctcagatactattaattctcaaatttacaattgcttatgcatatttctagttaataaataaataaattatgcacatgtgactcttaataactttgcaagccttctagttacaactgctccttaagaaaattgattaaaagtgcaattagtcactgcccctttacagccatgtatttaaaatattttgtcaactagttattaattcaaaagtttaggtattataaaattttaaaactttaacttcttaaaagacaaaaaagaaaaaaattgtatccccgtgcatactatttagtgcgttcccatgcacactattaaagtcttacctttattttcaaaatttaatattttaatgtcaaagagtttaataaatgctttatagtatcttaaagggatctacttattggcttatagattgatcctaaaacagctaccttattaaaaaagggaaaaacaggttttctccacagaatgctgcagaagcatattagtaaattcgtgtgacgaactggtaggtaagttgactcatgtcctgattaaattg

SEQ ID NO: 31919 - DNA, 1395 bp, Mus musculus
tgtgctgggtgatagcagcattccttgtttctctaggcagactggatagtcccccttcaggacctatattaatccactcagctgtgtgtagggttaggctaatagccagcaagccccaatagtcctgtttctaccttttacagctctgccttttacagtgttcatcatcattcaagactttttatatactaattatatactgactcttctactttgtagaagtatttcattaaaaagtaagaattttcatcccattatgcctatgtaagacatatacctagtttttagagccttgtaagtaattttgaattgtatggaaataatttttgcctgtttgtcctaacttttggtcattgtatatcactcttaaaatttgattttaatttcttccaggtgacctaaagaattaatgaccattcaaaaacaaggcaaaaaagcacacccacgaccttaccaacaccaaagaaacatctaagcaataaaatggaagactaaccaagaattggacattagaatgtttactgctattctctacgaaactaacaactacaaagggaacgagccagcaagtgtccatcaagctgtatcccgggaacctgcacaggcgcaggagagcagcctccccagtttcagcaacctagtgctttctatttttttcctggtttttactgttttggtaatatgaattaaaagaagaaatattaataccacatggggattgccccaaccaaagaaatctgaaatatatagtaaatgctctttttcctttgttgttcattttggatgctggtgctaaacttccaagtgtcatgatttaagaagaaattttatgcccttatttattcctaggatgaggggagaacgtttttgctttctcacatagctctctctgaaatgtgcagtaacaagttcctcaaaaataaaatttttaccttcaaaggaaaggctgtgtaactagtgtgtatttcccttttctcctcttcctccctccacctcttcttgtgtggatgttggtgtaccacatgagtgcctggtgcacttaggggcccaaagagggtgttggaaagtcacaggcagcttcgagctgccatgggtattaagaatcagctgagtcctttagaagagcagcctgcgctttttaccatctccccagccctgttaaatgctgagccaggcacagatgagttaatgttttgtgttttgttgtgagtttgagatcataggaactgggtgggtatctttgaaatgtgcaacccagagataaactcatttctggtaggcatgaggtttacaggctgaatttctaggctggtcattagagcaacagcaggatggctgtgaggtgaagtttcagatcctctgttgattatttgtgggcttatgaaatgttcttaa

SEQ ID NO: 31920 - DNA, 1811 bp, Mus musculus
ttcctgccttcagacttcggaacatttgcatgtgttttattggttaaacataccagctgattatcaataagggtttattaaagcaaaaacaaaacagactgggaaagaatttgtgctgcagccttccttacatggttgtttccagtttgcagtaatggttagtgactccttccttgctaaggagtctccgtaagaatcttgctttcttccagatcgtcttgtgtgcaggcagcagcctgggccatgcttctttctccattttccttggtgcctatcatagtgccgtgtaggaccctatgtattttactgtattgtttgtttactacaaatttgtaaataagcaaaagaacaacagaatggagaaatacgggtttcaccaaaacatcattccatctgcattgcctgcactggtctggtctgtgggtgattgagcaagtaatcatttgactcaatagtagacaaacctcatgcccttgagtactcctgcccaccccacccttcaacccacacatcccacctccgacatgtagctctcttatgtaacttctgttccctgctctaggggacctgctcgcccacgacctgcccctgctattggagaggctgaagacaaagaaaaccagcaagcggctaatggtccaaaccagccgtctgcccgccgtggattccgacgtccctacaactataggcgccgttcccgtcccctcaacgctgtttcacaagatggcaaagaggtaaagccagcaggcaggagagatacacgcagatcaccttgaggagttatgccatcttttttaaagtcctaaggatggtctttctccgtgtgaaactggacacttaatcaagcacaacattgcttacttaggcttcatctgtagacagtattttcttcctgcaacgtgagctgagcgtttgacttgagcttgttaagcagtctctggaggaattagactagcagggattgggagcttagtatgaagggcaacagttaatagcagagaactgccggtgaacaaggacagagtaacacagccatggcacgctgtggactcttagcacagccgtggcacgctgtgggctctaggtggaaaggtatttattgggcaagtagaagccacttagtctctgacccacacataaaaggcaaaacccacgttgttatttctcttcctaggcaagaaaattaacttttgagaccatttacccttaaaggctactacacagtcctctgaaggagtttgtggtttgctctgtttcagaccaaggcaggtgaagcaccaactgagaaccccgctccagctaccgaacagagcagtgccgagtgaccctggctcccaggcaccgtaaccaccagcagggtgagcctggttcctgttctctcagcagcacactgcgattccactgtgcccgcagtggtctctgttgcacctgggaggttggaggccgggggggggggggggggggttggttggttggttggttggttgggggagcaggagcggggtatggttggatgttcagtatattggagattgacccttatatagtgtcaatccctaagttgaggtataaatatggagacaggtttaatggttgccactttttgtgagtcagttcttttgaacatgggatctagaaggcttggataacaagtagcacatttactcactgagccaactcgctggcccagttttatctatctatttagacaatgctttttttaaaaaaacctagtgtagatgtgtctgtgtggggctatgtgcatgtgagtgccagttcccactgagttctgaagagtatcagatcctcga

SEQ ID NO: 31921 - DNA, 1177 bp, Mus musculus
tccaaaaacatacttttaaatgctaaacttatcataagcggataaaaaagcttcaaggaagacctataggtaagggtatgcttaagctttgtcaggactgggttgaagccagtccttccttatctcctgccagtccgacacctccctcaactgcttctagctatgggtaacatgaacactgaaacctatgtaccttagtgggtcagtgcatctgagtttaaagcagttgaacatgcccagttgctcagaaatacaatattttcttttaatataaatatgttattttgtctgctttttggtgctgggaactagttcttctcacatactaggtgagagcagtgccggctgagccctaagaataaggctcaagcccttcagatagtcttttcagcattgaaagggtcagatcttaatgtgtgaaaagctaggtgccctgtgctaaggaaggggataggctgttgtggtaggaatgagttttcatttctttcctgtcatttgtaaaaatagccaatgagtagcaggctcagttactggagcttcaggctggtaacaaagctcttgcctcagatttgctttttaaagccagtctcctgcacaggactgtgtgctttgacccttcttgccctgtgtcctggctcatttccagctgtcattgccctttaggctggtgagattggggagatgaaggatggagtccccgagggaacacagctccaggctcatcggaatccgacttaccgcccgaggttccgcaggtatgaaagagggcactgtgggtctgttacatggccatgcttgttatttgaagatatggttgctttggtcatgagcctgatcgtttgtagtggggagtagcccagggcttcacacacattgagatattcattctctttacaaccagaaagaatgctgttctctctttaactgtgactggtcatgacctgcaacttgaagtggcataaataaacctctttattttgtttgttttgacacaggatcttaactgtgtagccaagtcttgcttcatatttattatgtacccttggctggcctctaatttgaactcctttttgcctcagctctcggcctccaaagtctggaatttataggtgtttgacactatatctgatttaatgcctaatttttactaaactaaacaataagcattaattaatgg

SEQ ID NO: 31922 - DNA, 2722 bp, Mus musculus
ggggttatatgcaaatatgtgcagtgctggtggagatcagaagaggatattagatcctctggagttataggcaggtgtctacataatgtgtgtatgggagcccagctcaagtctttctttgcaagagcagtgtgtgctcataactactgagccatcactccaacatgccacccaccatgtataagcttctgtaaccaaaccatgcccatgtttatacaaggtctcatgtaggcatttttgccctcatggaaggagctagagagaaaatctcaggagcctcttggcttgatctaacagcctgagtcaatgtcttgactgagtgactgcatctctctactactgactgggatatgattggggtacagtttgaagcgtcctacaaatcaggaaagacatgtacactgtggtgtaagggtgtttagaaatgcaggttaatggaagaatgggggaatttgtttgttttaagcaaaatatagatattatctggctaacatgaaattgatgaacacatttcagtattggaatgcacctccaatggtattttctgtttccttggcagacggccatcaagaaaaacaacccacgcaagtatctgcgcagtgtgggggatggagaaactgtagagtttgatgtagttgaaggagaaaaggtgagaagctttgtaatgaaagtgtgtctgcacatagttttattgtataacatgtggcctttcagcctctgaaataatatttaatttttttgtgataggaggaagtggaagcagaaatatttttactggatgccattataaatattcagtatgctatatattttagtttcttgtttaataaaggaactctggaataaagcctccaaaatgtaagacacattttagtttggacctcacactgttttggtccagacatgtaacccaattagtagagtgcttgcttggcattcatgaagcccatggttcagttcctagcaccacataaactaggcatggtggtccgtgatccctgcactagaaaggctgaagaaggaggaagaatgttgcaagtttgaggccagtctatgctacacagtaacattctgtctcaaaagtatacccctagcacctcgaggacaaaaacgtttgactgcagccaattaagccgaccagctttctctcttggtggatcctggtgtgcaatggctgcatacagcagcctcctgggttgtgtatgctgcctatttcttgtataggttgctctaagggacccaggagataaaactttccttgtctctaatctcacactgtccagaatttaggctccagacaggtatgcaggatgactttgggaagcaccagggctttgatagctaggattcaccctggccagatcatgatatacttctgcacctagctgcatagtaaagaatacgtgattaaagtcgcagacaggccaggctcacatttccctgtctctagagtatcctatatatcaaagaagtagggcttttttttttttttttaaatccagatttgttgcaggtgaatttggtgatgtggtagctagggatatagctctgtgttagaatacttgctcatagcatgcttgaattctcagcttcattgcttacctcttagagaaaaagaaaaagtcaatgtcaacagtataacaggaaggcctaaaggagggctatgtggcgactattcctatatcaagggctttgtcttccttatttctgccaagctaagcagtaactcagatggttagagcagccggagctaaccactcaggattccagtagtaccttggggtaccacagggtttagcatgtgctaacgtttcatagtattttgtttcacttccattgaagtatcttgtattcatcattcattcatgtttgatgtatgaactgcttctaacttgactgaccagacaagggggtgggtggggtgtctcaagccagaggtcagggaccctaacatcacagtaggggttcttaaccctgtagctgactgctcctggaaggaggttacttggtttcttttaaatttggagacttttgttttcttcagggtgctgaagcagcaaacgtgactggcccagatggagttcctgtagaagggagtcgctatgctgctgaccggcgccggtacagacgcggctactatggcaggcgccgtggacctccccgtaatgtatgttctctgtgtccctaattattgatcgcaaatgttcccatatttaaaactgaatgaacttaggaacagataaataccgtatttgaaagcgccatattctagagataaggcacgtgatcattttttggaaggaaatttttagtgcccagagtttattcatagctacaggtcccattggaaacttgccagtcagaagttgtgtcatttaggatagagttggctgcaagtaacagacattcacttatctcgtaaccagatttgacaaaggtgccaagttgtccaaaggctttgtcttcctttggccagatcctcattttgtggtatttactggcaccaggattggggttcccatcacagctatgcagcctgtttcctgccttgatgctgagacagctggcctcaagaaagtctgcgtttgtctggcaagaaagagtggggctatcttaggaatcacggtgcatgcttgcctcagatgtgttgagtgacacgcctcggttaaggggctacttggtgtagccttttgttcttacttagttcaaagtaaagtggtgc

SEQ ID NO: 31923 - DNA, 1419 bp, Mus musculus
tgttattacagatttgagtagggacaggaatactttacagggattactggaatgatttataattttaatggtttaaagtcacatatcagtaagatatggtgacaatgctttaagctttctagattagttctgtgcatattaatatagaagttctaatataaaatggttcatgctagttgccaattgtcctacagaactgaggacaaaaaattctttaattgctgaaagttatggcacactgtctgccattaggtaagcagagggaagaacttctgccagtaataactgcactccattctaagacaaaatgttatgtttaaagctgacattttcaggtcaggggattatgacgttagaacataattatgattgaaatgctgaagaagtgacagggatccaacacaaagaaaagagaacaccctgtctcaagctttgagtattttggaacatgtcactcataatgcaagcaacttcctcttattcaagccatgcacccttctcttgctggtaaaatcactggcatgctgttcaagattgataactcagaattacttcacatgctcaagtctccagagtccctctgctcaaaagttgatgaagctgtcgctgtactacaagcccaccaagtgaaagaggctgcccagagagcagtgaacagtgtcactggtgttccaactgtctaaattaatcagggaccacaaacagaaacttttgcttcaccgaagaaaaatatcttaaacatcgataaatttaaatattatttaaaaaattgcaaaatataaaataaatttaaaaaggaaaggaaactttgaaccttatgtaccaagcaaacgccaggtctagcagacagtgcttgtcctagattacttgatttaaaacaacaacaacaaaaatacaaaaaccaatagtaaaatataaaaacaaattaatattttatagaccctgggaaaggaattttcagcaaagtacaaaaatttaaagcatttctttctttaattttgtaattctttactgtggaatagcttgggacatccattctatttaaaggagcagaactgatgagcaaggaaatgtgatttggattataaaattcttgctagcaacttataagttgcttgcaggaccaagataaaagccttctatactcccaaggtgacatggcactcaaaatcattacttttttcccatataacattgccaatgatgagccttggcttggaggggggttctgagagaaagagtgcctgggaagggtgcaaagaatgactcaaattgaaattgtggttctaaactctgttctgcttgatatagcttttccagtcggcttctctctttgcttgttattctataagatctccctctttatgtgctaccttcttttctaaaagatctctgtacccatgtcctgcttctttatga

SEQ ID NO: 31924 - DNA, 1201 bp, Mus musculus
tatgagcatccacttctgtgtttgctaggctccagcatagcctcacaagggacagctatatcagggtcctatcagcaaaatattggtagtgtatacaatggtgtcagcatttggaggcagattatgggatggatgtccgggtatggcagtctctagatggttcatcctttggttttgaagaatgaaaaattactggcctcttgtgagaacatgaactttttacctcggagcccaccccctcccatctgaaaaacatttttgagataaaggcctcctagaacaacctcaaaatgaaccgggtacattgccaaatgataggacatgactccttagttacgtagattccttgataggacatgactccttagttacgtagattcctttggcagaactccctagtgatgtaaacttgtactttccctgcccagttctccccctttgagttttactatataagcctgtgaaaaattctggctgaccgtcgagactcctctaccctgtgcaaaggtgtatgagtttcgaccccagagctctggtctgtgtgctttcatgttgctgctttatttcgaccccagagctctggtctgtgtgctttcatgttgctgctttatttcgaccccagagctctggtctgtgtgctttcatgttgctactttattaaatcttaccttctacattttatgtatggtctcagtgtcttcttgggtacgcagctgtcccgggacttgagtgtctgagtgagggtctcccttcgggggtctttcagtttcagctccaagctttgtctctgtaactccttccatgggtgttttgttcccaattctaagaagggcaaagtgtccacactttggtctttcttcttcttgagtttcatgtgttttgtaaaatgtattttgtatcttgggtattctaagattctgggataatatccacttatcagtgagtacatatcatgtgagtccttttgtgattgggatacctcactaaggttgaggccctccaggtccatccatttgcctaggaatttcataaactcattctttttaatagctgagtagtactccattttgtaaatgtaccacattttctgtatccattcctctgttgaggggcatctgggtcctttccagcttctggctattataaataaggctgctatgaacatagtggagcatgtttccttcttaccagttggaacatc

SEQ ID NO: 31925 - DNA, 1199 bp, Mus musculus
ttctaatttggggtaggggctcagtttgtgttttttcacgagatgaagatggagcacggtggctgccagagagattaattcgtcagatgaacacagattctgactcttctggtaagtatcattctaaagactaaaattccttttgtgcttaaaattcagctgagagcaacagctctcaaagctgtttgtgtctacagctactctctgaaccagctcccgacaggaggctggagactagcctcagctttacaatttgcatttgaataaagtacctagacttccctgaaagaagttctgctttcctactttctcactgtctttcaagattttgtctttcaagcaggtaaatcaacattctcgaggcagaccagcggatgtgcatccccgcccccctagagcacacaggtggcagctgttacccccagtctcaggacatttccagcacgtggttttcagtctgagttaaaaatttaggtttacctagagggctagaagagtagatatttctatattaataaagattggtttttattttgatagacaggcttagccccttagctgacctctggcttttcacccttgctgttactgcaaggtgtcctcagctcaataggctgtggaaaaaacagggatgaggaggaacgacttccagctcctattttagccacaaatcgtggtgttactaacgacataattcttgcttaggctttgctaattctgaggttgataattctcctttaggagctgcacagcactcagaactgtgcatactggtttgtgattgtacaaattcagtatgggcaccgcttggtgcagaagtactgcaagggaaggtccggcttgaccatttctgagtttcctgtgagataaacccggtttgaaagaggttggtaccaaattttggttaaaaataaaaaatattctccggctctacctcgcctccccaaaaggtaccaagagccacatgtgtgggttttacccacgggaggaatcgggtccatgtccacccaagccaaggttaaaagcccactcatctacggatgagaaaatcatttgatcacctcagttaagcgttgccttatttaacttaattaatagggggagagagattggagacgtactattgaaagggcaagcccttcactgcctcccacccaaataaaaaagccaattggccttgtactacaagagccggtcac

SEQ ID NO: 31926 - DNA, 1129 bp, Mus musculus
attggagacgtactattgaaagggcaagcccttcactgcctcccacccaaataaaagagccggtcgaacgccttctccctgtttcccacctatcttccaaaaatgcggaggaatatcaacttagtgttattttcacatcgttcagtcaaacttagccagagttccaacgccctacttaaaattcaactagaaagttacctaccaagtactaattagcattataaagtcagagtctgcagctccaggcctttcagttagttgtttactagaaaggacagtcttaagccagatacagtttaccataagaaaagttaaagaatcccagtgaagcaagttttttctttagccctagattccaggcagaactattgagcatagataatttttccccctcaggccagctttttctttttttttaattttgttaataaaagggaggagatgtagtctcccctcccctagcctgaaacctgcttgctcggggtggagcttcctgctcattcgttctgccacgcccactgctggaacctgaggagccacacacatgcacctttctactggaccggagattattcggcgggaatcgggtcccctcccccttccttcgcaacaataaaatttgagctttgatcagaatgaaattgtcttagctccgttttttcttccgccccgtctagattcctctcttacagctcgagcggccttctcagtcgaaccgttcacgttgcgagctgctggtggccacaacaatcccctttgcagtttcacctcctaaaatcccctataatatctctcctccccctgcttctgtgaaggtgattcccccatacccgccatcaccctacccacactcttctcatagctcttcaattccccatacactggagaatcaatccttcctaagactaagggccttccctcccattaatgccagataacttcatcctcttgtacatagatagctggaaccattggtcctcttttgttggtgttttaatccctgggagctctaaggtatctggttgcttgatatcattgttcttcctatggggttgcaaacacttgcagttcattcagctattcccttacgcctccaatgaggtccctaggctttatgtctgatgattgg

SEQ ID NO: 31927 - DNA, 1160 bp, Mus musculus
ttttcagttatggtgtgttacaaatgcagactctatgcccgtatacacttacataaggtgatagatcactttgtcctactgtctcagtgaatgttacatgaatattgagcagacacagttattttcctcgacctttgatccttgcaaaatgtgtactaaatgttggctaaattacatcagctcacggagctctgccctttaaagggacagcggcacggagatcccctgtccctagcagttacataactgccagcagccaaccttcctcgggaagctgacaggaagaggcggagcccacgccgccccgcgccacccggagggagcggcggccgctggcagtgggggcgaaagcggcggccgcttcgtcccggccacggctcatctggctcgggaactgcacggagcttcggagaccctcggcctggtgggacaacgccatgggtcccgccgacgccccgtccgccctagcgctcagggcagtgggccctgcggccgccaccccgtatggtgtcttctgcaaggggctgtcccgcaccctgctcgccttcttcgagctggcctggcagctgcgcatgaacttcccgtacttctacatcgcgggctccgtgatcctcaacatccgcctgcaggtacacatttagagccttgtctgcgttgccccgccacccgggaccgcaagatggccgcttcccaggtcgccccgcggcaccttcaagaagcgcgagaagaacgtgcaatcttgcgagagctggcttgcgcacaggcagtcggctcccaacctctcctatcagggatttggaggtgggaaagctagctgggttaagcaaggatgttgttccagcatcagaggagctatccaaggaagtatccaaggaaccactcatctgtaaattcctggcaagtcttaggatatgacaaagggcacaagatgcattatgagaaaggaaggctgagattttcaagaacacagatttacaccaaacttacgttctgaattaatctttgagaatactggactgtaagctagacattgaataagaagcctgttatgtcaagaatgtgacttaaaaagcattgcatctctcttcctcccacaagaggatatattgaatctgggtcaaagtcagactacaggaaaatatactccccaaatatgccag

SEQ ID NO: 31928 - DNA, 1232 bp, Mus musculus
gcggttccagtgtccagaggcactcttccagccttccttcctgggcatggagtcctgtggtatccatgagaccacctcaactccatcatgaagtgtgatgtggatatctgcaaagacctgtatgccaatacagtgctgtctggtggtaccaccatgtacccaggcattgctgacaggatgcagaaggagatcacagccctagcacccagcacgatgaagattaagatcattgctccccctgagcgcaagtactcagtctggatcagtggctccattctggcctcactgtccaccttccagcagatgtggatcagcaaacaggagtatgatgagtcgggcccctccatcgtccactgcaaatgcttctagatggactgagcaggtgccaggcatctgctgcatgagctgatattgaagtatcgatttgccctggcaaatgtacacacctcatgctagcctcatgaaactggaataagcctttgaaaagaaatttgtccttgaagcttgtatctgatatcagcactggatcgtagaacttgttgctgatttttgaccttgtattcaagttaactgctcccttggtatacgtttaataccctgtgcatatcttgatttagtccttagttcatgtggctcagtcacttgggggctggggagagcacgctgtggatgagaaagccctagcctggtggatctctgtgagcatcatggagtgatttatgcagggtattaaccaacagcagacttccaggatttctcgaggctggcaagggttcctgaaccagttaccactccttcttgccagtctaacagggtgggaaagtccgagccttaggacccagtttcagttctggtttcttccctcctgaccaccatcggttgttagttgccttgagttgggaacatttgcatcgacacctgtaaatgtattcattctctaatttatgtaaggttttttgtactcaattctttaagaaatgacaaatttgccttccggtccgagcagcaccgaggtagctagggcgcagagtcggctgacacccgccagctacccacaacacccaccatgggatcttaagacttctgaggatagggatctgcccggcacgggattgcctgagcatcagcagcagacatcttggttccaggaccccgccaagtgtatcctgcacagctccagagaataccagatggcgaaaggcaaacataagaatcctactaacagaaatcaa

SEQ ID NO: 31929 - DNA, 1104 bp, Mus musculus
ctattgaaagggcaagcccttcactgcctcccacccaaataaaaaagccaattggccttgtactacaagagccagtcgaactccttctccctgtttcccacctatcatccaaaaaagcggagaaatatcaacttagtgttattatagtgtatttcacatttgttcagtcaaacttagccagagttccaacgccctacttaaaattcaactaaaaagttacctaccaagtactaattagcattataaagtcagagcctacagctccaggcttttcagttagttgttcactaagataagaaaggacagtcttagccttatacagtttaccataagaaaagttaaggaatcccatgaaaacaagttttttctttagccctagattccaggcagaactattgagcatagataatttttcccccctcaggccagctttttcttttttttaattttgttaataaaagggaggagatgtagtctcccctcccccagcctgaaacctgcttgctcggggtggagcttcctgctcattcgttctgccacgcccactgctggaacctgaggagtcacacacgtgcacctttctactggacccgagattattcggcgggaatcgggtcccctcccccttccttcataactagtgtcgcaacaataaaatttgagccttgatcagagtaactgtcttggctacattcttttctctcgccacctagcccctcttctcttccaggtttccaaaatgcctttccaggctagaacccaggttgtggtctgctggccggacacaacagaccaggagtttaaatactcctgagcctctggggagcagctctcattcaaaccaccacaagaggggaaggaccagggagttaagtttgatttgggatgccagagacagtcatggcttggacaacaaattagaatgcatcatctctgagttctctcctcttagacaaatagcagaaacgactaaagtggctcggtttttgtttatgctttgtgatttttaaattttaaacaaaatgtacataaacacttccaaagaattggatgctacatgttaagaaaccagactcatctttttcttgaagtgggtttttccac

SEQ ID NO: 31930 - DNA, 3840 bp, Mus musculus
gtctgtaactctcaccctctcccttcccctacacctgttgtagtctcatggtgtttctggtttcgttttttgtttttgttttttaagaacatgcagtttgactattcattgttcatacagggaagacatcacatgttgttttcctatggaaatatatctattatatatatattattaatttttttgttgttgttgcaaatctcaccaagtacggccagcttggctggtcaggaaagagaaaacttgcagaaggaatcaggttcctctttttcctgccacatagatctggtgtgtcctgtccaagtcaggtcttagatgagaaaggaaaacaaaatgagagagatactttcaaacaatggaaaagaagagttctgtctccatctccctctctcgccgctcatccccgcccctttctccttcccccttctctgcctgctatgcacttcacaggcttttcatcagagctagcctcactagcacctgaactacacagtgacccggctgctctgtgacagtcagaccccttgggcacccatctgaggaaggccagacatctccccccaccaaatgctgctgtattctagaaagaacaatgggaggatcgagcataagataggacagagggtggccacaggatttgcaaggcccaggcagtttgggattgtcctgaaagtgctacacattaggaaaatatgagagaccacacaggcctggtagtttaggagcaagaacaggtcaccaatgttgtcccaagacatcatgcccttgtgggattgtcaccaccccacacacacactccaagtcctagcctttttcttctatgctggtcctcatggaacacagaacacacatgagggaggatgctggaatttagtctcaggcacagccggtatttgcgcagacaggaaattcctcagatttagactttttccttttttccgtctgtcatggctgtatttcaggaggacatatctgtggctcttctccacctcgacataaggtcagtagcatcttccaagatgagggtaatgctattccttaggatttttgatagcagggattttattttatttatttatttatttttgggatttttttttttgagacagggtttttctgtgtatccctggaattcactctgtagaccagactaggactcagagatctacctgcctctgcctcccaagcactgagattaaaggtgtgcgcccccatgcttagctttttttccttttctagccatctaagtggactctttgaagttcactgttttaaaacccagataatgaggcctgcctttcaaaaccaccccttgtccttcctgtgttctcccacatcatggaatgagcctctcccagccctcctgggtgtgtctctgcttggtcagacgcaggacacaggtgaggctgacagaccagagctgacctacaactactcctaagtggggcacatagaggctaggaggacctggacaagtcactctcccgacgtcagctcacaggcggactgtggttcacagacactggaattgagttgactgggtatctttagtcttgctgtgacttccccgtgcctcccccacaacccacaatctgccttcaaagaggtcagtgacctgggtgaggggttccctcttaatattcatggggaatgatgagagtcacgtgctatgtgtttcttgaaagcatgacaggggttcctttttttggcctctaaaaatgactggtaccttatatcaaatggggagattaagccaaatacttgtgttgtatgagccactgggaggaagagcaagtgagaaagggtgtgctttttgtttttgttttgactgaggtcctttgtgtgaatataaaatgagaaactacaacacttcatactggccactttgcccatgcgtagaactcagtcctttaactgcccaaagaattgtccatatgaactgtgtaaggaaattcctctgttccctaaggagtcttggatgacagctttggccacttacgttagaaatgctcatggcagtgccgtctttatttcacacctggtgttgccataattgatttctttgattctcttacctgcaaaagcccttgtttgttttttggagagaaaatatggccagggttgtctgggttgtcagggttgtgcagtgctctcaggcttcagactcacagaatttagatttagccaatcagaccttggaggaaacaccacaatgggggtcctgttttgtctttttggtttttgagttttggttttttgtttgtttgtttttttacaatcaactatgatcttctagatcgacattaaagcgacattaagttcaagaggtgatagaaggaatctaaaagctcctttagtggcctttttctgcagccattgtgggttgagtcaggaaaggaatttgcagggaagcattgccatgtggaggatgggcattgccacctaggtcctgggattctgtcctgagtcctcggccgggctgtcttcaggtctccttcagcagaaaccaggggcagctggtcagatgttgacagcagcttctcttccgataattttcatccaaggccacttagtgccacttggagacagggtccctgatgtcccatatctggttttggaaagagaatggtcctcataagaaaagaacaaaacaggcttcttgcctagtacattcaggtccctctgatccagcatctttttacactaataccttgtccagataagaatgtcactccagctgacatctagatgtctgtgaggagtccctggaatgaccactcttgtcttttcacactgttcgggatccaaccataaacacagtttggcccattcactgttgttggcagaagacaacctgagagaggtcgtgtcactttccgtgggagcagacagcatgacacacagttgggatcagtatctagccggcctgcacttagcagcaggataagcgttcagaaggcagttagaaattattctggtttaaacccccatttgatccatccccggcaaagagacgaaagatgccaagggtggtttttactgcccagtcattcggtgctagttagagctgctgtgcgttctcagcctgctcctcttctgaacagaaaccaaaattggacgtcatgagaaacccagtggagcaggggtacagagggacaccccagaaccctgcctatcaacaaggcacacgggactcacccagcactcttttggccccatccgcatcaacactaaacaacttcaaatgcgcccgactcttttcaccctcacaggtgaaccctcttctggagacttctctttgtgacggcacccacctgcaagccagatgaatctagaatgactttttgttgttgttgttgtttagtttctaatctcttgtttatgaggtgtggggtttataagggactgaatcaaatgaatgtaacaaaaaaagaaaaaaaaacaaacaaaaaatgccttttctcagggccagtgagttgcaaataatttttaaagaaaaacctataattacatcatctcaataaattttttataaaaaaaaaaaaatcaagtcccaagtctctgtttttaataatatgaaatggagtcagacaggcaaggcactctgatgatgcaaatcctgtctactctattatggaataaagtgcactcctggtttctcctggcaggaagccgctgttacccggcgttctgcaggccagctttagacaagaggccccaggaaggtcacagcagatcactctactctgagctgctgccacaggtagaaaaatctgcctcaaggaactccagtcagagatgccaaggatggaccaggtcccttggtgacagcagggatta

SEQ ID NO: 31931 - DNA, 1198 bp, Mus musculus
gtgatcaagtggggagggccccttgtgggtgggaccatctctgggctggtagtcttgggttctataagaaagcaagctgagcaagccagaggaagcaagtcagtaagtaacatccctccatagcctctgcatcagctcctgctccctgacctgcttgagttccagtcctgacttctttcagtgatgaacagcagtgtggaaatgtaagctgaataaaccctttcctccccaacttgcttcttggtcatgatgtttgtgcaggaatagaaatcctgactaagacagaacctttgagacctcccgcccccagacacatgttagcatatctattggcattgtacttgttcagttcttgttagctaggcatattgttgggatatcattggtaaaacttgcccgtaatttctaggagacaatctcacagcagatttcctggtcctctgtttcttaaaacttttctggcccattgtggtggtgtgaatatgactggcccatggaaagtagcactgttaggagatggtcttattgttattgtggatatatatatatatatatatattcacatagaacttttggctactccagcatcatgtctgcctggatgccatgctcccaccttgatgataatggactgaacttctgaacctgtaaaccagccccaattaaatattgtcctttgtgagagttgccttggtcatggtgtctcttcaacagaaatgaaaagcctaagacacctgtcttctgctatgttctctgagccttaggtacaggagttgtgctgtaaatgtatcagttgggactagacacttggtgatcaccttttcctctgtgttttgaccagttgtggttttctgtaattgtctgtttattgcaaagaaaagtttcattgatgaagggtgagaatttcacttatctgtggatatgaggatatatatttagagtttagttaggagttttgccagtttagtataatggcaatagcatactctcctctaaggtccatgacctcacttgcttcaagcacttggctaggtttccaggaccaggtgtgattttctttctcttgagaggaccttataaatccaattagagagctgttggttaccatcaagatacaaatgccactattgttcccttggtgttattgtgcaaaactggttgttgttgttgtggttcagagacatcagagatggatagg

SEQ ID NO: 31932 - DNA, 4766 bp, Mus musculus
tatgctcctagccggaggatgacctcggtggcaacagccaagggctacaccagtgacgtgaactatgactcagaacctgtgcccccaccgcccacaccccgaagccagtacttgtcagcggaggagaactatgaaagctgccccccttccccatacacggagaggagttactcccaccacctctacccgccaccaccctccccctgcacggactcctcctgaggagggcccctcctcctctgactgcctccaccgggacatgtaaatacacatctggttgagatctggagggggggagggagctatagagaagagtgaggcagactctgtacagttaacattataaagtgggtgggtgctggagatatttgtacagaagaaaagaatatttatatattttcttaaaacagcagttttgctgcttgtgccataaaagtttgtataaaaaataaatttgtactaaaagttttatttttgcaaactaaatacacagagcatgccttaagcccagtgaagagactgagtacaaaggaaacaggaaaagaaaggcatcactgaccaggagtgtctgggttttaacgataccaaaaaataaaaaggagaaagtaattccatcttagagtagcaaacttggaagtagccaaattgcctttgggttaactaacatttgagggccgacaagtcgagaacccatgaaagaagaaataacagtactaactttggacacagggctttgttttctccaggaatccagcaattttcacgaggaaaatagatagttgtgagatccgttttgagtgctgctgttgtaggagctgaagcgtctctcgcgggagctgctgagagctctcgcctgtcacagtccatggtaacaccagctgttctcacggtctgcctcccaacaccttggagactgttttgccaagagccatgatttatttaagctttttaatctgaggagttgattaaatggaatttactaaacacgaaattgaattgatttcagtatacctactctgttcgttcagcaattggctgagtttttaagttgttggctgtttttgcataatcaaaagttagccatattattggtcttccacaattgttttaatgctcattaaagtgtctttttagaacatataagaatgcttaaaaatcacaaatctaactgttatattcttgtaaattagctttgtatccttgcagcatacaatatcacagtgtgaaatcattttatgtattttgttagtaaaacatttcaatgtgctctcgttagaaacagtctgtttaaacagaaattcttattgttagtaggcgtcccctagatgaactgtttgtgacattttcactttctgtggaccagcttttctcagagtgatgtttgcaggcatagctctgccgatgtgctgtgaggtagcttctcggtatgcgctgtgaatgagtgtgttcacacggcccacagtctgtccttagtctcctcctgtgtctctctgtgtgctctctcctaccccattatggattaagataatttcacagatttaacagtgggattaaatgagaagacaccgtgaacttctcagctgcagaaatttgagcagtggagacaatggaagtctcctgtcacatgcctgacctactgtcacataccgggccgctatgtctgtcactgttggggctggctgtgggatgaccctgctggggactagtttcctgctttcacatgtgcctagcactcctctcctaaagctgaactttttttaagctagtatgatttttaccttaacaggtgtcgattaattattgaatacattttaaaaattatatattgaattgtagctatgaatttcagagcctaaggggaaacaatgaaagaattgatttcagaatttggcagagtttgagcgactttaaaaaaacaaaacaaaacgcctaagaacgtttttaaagagaaaaaactcctttctgactaatgcgtagttgttgtggacagcttagtgagaatcaggggccttgcatctaagtaaagggcaatctacctgtgtcctgcatttcagtcagataagcattaactcttcctgttactgagacgaagtgcacagagccttaagacagactggacactgaacttgcctcctgtgacgcacaggctactcaacacttacgtgaagatgggagggtagcaatactgggtatcggtcagaattggagaattctttatgtttacattttcaatgtgcgtctttatctggtgggcttcccatgtaggagagacttgcactgtcgtgtgccgggaacggtgtggcttgtttcatctcagtccaagtgcttgtgctgagtggcagtggcctcttgcaaaatactaacttgtgtgccagtttgttgaaatgatttgaaggcggttcaggtcagtctcagtagcctctttctggggccgctcagccgcagtgaagattgctcagggtacgtcttagtgagggtcgttaaatcaaaagttaggaagatgatgatactcaagttacatggacagttacgtttaaataaactgtgtctcaattattgaacataagagaaaatgagggaaaagacagttttaaattaggctgcatctagattcattactcaagaggaaacatgaataaatttgattagatttcatagttacaagggtatttactttgaacgcatatcttaaagtgtgcctgctcactgatcggagagggtatgaggtgagcttttgtctagcttgcttttgtacactgcagtaagcttttctgccgtgcagtcttctagaactaagactcagacttgactcatttggagcccaagtcttctaaccaaggcccaagagttcttgcttaggtcagataaatggcacaggaagataaggtttaatttagagtcggtgggtagaatgttattagtattttccttctgttttaaaattttacaatctttttcgcaatgaatactaacttgtaaaaaaatggccatctattttaggtaacagtttttgggggacaacatgtttttgtcttgtcaaaaaggcccgtcagtgaaaacagttgagttcatagctgtgttagttacctcaccagttaattgagatttgtctagtgaccaagaaggctttctgcagggaagtcggcttccctgcaaggcacagaaacaaaagtcttgttcagttccaatagttctgctttcagtgactacagtgcttagtgtagcccttataactttatagaaacaattaccaactgatttcttactcaaaattagactatagataggagtttgggtatcagttggttggcagtatttaagaattcacaaatgagagccgtgcatgagtgtgggtacagactgagtcctaaacaagtttgccattaagcattagttaaaatgtcagaatccctgtttaatctcctggggtttcctcaccccaggcctaaaacaggctgtgagaagagacgtgctttgaggacccggaaggcactgctttgtaagaatgtcaagattaggcttttgaaaccttagattttcaagtcaaggactttgggcctcaaatacaaaacgacacatttgtgacctaaatactgtgcctcacagatccatacagcccgtggctttctccgactgaacagctcactgaactcagcttacacctgagtaagggcggtggggaggtggcagatgcgcgggtttaccttgatgacctaagagtcacctccttcagggaaggaaactgtcattttaaacattgtttaacattttcacaaggcgtttagaaagcactcctgattttattcctagggaatttttaggattacaaattgatgtcttgtactcagaatatggcccgacacactcatcattgggtttttcccttcttcccttagagtgctagacagcttgcttctgcttcactgtccacttggggcttgctttggtttttgtttgtttgttttgttttttgtttttgtttttttgtttttttgtttttccatcaaatacgagaaagttgagggagtggtatagctacatatatccatgtggctgtgtatctgtatcgatgcctaaatatgagtattcagaggaaaggaaggcaagggactgctcccatcagtccggtgagaggaggctggagagaggatacaggaggctgaacctgaccggccttgttgcaagtgaaggatctggtgctgcttttgctgtttgtcctttttgagtctgaacgttttcttaagctttaatctttatcattgtcttaaagtcagctggtgtttcttgtacatcgactttggaatgatggtgctttgcaaggatgtatttatattataatggccaacatttggtcagcccttgtccgcttattcacttccccccttttgtaaaataagtgctttaattataaactgtataaataccttgtataaccccccccccttttgattattacaaacagctgaattgtaacaaatgaaatgttgatttttataataaaacagtggaaaaatcagtggaaaaaatgaaaatgactgtgctttgtgtgattaacactgccgtatttcccacactgcaaaggcagctttgaggtctgcatggagaactgaaaagggcggcgggctggctttgggctgaagcacctgtgcctacaaagaacctcgggcttcctgatgtgttctcattggtggagttggatgggcgatgccctttctgtctctctccctaattagccatgaagtggtggtatggagctcagtgtgtcg

SEQ ID NO: 31933 - DNA, 1212 bp, Mus musculus
catttatatctctgttcttagatgttgagtccaggatagcataggattaatccactacctgtgagtcagatggactgtgtgtgttctgagaagtcaggtcgagtggcagtagaattgttttttatagatgtctcaagtgtttaccaccgttgtctcatctagacaagagttgttttgatctgttttattgtgtcagcttttcataaaatttgaattcaaaatggattctgctaaaaagaaattgaatcctgctatcccaagttctttgttacatttcataactagaaaattctacatggattgggattaactcctagttgcacatgtctggtcttgcacccttttctgctacatttaagtcttatggggaagcgcttggatttcccttacttctaggatctacctggtattcatgggataactgctgaaagtgggatttgggcacacaaatcattgctgttaaatactttccttttctaaggtgccaacaggatcgtgctagaagactctaatatattacagcctgtgggcctgaccgtgtttgaaaactggctctattggattgataaacagcagcagatgattgaaaaaattgacatgactggtcgagaaggaagaaccaaggtccaggctcgaattgctcagctgagtgacatccatgcagtaaaggagctgaaccttcaggagtacagtaagtgaagtggacagtgagtgcccagggctgctgtgctgtaagaaacaagacatggcttcatggtttcaaccgttttcttcgttatttgtttttatatttagaaaaacattgtgttgaagtgttaaatcgagtgtgatttgagtttttcaaaattatcatgaagacaggtaaagaagtatagtcctgcaatcttagcactagggtgaaggcaggaagattgtgagttagacatagtctcagtaaaacctagccctgggatgtagctcagtggtaaagcactggctttgcatccacaaggcctgggtttgatctttagtctaagtagataaatgagtagtagtgtatacttgaacgactgagaaccacctttgttgatacatactcaagtataataagtagtatccattttgggtaatctactcctttgtagatagttgaccatctcaatatcaacacagattgatgtagcacccatattatgatagaaaacagatcataagtaacggctatattgcata

SEQ ID NO: 31934 - DNA, 1249 bp, Mus musculus
gtatattatcttgacctttttaaaaagataggcggggtggggcggggcaggagaacctggagaaaggttaactggtagctcctcttagttgtgcttagcagtgagacgctccagcacactgttgcctgggagactgactgactgcagagtgcatgccccagagcgctacagaaagagcttgagtatgctcactgtaaaaagtacacccctgaggagatagagatacttaacaactataaaatataaacagacattgaaatatcaggtttactcaattatatataatttttgtttgtttccacatggctggacatttttaaatagatttaaaagtattttacctccatttatctttttaaatttgtgtttgtgttttgtaaggccttgctcgtgttaggcagtggttctgccaatcagctgtactttctgtgtttatcttaccaagactagtctcaacttctctgattcttcagcaattttttattttctcctattatctttaggtatatgtattttaccaatcttcaggaaagatctcctaaaattgaacgggctgcattggatggtacagaacgagaggtcctctttttcagtggcttaagtaaaccaattgctttggctcttgatagcaagctgggcaagctcttctgggctgactcagatctccggcgaattgaaagcagtgatctctcaggtacccagaagtgtctctgtattttaatttgagttttaaaatggtttcagtgctgtgaatttgtattcttcccatgttatttttatacatgattataattttatcattagatatatttagcatcatgttagttaaggagatctttaattacttcctttgttccctaattactcactagttttattgatctgaaaatcatgtatcttttcctaattcttctcctcgacttttacactcttgtcttctctgaactctagcctgtgactggtctctcaactcatttttctatataaaagtttgcatgtgtaaacattcacaaacaaattttacatatgcagacatctgacttgtgactcctcgtgtctcttgttaagtctggagagtattctcaaccaaggaagagctggctgtgctcctacttggctcaagttggtactcacccttcacaaaggcatcacgtacattctcacactgttaacgttttacttttatggtcctctgcttgtaatcagttacctcttctatcataaatcatgatggcctcgctagtgacca

SEQ ID NO: 31935 - DNA, 1177 bp, Mus musculus
tgtgtagtatgttctcttgagctgtataactaaatatattttctggctttgcctttgatgtgagcctttcaaaagccactgtttattttgacattagtgtacccttgcagctagtttttaaagaaagttgatttatataagttggaaggtaaaccagtatttaaaaatctgaagttgcttacactcagaaattcagaaagatattttagtaaagtgtacaggattcttagaccagattgttaatccttttcttgatactagttttacaagtgttagtgctgcggtaaagaaatcatggtttgcctctggctcccgtctgggtagaacggttggattggatgactgaagagagccctatggccacacctttgcaggagtgcagggcacagttagctggagatgaccaggtgcttggagaatggagccatggctttttatccatttacttgactttcttttttttttttcaagttcgttcagttactatacatgactgtgactccttttttcagaaaatcaagctgactgttaaatttccactgttttgaatccaggtttatgtattggactgagtggggaggcaagcctaagattgacagggctgctatggatggaagtgaacgcactacattagttccaaatgtaggccgagcaaatggtctcaccatcgactatgctaaaaggcggctttactggacagacctggacactaacctaatagaatcctcagatatgctcggtaagcctcactgtttcttgcttaggtgtttatggaaactcactggctgccctcgtttggatgctctggctgacactttgtatcagcggctattctagaattgcatctttgtatctttgttgttgttgttagtagacccctgttacttggatttatttatatattatgcaaagttttattactattgggtctgtactgatacttgtgaagggattctgctatgcacatgcattccccgtccttttgtggaagggagaatgaagtactgaactctgagtctcatgcacaggagagaaaatcaaagtcacaataaaccatcggagtttgaagagacttagcgacttagagatgacttttaggcaggagtcagactacgcatggactacttttagaggtctcacctggttttaggattgtttttaaatgaagtattctgtt

SEQ ID NO: 31936 - DNA, 2470 bp, Mus musculus
cattatcatcaaggtgggagcatggcagaatccaggcaggcatggcgcaggaggagctgagagttctatgtcttcatccaaaggctgctagtggaagactgacttccaggcaactagggtgaggatcttacacccacacccacagtgacacacctactccaaccaggtcacacctattccaacaaggccacatcttcagatggtgccactccctggtccaaggatatacaaaccatcacactaggtataaaatatctagtgatcatttctacatgcccttattgtccaggagctgttagtaaatcacaagtgtgggccaagcctgatttggagaggttaactactatggcacttgacctgactcttctgcttcacagtagcactttctagttctactctagttggtattcttttaaattcagttaatttttattcctgaagacatctgcattcttttatagagagtgactaaattttgcctgtggctttccaatgtttggttgatttttctttgttgatttaggtgccactgaactattgctgttagcccgacggacagacttgaggcgaatttctttggatacacccgattttactgacattgttctgcagttagaagatatccggcatgccattgccatagactatgaccctgtagaaggctacatatactggacggatgacgaagtgagggctatccgtcgctccttcatagatggatctggcagtcagtttgtggtcacggcccagattgctcatcctgatggtattgctgttgactgggttgcaaggaacctgtactggacagacactggcacggatcgtatagaagtgacaaggctcaatgggaccatgaggaagatcttgatttcagaggacttagaggagccccgggctatcgtgttagatcccatggttgggtaagaagtgctgacattagcaatctgttttctacaggtacctagagacacagttcaggtgacatgaactcttggagtcagttgtttttctgtaaacagtttgcatccgctttagagtgtagcgattagaatatggtctcacaggattgacacagtaaaaggcttctgactatcttgactaacttatttctgagttaagctcgactcactgatctgggtgtggtttgtacgttttgctcagatcgatatcttggtcatgaaaaaatatggaaagaaattattttcaaaactctgtgccctttccccagcagatttgattttatcctattcagttgttcctgtgggaattatgttactgtatagttcttgtgagtgactcacatttctgtgagcctatttgagggctgatacattgacagatatatgcctcagtttacaccagtgccttggagccacttccatccaggagcctcagctgtcacttagaaccacagagagtgttagttatttggggattcagtttgtcacctgactagttgtactaggtaactttctctaccagagttgacaagccatcaagcagagtggcatgacatggcaagaaagagaaatatagtagaaaaaaaatatgtgtagtaatggagtctaatgagagtccattgggagacatttccatcaactccagagagcagttttgatctgggagtgtacttgtatactgctgtgatgaacattagaaacgctctctaccgaagcttaagtcctattatttttcttccctcctcccatggcattgataattacattggtaatgtaatgtgtacagtgggcttcacttttgttctctgctttcagctcaggattgattgattgattgattgattgattgattgattgattgattttctgtctttataggtacatgtattggacagactggggagaaatcccaaaaatagagcgagctgctctggacggatctgaccgagtagttcttgtcaacacttcccttggttggccaaacggcttagccctggattatgatgaaggcacaatatactggggagatgccaaaacagacaaaattgaggtttgtttctttttaaaaatatttaaaaccaattttataatggtttctaggccagtagtactttggttcacatagcctctgagcagttgtctggaattccaggatatcatttccagaaatcttcctccatgttcacagatctcaggacagtaggttgtcttgcagctaatcctagggtttctgagtttcgtaggtacaggaaatgtggattctgttgtttctggtcttagcagcttttgtaaatgattggctttgttttgagtgaagttcctgcctaaattttctacagcctgttttctgcaaaccaaaattatataagatccacataggcaaacctggcagtcttaagtcaggaaagcaaaatgcacgtgggtgcatgcatgcatgtgtgcaactttttgttgttttgggtgttggatttggtggcaggatatagtaagtattcagttggttacatgaa

SEQ ID NO: 31937 - DNA, 1170 bp, Mus musculus
gcctatcttttttagcatcacgtgaatgccttcagtggcaattattaaaatcataagatcgaaaactaggctcaggctctttgctcttgagtatcaaggaggggcagaccttgttgccttttccgtcttctgggttgccagctgtcatccctgggacttcttcattgcttatttttcatggaagaatagaaaatatgagtgcgaaggcagtttttgagaagggaggctgacagcaatgttaagagatttgggcttctgtgtcttgtgacttagtttgcctacttccaaggcagggaccattctgagtgttcagtatgtttttttgacaacataaatatatttgaatttgctattcaaattgtttttcacagatgaatttaatctacatgtattttccttagtatgtttatgtattggtgtgaactgttttcagtgttgaagtcataaaagaaaaaatttgaagtgtgagtttttctttttgtgttaacaggcaggcagtggttaaaggttcccttccacatccttttgccttgacgttatttgaggacacattgtactggactgactggaatacacactctattttggcttgcaacaaatatactggcgagggtctgcgtgaaattcattctaacatcttctctcccatggatatacatgctttcagccaacagaggcagccaaatggtaagtgatctggatttttaaattccagtttggaacagctctgtaagcactctgatgtctggcttgagtgaggcacagaaggaggaagggcatatccaaggtggcgaaggagtaacaagcacagcgtgcacatagagctcaggttagacaccgaactctagaaccttgtcacctgatacccttccccatgtcatgtcttgtctttcattgggggttggggtgatacaagagaacagcaatgaattaaaattgagacagctcatctgctgtttatgcataaatgcatttcttgttcatattattttcttactatatttgaatgtgttcatgtgagtgtgctcaaaaaataccagcttactaggaaacttctgttaacctagcttgtgaattccagcacctacatgtgcagtgtaaataaactacctgcttagacattggcgtgtgttcttcctcttgctcttatgcagtttttttttcagcttg

SEQ ID NO: 31938 - DNA, 1320 bp, Mus musculus
gcagacagacagctgcagagtatgggtgttccagtaactcagctttttagtatgtataaagcttttaaattttatctgacactctcaataagaaaagacagacagaaaattaatttcacttctttttttaaagtgctagaaagtgtgaaaagattttagccagttcactattgctatttttctcatttttaaaaaaagtacggggttctacttttgtgtgtggttgtgtgtttgtttgagattatgtgtagcacatgtgtacaatgcgcacagagaccagaaggcgcgggatccctggtggctgtgagctatcggatgtggtgctgggaacccaatccaggtcctctgcaggagcagtgagtgatctcagcctgggagccagctctccacctcttagttcccattttatttttgatagtatttagtcacaaatggtgatttgactttataagattcattttataagatctgatacattttcttcttccttacatatttttctttttgtttcagcggcccctttgttgctttatgcaaacagacgggacttgagattggttgatgctacaaatggcaaagagaatgcaacgattgtagttggaggcttggaggatgcagctgcggtggactttgtgtttggtcatggcttgatatactggagtgatgtcagcgaagaagccattaaacgaacagaatttaacaaaactgaaagtgtacagaatgttgttgtttctggattattgtccccggatgggctggcatgtgattggcttggagaaaaattgtactggacagattctgaaactaatcgtattgaagtttctaatttagatggatctttacgaaaagttttattttggcaagagttggatcaacccagagctattgccttagatccatcaagtgggtaagtgtataatgtacaaaaggcactccagtttctattcctagtcttccttgattggtaaatacccctcactgctaggggacaaaagaaaggtaaaggacttttggggtttcattgtcaagtagacttgtctatggaaagttgagtttgttcttaaaagacagtgtgtatccaccatgtattctctgttggtgggggtgcaaattaataaaaccagtttggatacttctcaaaaaaattaaaagtagaacaaccatgtaacccagctatttcattcctggatgtctgtctggagaactacttaccataccttaagagacacttgtatgtgtgtgtctgtaactgctttattcactatagtgaagcattggaatcaacccaaaaatcaacagatgggttatgtatgtatgtgt

SEQ ID NO: 31939 - DNA, 1211 bp, Mus musculus
ggaaatgttagtgccgtgccctgtcacagttccatggttgggttccttgtgcgcatcccagaatacgacagtgtcaggcaaagcgtagatgatgcttagactgtgaatggtgccttcccagccctgcggtcaagtcagggcgtggggcctcggagacctagcaaaggaggagctgagcctgacacagtctgctgctcccatcacggctggccacttagacaccagaaccacagtccctagtcagctctttaaactttatattacttaatgtgtagagtaaaatgttggccttcaaaagcatttaaacggtgccttgctgaagtatatagcagaaagtagttataatacatggttgctattcttaccttttcttttttccctcccataagtaacaaatgatctagaatagtctggggcttacttttttatttttcttttatctttttggatcatctattagctctttcttacaatgatgaaacagaaatatcttttgtggggtgtaaacatgatcaagtcgggctggcgaggtggctcagtgattaagagcactgactgctattcccgaggtcctgagttcaaatcccagcaaccacatggtggcttacaaccatctgtaatgagatctgacgccctcttccggtgtgtctgaagacaactacagtgtaattacatataataaaaaataaatctttaaaaaaaatgatcaagtcatcttgttatgttaccctttctagtaacttaggggcaatgttttagcttgctgagactgcctggaaagttctttgtgcacacgtatagggccttgtgtcagagaaatgtttcagaagatctgcaaatagatcaagaacatagggaaggcaaacagaaggaagttagtcatctttgttgcttcagaactgagcaaacgttttgggagagcgaagttcctgctggacatcactgaataagaatgagttgatgtcacagttggccagaagcaacttttttttttcctttttttcttttttgtcatacaaagagtacagcaggatggggaggagagagtgaagacaaggggaaaagaattgtaggggaaatgaactggagaaggaatgtaagaatggctcacttgttgtgagtagcattgctatgtataaaagctgtgcttttcttatcaggaggagtccgccttacaggagctgggagcagggatgtttcctggctcctct

SEQ ID NO: 31940 - DNA, 1206 bp, Mus musculus
ctgtgaagagctgggttgagacccactgcccgggacaacagggtaagccgactgtaatgttttgtctgttcacttcctgcagatggatctgtccgtggaaaccctcttttgcttcatgcaggagcgccagaaaagatacgccaagtatgcagagcagatccagaaggtgaatgagatgtcggccatcctgcgccgcatccagatgggcatagaccagacggtgccactgatggagcggctgaacagcatgctgccagaggctgagcgcctggagcccttcagcatgaagcctgagcgggagcggcactagcaggcgcctgcctgcgcacacagctcctccagccttcccctgggccctgacgtttgcctagatgtgtctgacccacatggacttcccagtgtggtagttcttgagaaccgaagttgggacagttgaatttccagaaatcctgtaaagaactttgcatcaagagttatttttattttgctccgattgtttgaattaaaagtgtaagtagtctagctactgcagtgaaactgtggagaaaatgctaaggacctgttcactttggcgcctcgtgagacttgacgcaggctctctgatctgtggctgtaaacataagtgctgactggctccagctactgttgctatgcattggcccccatcacatcaaggaggtatctggcactgtcttcctgccctgccagaacaccatctttttgtttttccggtaccacgccccttttgtgggtcactggaaactgaagactgccgtcatgcactcatgaaggtgtttcccattagaaccgcttttccattcagagctcaggcttctgccagcctggcagaccttggcttccataacaaggtttgcactgacacttgctcccaccctctctcatgcgagacccttggccctccactgatgtgccaggaacactaaagaggcgacggagcctctgcccgccctgccgactgtagggcgtgaagctggggaaagagctgcccgtcacaggactgctgtggaaggaagagacgcaataagtgcaggggacgggcccgaagataagagctgggtctgaggggctgtcagggctgggagtctacagcctccccttcgtccctgtgttcctccagaatccagagagattctgtcaggtgttagaagagcctcggtgtttttataagattaaaatgaatctgat

SEQ ID NO: 31941 - DNA, 2189 bp, Mus musculus
tgacagctgaaggatacggacatcattctgctggatgaactatttaggagccttgcctagatctacttataaccaatccagtacctcagacaagacatttggggccatcaccactaccatgtctagtagaccattttctaggcattgtgaataagtaggtaacttgtcactttccagactatgcacaaaatcccagtgggcctgttgcccatgtaaccctcctgtcagcttgaatgaagaggggaaaccaactagagtttagcttcgccagagattgggcagtcagatagcttagagacttaagccagggatggaacactgaacagtctccctccctccctccctccctgtaacataagaattctctttagtgggattgttacttcttcacttggccacagacctggtttagagataagcatgaatcactgggcttggtagcagaccgacagaacctcaggttctcacttctgtttcgtgtcctggaataaaactatggcaagacttgggaaggtaaaacctgaagcaggaaatggatttccttggctttttttctctatggtatgcaacgagggtaatatttctagaatcttcttaaacttccaaacttaaccatgggctttggtaagcaagaactagtcagaataaaacatactagaaaggttaagagggcgttgttgaattttgtttagttttgaatacaggaaagctcttttccaaagctatcccagcatgctttccagggaaggggcatatcagagggaaggaccacagtggtgtcttggtccctgacatacaatcactgtgtagactcaatcctggcagctgaggataggagataagaacaagaagtgtgtacacgatagtccatatctgcccttaaacttcctggcttgagttgtatcctctagagtacggtcctccttacggccttaattcactcacgtcagcagggtgtgggtgtggggtagatgttgtcattgttctttactgtaagtgtagctaggggctgactcatatctcaggtttttctgttagtgaaatggatggtcctttggctaggatgtgacttactgtttcctatactgattgctgaaaccagcatagagtgacggtggttggaagctgacaggcttgattgtgaggaggattaggggcctcgtgaacagactgggtctgtacagataagctgtgtgtgggcataaggtgaaggtagagcagatactgcacagggagcacgttgccactcttggagattctgttcagcaatcttcttagatatatatcaaaatgtctaaagttctcaaagcttcacagtaaattttgatacattgtgtacacacacttaagtatgtaacaatccaccttcttaaaatctggtcacaccggtaagatgtaatttatttaagaatgaaaacaacggctccaacatgaagtatgttccagaagactggggacttggcttcagtagcttcgggcagtgcgttacctaatgccagatgtcctgtagagaagtgctctctggactgtgtggctgacagtcatacactacagctgtcagtccttcgtcactaatgtcgtatcagttcttggaatcacgactaccatgctgaaagggctgcctctgaggcacattgtgggtggtggtggttaggtctcctcacgtaagcacagggaagtctgtgaagtctactgggatggtacaaaatggactctgtgagaaatgctggaaaccgttcaggccgtttataaagttagagtggaaagactatataaatgtttaatatgaatatcgtgtccttgagtaaaaggcaagctgttgaatggttcacttgtgcatctctcattctcaagtgtcacgtatgttaatatgatgaaataaaatcagaactggtacctatttgtacgtaagtgtgagacgtggcttctccttgcagatcccaccctcggtgggaaccacactgtcacaggaccacaagtgacagttttaaccatttggagtggaggtggcagctgatccatccatgtgtcattcacatggagcagagacagatgccagtctgtgttccctatgccaagcacacactgaggaagcattcctaccttcctgacttcaggacacacaaagacagctgcctgcctgtgcacctaccacaaacaattccatagtccttaagggaaaacaggag

SEQ ID NO: 31942 - DNA, 1160 bp, Mus musculus
atgccttgttttggttttttttgaagtttttatattttgaggttagtataacccctttttaatgaaaccatgtctagttattcctttttgtttgttcaaatgaaacagtgcattaagtatggaattagattaatgaagtaaatattatgaatcatacactctctagtctgatactcatttttctgaccccatgttttgttttctgtctttctttctctcttcatataggttgtcagcccagtgtaaagctgttggagtgagggcagaaaggtaaaggatgatgtaatgcctggctgccctagagcatcttttgttgtgggatgggtattcccatcatctctatgaatctagtgtgaggggctgctttgtggaaggaatcctttgcaagagcatatcaacaggaaagagaaagagacattcagttggagggctcttgctgaaatggatttaactctcctcttgccagtcaccactagcctgacctcatacatttttagtacaatggagtggctgagcctttgagcacagcaccattacatcatcgtggcaaattaaagaacgaggtggggaaagaggacttattgttgtcatggcccatgagatgattggaactcaaattgttactgagagcttggtggctctgctggaaagtggaacggaaaaagtgctgctaattgatagccgaccatttgtggaatacaatacgtctcacattttggaagccattaatatcaactgctccaaactgatgaagcgaaggttgcaacaggacaaagtattaattacagaacttatccaacattctgcaaagcataaggtaatttctttcttttatgactttttaagaaagcagacatactaattcagaaaatattttaattgaagcttcttttttaagtatagaaagtaatttgaggaaattttgattgcttttagatttggtaatcttgcaatacctaaaaatatattaacaattatactgtcactttaaaaagatttatttatttgtttatttatttaatgatatgagtacactgtagctgtctccagacacaccagaaggggagaatcagttcccattatagatggttgtgaataatcatgaagttgctgggaattgaactcaggacctctggaagagcgtactcttacctgctgag

SEQ ID NO: 31943 - DNA, 2440 bp, Mus musculus
cgtttgcaccttagccctgtggctttcatggttaatttctacttgtcctatgtaattgatggatttgtgtgtgtgtgtttagttgtcacttcttttcttgtttttaatcaccctacaaaaagaaaccaaataggctgtttgtctcccgtggttctcagcctttatggacccaatattactcctttctagttacttgagtaatgtttgcttgtctgtgagccattccagcataagctgtgagtattaacagatatacacacttctatttttataacccatagtgatatgcctgttttaaagaatgtccataacaaagcccaatacaaggcccctgacagcctcattttgctcttcctctgactgtatttatgaaagctggctagggccaaatccatgcttggagaataattagccacagtttatttttaagtgaaaagttctcttagtagcatccgttaccttaacctgcagtatgtgtgacgtggtttctgctgtatgtctccatgtacacacattggcacacacatttgcttgtgcactcagctgaggcatggggtttttctaaagcgtacagaatgaacgtagctgctgagactgggtatctgctgtgtagagcacaggccatcctgctgctgacgctatggctgctgctgttggcagaatactcagttcttccctgacatgagtgtccttatgaatgtgttctgagccagagagaaagaagcctactgtgtgcttgtacctgctttagcctgtgcccccactgtgctggggcatcctgagctgcaccctgtactgcagcctggggcctggtgggtatttggagtcgcatgtggctctgtatggttcccagcacagccgaatttgcacgtggagtgtggttaggggcaaagctcatagtaggagaggttcagagacaaggaatttctactttactcgcttctctcactagttcagtcatatgtattctctgttgctgctaattacaattgttcctccctctgatgaagcaggaatttgacttccagaaaaagaagtatttgccacagactggcagttgaagggaggtatcatagttacaggcatgtccaaccttttgatgttgtgacttgaagcctgagaattgaatgttttaagtgagtttacagtttagtgctgggccacattcctagttattctgaggtatacgcagcctgcaagctgcggttcagacgtgcctggaaggttgtctgtgaggtgggacgagagatggactgtgtagcttgtgatctcttgacaggcatgtctcctgaccagttgccttctgttagctgaagatcccttgagcgcaggcgtggaactcagatctccatgctaggtgtgtgtgcccgccgacagagcacctgcccagcttgctgggattcgctgtgttttagaaaaatgggcattaagggtatttaatgtcttcttaggaccataagtggagacaaggactgttgatgttcaggcccttcgaatgtaagtgttttcaatgtagtgttctgactgggatggcgtgttctgccagtggggcgactcagtcgtagactcttactttgcagaactttgtgttgctttgtttgttactttttgaattctccaggaaaaaaaaatgtttttaaagcaaacattccaggatgagtgtggcctctcagtggaatgtctcactgtgcttgaagcctctgcaggttgtacttgtagtttcagggtcatcccaggttgtccttgtaaccacacggtcatccacaagtagaagagatggactttggagtgaatgttgattacgctttgagttttctctagggcctgtatctctttagtgttttggagccatcaaaccaagataatggccctcagcatctgaagggggcatggtgattgctcagctactgtgctggcccttctcccgaatctgtgatctaattaatcactgttccagattccaacagctgcagcatctcttgtcactcccatccatcgaggcactgcaggctaactgcagttccttcccagaggagagcaagctgggaggacagagcccaaggccattctctagggcaggaagaggccaagtgcctggcttctttttttttttttttttttcagagattaaggagaaaatatatttgcacattcacaccaatccaactctgccactctagcatctgcttcccacgtactggagcaactggtgcaatatggagttgatctggtcaggtcaacatttaggctgtaggtgaagttattaatttgttttctgtccttatctaaaatgttcctgggatgcccaaatcagagctttagtgctgcggtccctgccactgcctgcctcgtggacacgctcagcggcaccagctgtaacttcagcgtctttgccccacagtgggtctgctttggctggtgatagaaacacaggtttaag

SEQ ID NO: 31944 - DNA, 2037 bp, Mus musculus
ctggcagattagttgcctgccaggaggaattactttccttgatcaaaaaaattaacactggggaaggctggaatcacttgaggggactataatgcagtatttgcaccccaagatatttaccttaaagtggaatcagaatgaggttcccaagcaagaacttgccaccaaggccccaaaggatagggacggtcgtatccttatgaatcccactaaaacttaggctgggaatgacagttttcctttccagtctcagttcatgagaacccatttcccagaggttcgttttgagccaatagcctattttgaaccatttgaactgtagaaaaatggcaaatatatacttacatgtatgttcttaagagaaaaactaggtacccatagtgcacgtttgattaggagtgtgaatagagctgccgtggctcgagttctttttatcttttgcttttgttttggtttttggttttttgagatagggtttctctgtgtaacaaacagctcgggctattctgggaattgctctgtagaccacgctggcttcgaactcacagagatctgtattgtctctgcctcctgagtgctgagattagaggttgtgtgccatcacctctgggtacttttttatttttttttaaagttgtgccttgtatgctggtaaattttggagagaaaggaacttcatacttaaaaaaaaaattagactggaaagttcagaagtactaatgctcccacagaattgattttaaccctgaggttacaaagcagaagttaaatgaacagctagaggaagcagccttcccacacgtcagcaccgtatgctaatttgctggaacaggacggtttggatgtttataggggaaatggatagtagatgttaggaccaactgagaaggtccaacacaagtgtggatttttccatgtgtcaaaaatctcatcaccccacttgcctaattagagtaacccagcccctaaatttacatagattgactattcatatgctctaactacttataatagtttataagctccttatgaagaaaaccagcattctctatttctaaagcccacttataacccagcatacaaatagatcttaacagtttattattaacttttcaggtcctcatttattgaaatttaaaaataaatgaaggaatatagagatggcacagggttccagcttgttgtgtttataaatcataaagtcatgatataccttctacagacatagcattttttcagagatggaaaatggccattagagtcactttccatattataccctctataaagttgtcgaattggatgggagttctttctaactagccatcacacctgtagctttagttgctttgtgtggcttctggcctagcttttcagatgagccgcctggatttttacctggcctgttctgataaagaggcatttattagccaagcaaccataagactctagtcaaaagcactcgtgcagatatgctgcatatgagtaagaaattgcaattttgtaaacattcctcgacttggtggggaggaataattttataattgcatttccaggtatttttcaagattacgaaaatatgctactctgatgtgttatggttcctgaatttcttttctttctcaccctctttgacccagattttatagagcgagtttctcaacctctgcacagttgacattttgagccaaattattctttgttgtggtaggcagtcctgtgcattttagaatgtttggcattatctctggcctcccccacaagatgccagtagcaatcttcttcccgaagctgtgacaatcagaaatgtctcttagacatttccaaatgtcccctggggcatgggagggtttcacaaaattgcccacttgttaaggaccctgactctaataccacacaaaacagaacaaaaatccagcaaagataggatcggagatacctgtagtcttcagacctttagtgcctgtatttatccatcattactgaagtatttgttaactaagctagcaacaaaataatttctgtactttggcaatg

SEQ ID NO: 31945 - DNA, 1252 bp, Mus musculus
agaaaaatatttgacttgcataaagagaagcaacctgggtgggggtgggggggggaagggtttgaattcctttctttaaagatgtagtgtccctttcggtaagaatggatcctttatttttaaaataatcaaaatttgaataattgctacacatggttgctatttatttctacatgaagcttattctcacttggaggttctgaagattctgttatagagcaagaaatggcttaatttttttttttaattggaatttaccagtttattgtttagcagtaattaccccaggtaacactgggcaaaaatctggggtgcataatagggaattctgaattcttagatttgattatcccagatcatttttgctaagaaaaattcttatttctttttttcacagtgaacataatcctaaatccttggatatttttagaagtctgtaactttacacaaataatgaaataatttttaattcaaagtttctcaccctacttgttaatttgcccccaaggaaagttgtttttttttttttttttttttttaaggaaaaaaggacacttgtagagtaagtgaaatggatactacatctttaaacagcgtttcttcattgcctgtgtatgagaaaaacttggaagtgtgcctgtgtatataactctgtaaagacactgaaaattatactaacttatttatgttaaaaagagatttttttttaatctagacaatatacaagccaaagtggcatgttttgtgcatttgtaaatgctgtattggatagactagccccccccccgcctttgttaaatagtatggctgtgcttaaaaggttgcatactgagccaagtataatttttgtaatgtgtgaaaaagatgccaattattgttacacatcaagcaatcaataaagaaaacttccgtagttatttattgagtgcaactgtcctgtgctttactgagcctgagctagtcagcctggcatgccccagatacaatgggaaggcaaacatctacatttaggcctacatttcagtcagatgatttgggggtgggggggtgatgggggtgatgggggtggggtggggggtgtgggtattcttagtggccattttcatcttagtcctatatgggtagacaaggcttaactggaaagaggaaaagccacattttcatgtaagactgtcagcagcccccatttagttaaaatatttatgttttctaggatatgagtgtgtgagaaccaaaggggggggcttacata

SEQ ID NO: 31946 - DNA, 1239 bp, Mus musculus
aggtcacactgtaggttcagtgccagcctgggccttaccgtaagtctgaggccagtttgtattatactgtgagacctgccacacctgcacagatgagggattgaccttaggtggggcagtttggcaatcaggaagtacaggcatggagaagctgggatggggtgggctgtgccctctgatagttgtgccaacaaggaccgggaaagtcagcatgtttgttttactgtatacacgggtgggcttagctattctccagagtgggcctgtcagggagcagtcttggctctacacatcccactatacatcccagaggaggaacctctgcttggtattttctccacactgtcaacaccagcacacggatgggtgtctgcgcctgaccacagaaggcgtgctgtccccatatcccttgttttgtgattttaggatacctacctggtttatattctcaatgaactggctggaaactcctttatgatattctgcagcacctgtaacaacactcagagaacagctttgctgctccgaaatctcgggttcactgccatccccctccatggacagatgagtcaggtaagagttctttacaggaagcaaaccctgtgtcggtagatgagtgagcagagacggcgccagagccagttgcacgctcctggttcatgggcagccgtgctccttgcacatcctggtcttgtgtgctctgtgtgttgccttacactctctgcccttacactctcatgttcaggcagcgtgtggtaagactggagtaggtcacatgggcctgctgaggtggctcgattggtaaagtaccttccgtgcaaacatgaggacctgagtttgagccctagaaacatccaaagctgggtgtggtgacacgtgcgacagccaacttagcctaaccagtgagcttcaggtcagtgagctggaactgtgggagctgggaaccaaatctcctgcaaatcactgagacatctctccatcctcaggaaagaggtctcaaagagaaaaagattgtcacaacaccctctggcctctgcatgcgtgttcatgtgcatactgtgtgcaccgagtatacacataaatatacatccacacaaaagaacatttcacaggcacttgtctggcttgtaagcttttgatgtagtaacagtgttgactctctggtcttaagtattttttgttgtttccatacttgttttgactatgaagccccagcctggacttagaagggaaaaagta

SEQ ID NO: 31947 - DNA, 1300 bp, Mus musculus
gtgcaccaccatgaccagcacatgtaatcactttttgatggctatatcgcatgctgtagcatggtttacaatggtgatttgttttctccactttaactagggctgtgcttaataaatatcctagtagcctcttatttccttaaaggaaacttctagaagtgagattgaccagagagtacacatacagtagaattcatacagaatgcctgattgtcccctagaaaagccagagcaggtcatgtgaccacatctgggccagccagtctcatttcactttggtgctttggtctctgtatgaggtcagcgtttctgttcatttggagttgattcttagccttttcgggcattctctgacctgaggatggggcacgggggttgctgttaactccagtcagtcacatcgtgtttgctgccttgcaggagttaagggagcacggagaaaagaagaaacggaagcgagaggatgcaggagatgatgatgataaggagggcgccattggtgtgaggaacaaggtggctgggggcaaaatgaagaagcggaaaggccgctaatgctttagaaagacttctgctcgcctgctcgccagctgtgagattctgtccagagaccactcggccagctgggagaacgttcctcgggattgcagtgtcattgcaatgggacaacttttacagtgttgacacaggactggccgctcttcagcttgcattcctcacctgtgacacaagtgccgtgtgctcttcatgctgcacctctgccttcccacctgcaagccacggcctggcggatggagagcgctgactgtagttaactgtaaagcttctacagaatggtgtgtacgccaccttatctcagccggcattcagcctgatgtgggtcaataattattatgattaaagatgtatttttattacctgtgtgtgtctgtgtgtgcacttttatgcagctacccagaggccagaggagttggcctcccctggagctggagctgcaggcagttttgagtcaccgctgtggatgctgtggatgctgagaatcaagttcaggtcctctagaagagcagtattcaaactctttggagaccttgttattgaaggctttgtagctcctgctgatggggacctgttcgtgtcattatatggcagcttaattggttgtctttaattgaattaagacattaattggcatgttgaaaaatgaagagcaagatgatggatggctttaaagagaagttctgtttagaggaagctgcactttcctgctattggtgcggcagcaaagggcttcagagccccaggt

SEQ ID NO: 31948 - DNA, 1265 bp, Mus musculus
tctcataaggagggctcatagtcagcttgggaccactgctgccttccgttccccgagttacagtgtttagttgcaatattgcatacaacactcataacaccaggaaaaacattgcatatttacagatgagctgaaatagaccccctttgggggtcacctctctggcatgcttgtcccaaccgtggccctatcttctctctaaaagacttgtcttctccgcaaggtcatgtcctttcttaccagcccttgctcttcaatctttaggcaatttggaggctatgccaaggaagcagactatgttgctcatgccacccagctacggaccacactggagggcacaccagcgacctaccagggtgatgtctattactgtgccggatatgaccctcccatgaagccctatggacgccgtaacgaggtctggcttgtgaaggcatgagtcacttgatgaactgagaacgtcctggaagggtgccactgtgtcccctgacttagggtcaaggggcgggagggtggggggaggtacttcttcagctccaatgttccttcaaaatccctcactgctgattttctgaaataagccaagattggcagcatcattcttgagttagaaagttctggggcagaccagaaaaaaaatcccagtggcatttcctctgccactaaaaactgatttttaataattatcgaatttgtatttttgttagtgaggaaatatgtgacttatgcatgaactttcttctgtgattcttttaagaactttgtctagaaagaaaccaaaaatacaaatctttgacgtatgcagtggagacagttttaaattatttcccagttctatagtcctttaagaacatttattttacgtgtgtgtgtgtgtgtgtgtgtgtgtgtgtgtgtgtgtgtgtgtgtgtgtgtgtgttcatgtgtgggcaggtactctcagagcccatcagtaggcatcaaatcccatggagttagagtaacagggaattcagagccgtcagacttgagttgctgagaactgaaccaagacctctggatgagcagaaagcacgctgaacagcgctgagccatctctccagccccaagatggatagttttaacagagtgctgttgatggtgttcactgtattttgagatctggagtctgcagaaccttctccaagggtcccatggaaagaggctgtgttctggatgcctggctgtctccgagcttccagacagcacatctgtgaacaatcgctgagggtcaggtctacagctgc

SEQ ID NO: 31949 - DNA, 1838 bp, Mus musculus
tcaccccaggatttcaagatttaatatgttttcttggttgtcaggagtattttttttttaattatttaccaggctggacagtggaggcacatacctttaatcctagcaattgggaggcagaggctggtggatctctgagtttgaggccactgtggtctacaagtttctgaacagccagggctacacagagaaaccttgtgttggaaaaaaaattatgtatcttatgtgtatggatgttttgacgacatgtatgtccacgaacccaagcctctctctgatttatcctgtagagtcaatgtagagtttgtgtagaagcagagttcaggccgtctgccacctctgtgtccggggagactgccacccctcccaggacgcatgctcagaatagcagtctttccacctttactgaaagctgttcttaaaggatattcaaatcacaggcagttctaagaagtgaggtttttgtcaaacttctttagctggcatgtagtattcaacttgctaacttgtttccatagaaacagcggggaaaccatagacattttgtgagagacagcctacagaagagaattgttctagaagtttatcaggaacaatcacgcctcacggctctgagaaaatctaacgtgggaacagactcggtgtaaagaaagttaactcaagagccagagcctcaggctggctgtggggtgcacacatagaaccccaggaccagggaggctgaggtaggaaggttactgcagggccgaggacagcctgggctacatagtgagtccctgcctcaaatttataggtgaatacatacgtgcatacatgaataagtgaataacaaatttaaagtcaaagccatggccatgtttgttagtgacattcaatcaaatgcagaagctaataagaagcgcagatatttgggctggcaagatgctcctgtgggcaaaagcgcttgccaccaagactggtaacctgagtttaacccctggttcccacagggacagccatggttagagattgcactagagaacgttggaagttattttcccatccaactgcagctattaactgctgttctgcccttctcttaaaagaaaagcatttactttatgtgtgtgggtgttttgcaaatttgtaggcctgtgtactacatgcatgcctggtgcccaaggaggtcagaagagggctgcagatcccctaaaactagagtcgcacctagttgtgagccaccttgtaggttctgggaatcaaagctgggtgctgtggaagagcagtgctcttcaccgctgaaccgtatctccagctccgcctaaatcaaccaagagtctattatgtggcaaattggcctcacactaagctgaggatgaccttggatttcagattctgccacggtttcctgagtgttagagtaagaggcactcaccgctgcattcaccgctgtgcctggtttatgtggtgctggggcaaatccggctttgtgcatgctaggccagcagtacaccttaaactgatgtgcaccccagcctccttatgtgttttggggacaggattttttttttctattgatacatttaaaaagctatatgtatatgcatgtgtcttagggttttactgctgtgaacaggcaccatgaccaaggcaagtcttataaggacaacatttaactggggctggcttacaggttcagaggttcagtccattatcatcaaggcaggagcatggcagtgaccaggcaggcatggtgcaggaggagctgagagttctacatcttcatctgaaggctgctagcagaatactgacttccaggcagctaggagtagggtcttaaagctcatgccatcggtgac

SEQ ID NO: 31950 - DNA, 2381 bp, Mus musculus
ccctttcccttaaaaaaatatctgggacaagtttaaagttgaagagcttggtcattgagaaggaccaagtccctgggactcacaaactgttggaactaaaccacaagaccgggaaaggaagaaacattcccatgtttagatttcccattgctttggaaatcccatttaaagagggtaataatggccccttccctacagatctagtgcaacggaattctccggattcagaacaacttgacggactggctcctgtctctcctgcatcagttctcttgagagaggatgacttcagggttgtgcagcacttgggatcactgtcctgcggcagcgtgttgaagctgagatgtagcatggtccgcttagctggggaacctcacgacctttccgtccccacgctaaccccttctcccgagaactctgtgtggatactttggaaatgtgaatcttatagctgttttaatttttttttgtacctttaatttataaacccttgtggggaaagccagtgacctacaagcaggatatatgttgttttgccttaggccctgtgtgtctctctgtgtatgtgtgtgtgtctctgtatgtgtgtgtgtgcccagtgttgtaacaattattcttgagatatgccccaagcttcagggattccgtttcctgtcctggtgaagttcatctggcttggccatcttgatgcggctggatggcctatctctggtcctgagggtcgcgcaccactgttttccctctgcccgcctatactgtggttcctttccacagcagtgaggaacactggaggttgtgctgggggctcgttatcctgtgtgctcatctgtctgtctcctagactctccacccgcagagtgcagacacgcttctatcacagagagagcaagggtgcctcggaccagggccttgtgccaagcccttagagctttgatggctctgcagctgtgatctttgattctgcagcaatggcagagggtttgcatgcgcactgtcctcagtcccatggccttgtcctgccgtagctctgccctctcgccctgagtctttcttctctggggcatctccatctcttcccgcttcctctcttattcagggatctgtttctggacttctgcttcttgggtccggtatgcaaccactctggccccgtgtccttccctccttgtagagctttgaaagcatattctgagaaagttctcttgtaaatactgtaacttttttataatgaccaagttctttagaattattgccatccttttctgcccccttctaggtaagtgtgtgacctcttttaactctttcaaatgtctatgtcattatctgtcatgctgtctgttctcatggtggccaatgaaaacacacttctcttgagggaaagccagattctcatctcacttgggcatgtatgtctttttagcttctgttaataaatttcaggaaacgtagattctaggtttaaggggctaactatgagttgcccacaagaggtgttatgggtagcagaggttggtccttggaccacccagcagattggcctcaccagacttgttggtacgtctgccagaaagagcagaaaagcatatttggaagtcatatgggaccaggttgaccttggggagggggaaacaatgaataggatcctttagagtctggagatgattctaggttatttctagtaagttgaatttctgccagtgaaagggtttagaatatagtttggagtgtggactagttttcagtggaccaacacgggagatgggtgggggtcctctggcctgcttgagcccttgtaggcccagtgttctctgcagtgttgttctcagagaagccagcctgtgcaggaagggggaagatacaaggctgctcaatggagtgcttgggttgttgctcggcctggaggctgtttatgctggttgagtcttagctgagaggaagctccacagacaatatccctgaattaacatcctaacttcttcctagaagtgtgaatcgcttccctgctgaatgcaatgcaaactctaggcttacttcctgttgcagctggttatagaaaggtagctgagggttgagatggcttcatctggcctcctgtcaaaggcctcctctaaaccctcctccttgtaggcaacaacttccccagatattcaagataggaagtgttcaatgagggcagcccacagaatcagcctgagcacacctcagtagtgctgtctgcatggcaagggtctcccctcctctcagcctctcccttccttcctttgtaagccctcctgcctctgccctgcacagcacccccacaggcccccaaacatgtggtgcggtgataccgactaaccccaggaatgtgaattgctgtccacgttacctgcattgaggag

SEQ ID NO: 31951 - DNA, 2356 bp, Mus musculus
ggggggtggggagagggaaggaagagggggagaggcccaaacccaaaccatatctggggcggtgggattctctactgccaagcacccatccttggaagaaagttgttggctgatatgctgatgcttccttgacgtcaccagagagtcctcctctagccaccaaatatggccccgtccatcctcaattacatacactcggggcctccccagctgccataccactggcgccactcttgagggtggctgctgggtcacacactgaggtcttccacatccatattatcaagttctgatggtggttcaggtcttagcaagagcagatattgctctatgctgaggctaagtctggaagccactttgtccttgtgacctaaaaacaaacatcaaatccagatcccatgtgcctgtagtgggagctttggccaggaagccaatgtgcatatttggtggcctttctaacaaaagtataggaagagagatggtttgtaagttcaagctgatggaattggtttagccaagaaatggaagtttctaccccagaggatcttggagacaggtggggacaggcagtgctcctcagtcacgtgtcaccgagctgtcccacatggaggcctcctattgtgaactttgctagactctcacttacagccaaggcagcttttctggagtttttctagattctctagagccaaagatgataatgcctcacaaaacatagggtcaaagcatatgcccaccgcagtgctatagtaagtttgtgggtttttaggattcccccaaagcactcaatgtatcttgtatatgtaacaggggagaaatgcatgtgttcctttgacatacaattctgaactaggaatatttgaggaagtccaatgatgaccaacaacactggggaccagaatataacatctaaatgcagtagtcactattgctttgacctgggctggagtggtctcctctcaacagctttcatcacactattttccagctaaagatggcaaagctgtaagccaattaacatatacaccaacctaaactaaagaaccagtcctgagggtgtgagaaaggtgctatctggttatggattattaagcaaaccgtatttcatttatgttgagaagagaatgcctgccctcagggaaaaaaatgtcattgtgtgagatgaataaagtcctggtgatgggcagacagtttctcttttaaaacaggagaaactcttagggcatccagacagatggtagctaaattgttggggctgcaggggtattcctgtataagacttagaggtagtatgatatctcagatttctgccttaaagggctttctttttagaaatagtttcttttattgcccttagaagatcacccccaggaagagtatgagctatcttttctacatttcttttcctaggaatattcttatccatttcttatatacatttcttttgggagggagtttttatgctatagttgctggtatttatgtaaagggaccattactaagtgtatttctctagcatattatgtttaagggactgttcaaggtaggttactgaactgccgggctgatgttagagacactggccagaaaagctataataagttcttaaattataatttgatcactatacatttgttctatgctgccttatgttcataagaatatcaacagacagctagagccagaaaaagatagtcacattttgttaaaaagttgaattatgactggagtgaaccgtgcattcccttgccttttactttttttctgtgacatttacgtctcatgtaatttgcatcgcattggtgggttattctagtactgtatttggcttcttcattaataggatatttcacatactataattgtaaatattttgatacaaatgtttataactctagggatataaaaacaaattctgattccctacattgtgtgactgttttctttttcaaaagtgtgagataatatagagaatggtgacatttattcctcctcattaatttgcctgctggtttgatttggtgaacttgacatttatttgaaacattaagatactttctggtaaaaccctaaggatttctctaataattatttcaggcagctgaatgttagcaaatatagctttgccttgctttaattagacctcgtaggcaaaaatggaatttcataagctaatagattagaaaggggttgttatcgtcttaaataagagtagcttatgacattaagaaatgaggcacttctaaagtttggttgaagtagccagctcctttaatgtgtcttctcagttcacagtgatgcacaaagggctgggataactgacttctgcagaaacctcctatgttaactggggcta

SEQ ID NO: 31952 - DNA, 1099 bp, Mus musculus
tttaataattaaaaataaccttaatttctcattagttggttggactctgtctccatccttttctctgcttgtcccgtgttgcctactttccaaacgccttctgctaattgtagaattagcagatagaacattctcgagcattacttcatacttttaacaaagttggttcagaaacacatgatctatttcccttcagtgaggttttacagcttaggagatcaggtctgagtcaatgcattccatgttactatgtgtaagaatcaggattaaggcaatctgtaaaatgcctgtttgtaattgaatccaccaatttcctttctggagtaaacagtaatcagattataaaacttggtgttttcactggggtgggaagatgtgattgacctaagtttgtgatggcaagccacgctgaacttgaagaagatgaagaaattaaaaagggtgaactagctctgtactcttgatatattcacctctcctctgtgccctttggcttctcaaaatgagtaattgcagctacaatgatcatgtggcttttctcctcagaatattctagactggagaatggagacggctagtggggagtggtcctgaggtctgtagatgagtcttgaagactcagggtgtattgtttatcggtacctttctgtaaaaaagtctgagactgtttctaaagtcagtccacctccatgtctgagcaatcaccagcagccagcagtagcaggcttctccttccgatagagctcatgagggcttgggggtgaaagactattttttagtggggataaccagagtgtcttggtgtgaatattaccctcttttgtcttccaaactattcaaccccctttcttttgcttctggacttttttctcagcttggtgaagaacattatttcaaaaccacgctctgttctacttgtcgctgaatttatttctcatctatctttttttccctctcattttaatatattctaaacagctcgtacctgacatgcaacagctcattggtagaaggatttaaaaagcattggcttcctctatactcagggcagagctggagcgagcgtaccatcatcagtgtgctcaaatgaaaacaaaca

SEQ ID NO: 31953 - DNA, 1541 bp, Mus musculus
cgcctctgatggattattactctgctggcggtggcattcccagacactcccttagtcttttgctgcatagcaagttggaggcataaggcgcttaaggaggcataaagtgactttttatcctgtgcttcaaaccctacagtgtcacagtgataatgtctatgaatacttggcttgccatctataaactccgtcttaaggagggagtgatgatgtttggaaaaggtgtccgaatgcccaagtgacctttagctggcagacaagaatgtgtccaacagtcgtgtagtgaaggccacacactctatcaagtcttgagagcctatgtaaaggagcagtttgcctggagacacttcttctggtaccttacccacgagggcatcctgtacctgtgccacctctggagctcatacctgctgctctgtgctgcagccatcccgagactggcagggtgaatgaagacctacaggagtaacaagagaggttggggtgattagagatgcctacagaagaagcactgtgtccccaggacaacaagaaagaaagaaaaaggaaaaaaagtgttgccagggcgcgtgcggttgagtcggggttcgcggcggccggtctctcgttctcatcgcagacacttctactgcaaacatggtcaacgtaccaaaaacccgaaggactttctgtaagaaatgtggcaagcatcagcctcacaaagtgacccagtataagaagggcaaggattccctgtatgcccaaggaaagcggcgctacggtcgcaagcagagtggctacggtgggcagacaaagccaatctttcgaaagaaggccaaaaccacaaagaagattgtgctcaggcttgagtgtgttgagcccaactgcagatccaagaggatgctggccattaagagatgcaagcattttgaactgggaggcgacaagaagaggaagggccaagtgatccagttctaaaacttgtgttctctgagaggaaaatactgaagcagtagagaaatgacctgctagagaataaagatactgttaatgataagccaaggtgcatccctgagaagttataccatccaatagatctggtaaaaggttcactgcagaaggggagaggagtgaggccctgaggaagggatagaggcagtgagagccacgtagacaatcgggaagcagaactgtgaacagagaaaagaaaaaagatggggcatgcacacacagagagaatgccagaaacagagagagacacaggagggcagagaaagagatctgggatgactggttggggggctttcatcactgaaatcacagggaatggggaacctaatagcagtgatgactaaatggttgctagatccttgagggcaatcagcagaactgcctgtgtgctaacaggtacactcgtacactctacatatacaatacattagtgctgctttatataaaggcacaaaacttgatctccttattttccatttgcttatttgtttattacattttgcagtactagacatgacactcagtcttgtttgtgttaggcaataaatctg

SEQ ID NO: 31954 - DNA, 1677 bp, Mus musculus
tgagaactccgaccgagtaattattaaggttttgtcagtgttttaaatttatatgatctaaattttaccctttttaattttcattaagcctgtagttaaatgactcttatctcagtttattaaaatccttttctttttatttaaagattcagaatggatagtgtagaagaacctcagaaaaaagtcttcaaggctcggaaaacaatgagagcgagcgatcgccagcagctcgatgctgtgcacagagtcaagggggagctgctgagagccgacgggaagctgctgaacgggagccatgagaatggagacttggatcccacttcacccttggaaaacacagattgtattcaagatcgagaagaagtgaatggtattgatgggatttgttttcagtcagaagaaagtacaacggaatggaaagagaccccttgtatgcccaatgttgctgtaaaaaacaaacaagaagatttgaatagtgaagctttgtcccccagtataacttgtgatctttcttctagagtaaccactgaaccaggttctggtagtccagcctctgataacccaggctgtggtaccccagtctctgataacccagcctccgataacccagcctctgacaacccagcctctgacaacccagactctggtgatctggctgcaggagagctggccactacagtacaggctactggtgactctgcctgtgaggagcctccctccagtgatccctcttccagtgatcccacttccagtgagccctcttccagtgagcccacctgtagtgagcccatctctggagatcctgtttctgaagaagccgcctctcatgatcttgtctctggtgattccacttgtagcgagccagtttctggtgagccggtgtctcatgaagcagcttcgagtgagccagctacaagtgagccagcttcagatgaaccggtcgcaagggtcgtggcggcctgcgaactggctcctggggagtcagccttggatgattgtgccccctccggtgattcacagtctgatgagccaccttctagtgaggactcccttcctaggtctgtctgcagcggactggcttctggtgagctgactcctggggagctctctgtggaaccagccaccgacactgttaaaccaagctcatcggcagtttgtgaagcaggtcctgaccctgacaagacagagccgagtagcaataacagtgatgattgtccaggcaagagtgaagacgacgaacacttagaccaaattcaaagtaaagactcctgtgatgagggaaataaagtgaacagtaatgtcgtcgagaaggaagaacctctcgaaacacacagtgcaattatttgttctgatctacctccagaaaacacaacgaagatagcggaggatcccatcgctgagcctgctctcgaggaagaggccatctccagcagcatggaagttgaccaaagcgaaaaggatgagcataaaagtcctgcagaacctgtagccgctgtcagtgaggaccccgccgaggaggacaaggaggatactgtcgtagacaacacggactccatggaaacagatgagatcattccgattttggaaaaactcgcacccaccgaggatgaactcagttgcttttcaaaagcttctctccttccagtcgaaacaagtcaagatttggaggataaaatg

SEQ ID NO: 31955 - DNA, 1104 bp, Mus musculus
ctctacttggctatgttaactacctcttggagtactgtcactgctctaaaggttgaatgacttgggaatggcgcagtcagaatgaatgactgtctttcagcagttttcgcagaaggaggaggattaaataattgagaatgtgcatagctagtagatctctggggcatagtgatggcggttacatgttaaagtattcccatgtgctgtggaattcagtatagcaaagctatagacagctctctgtcttgatgttaaaatgtttcaaggaaagaatgctgtcttcagtgtacattgctaagcagtgggaagttctgtttgtcatgctgaaatcctttattccatctttaaagctgagcgttgtatgcctgctgagttcttgtgatcttgggagtgactaggatgaccgacagagtgtggtcttggctgactgtagtgtgaagcctataacttacacagcagactcagcagtgctgcttgctttgttgtttttctcagatgagttttctagacgaaaacgttctaagtcagaagacatggacagtgtagagtccaaacgccggcgatatatggatgaagaatacgaggctgagtttcaagtaaagatcacagctaaaggtgacatcaaccagaagcttcaaaaggtagcacacatttcatgtcaaatgtgtcaagaatgtcacaagctgcacgcttggagattttcagcatgatcctattattctgtgtttaccttgacataatctagtcagcttgaagacagtgacaagctatgaaatctatgataaattttattcctctatttggctacaatagttttattttaaaacatggtagtaaatattaaaatagaaggaagctatgacatttctctattattattaaaaaattaaggtttttgaacatttctttttctatatgaacactattatacaatgcagaagaaacaaactttatttagtagactttaatttctataatattaagttggtacaatctaaaaccctttttcatgttagtttaaggcatgatagagacaagacttcggatggattaggaaaagtgaatgttcagagtaaagatttttttgaaacttccctgtatatg

SEQ ID NO: 31956 - DNA, 1105 bp, Mus musculus
aggactttataggctttcctgcctgtttggaagctgacattcagaggttgagtagccaacccaaggctgtgtgtgctgtctgcgagcccacactccccagtgcttatagctatgtattcactaaggtatcttctgaaattgttctgtaattgctagaaaccaatccatctcttcttctgttaggagcccccacgccctctgcatccagcgcccttaccagaagccccacagccccagcgtctgcccccggaagctgccagcacttctctgcctcagaaaccacacttgaagttagcacgagttcagagtcagaatggcattgttctgtcgtggagcgtcctggaagtggaccgaagctgtgctactgttgacagctaccatctctatgcttaccacgaggagcccagtgccaccgtgccctcacagtggaagaagatcggggaagtcaaggccctgcccttgcccatggcttgcactctcacgcagtttgtgtctggcagcaagtactactttgcagtgcgcgccaaggacatttatggccgctttgggcctttctgtgacccacagtccacggacgtgatctcttcctcccagaacagttagaccttggagtcgtttagcttctacttttgaaagtttcacatcttgggcttgtttttaatcttgtgcatgaaatccactgtaaaaatccaccttgtgcaagatctcccggacatgtgactgtatacactacgtttgtttataaccggaagcaaaataaattcagcccataaagcaagccttccctgaacaattcaaacttcggggttttgaaatgtatatttattccttgctttttggttttgagttttgaaactggggaatatgtatgggtgtttgtgtgttttcttcttttgttttgaatttttaaatttctagttgtgtgtgtatcacagtgcgatctcctgttttcctctcaaatttacctctcttccagaaggaagtatattgctgagcgaatctgaggtgcagagcaggtgtgattctgcctccagaggaggctagaaggtcaaagaatctaaataaaacccgaaggaaggaaggaaggaaggaaggaaggaaggaa

SEQ ID NO: 31957 - DNA, 2856 bp, Mus musculus
caggaggtcgttcctgctttagtctgaacggtttcggtggtgccaagtggactctgatttcatcagctctgggtagagcctaaacgctatcctctgggtcattccacactgcaggtagatctgcttgctttactagttcttattccttcaaaatgttagcagactcaggctcagccttgcatttccaaggcatggcagctgcagggaatcgaatcaggcaggtgttttcgagacctgaggagagggccaagtgtttagggatgagtgaggcctctggagtctgaaggcactggtgagctgtcttcccttacggtattttacgtccttgcaaagtctacctttgcaagctgcaccagccgttttgttcacttgtcctggtattaaaagcaggagctccgttccctgtgtgcatttgcctctatgatggcttggcttacagaaggaatcgttgagttataaagaaattgtctttgctgacttcacggggtggtgttctgtcatcttcggcgtgaactttggttaatgaaggaagcctgcagctggcaggtgtaattgctcctgtcactctgagaaagaggagagcacgcgagacccacttcccacaagttgagcttggggagcagtcatgcagctaggacctcacgggcatgggaaacggttgcccaggtcactgcaaagggtttggaaaggaagaaatgatttctaactgtacatgagcacctctgtaccaggagtgtttctgtcatgtgggtacagtgttggtcttcttttcagcatcattcctgtctctaatagaaagtgcatattcaaaatggtcttcaccagtgggtctgctcactcgctactgaaagtctctctagatgaatatgtttgtttatagtcagtaattattttatatttactagttcttttttaaaaagttttcctagtgttaatataatcatgtgaagaaagcccaatggaattcatattattttattgttttggcttttacttgggtgtttttttgtcaaaggaaaaaaaaaaaatcccaaatagtggctctagatgtagatttactgtagaaagtaattacggaaacctgtttattccagattggaaagaaggtatagacagaaacgagttgggaagaggaaatgcacttgtggatcggctcctcagctcaccgagcaggacgcgtgcctcgggcagcagtggtgctggcttcccggagtgtgcgccgcttacacgaggcagaatgtgggtgctgaggggccttggctttttctttggctgtctgtggggagagtgggggacagtttccaccctgggatctcttctcaaagtgttataaagaagctccattgtcccattttgggggattcaagtttgctacattttttagcctgacaatactggtaagtgttgtcttagtgggagtcctggaaacttctggaatctgtagatgaagcgacagatgcttctcgagtaactagcagtgacagctgtctgtcactccctcatttgcactttgtctgagtacttttcaccctgttttaagtgtgagtaagcctctttatgttctggcgaatggcatacagaagcagcttgttgtagcagttcactttacacggtggctctgtccctggctccaggctccagtccatccttctacatctgcagagtgctttctgtactgtgtgatgcagtatgactttatgaaaggaacagagctttcttccttggaaatacctgttgggatagcatttgcctcacagagcagtgttccccccccccccacctatgccagataaaggatacttttgcaagcgtgaggcatctcttcagagctctcttccagtgttggacaggtgttctgggggcttgctccaatcgctttaaatatcctcccagttgccacttagtgtgacatggcagggatgcccatttcttccctggtgtctcccagtactgtctgatttagaatgctctgtgtggcatcctctcttgacaggctgtgatttcaccccgtaggtaccacaaagaaagcctttcaagtgttctcctgactccgtaggccatttccgtatcctcaatatggtcaaattttcccacttcccagtgattgggtggcctggttggctctcatggaactacacatgtccttgtgctataggcaataactgtgtaatcatgtgtgagtctgtcttccttaatcattttcagggcaaatggctttaaaaaaatatttaagggacacataaagattagagcaattatgaggggtttgttggagcaggagactaatttgtaaaactcatcgccttgagtcagcagagagggaggaggtgaagtcactgctcccatctgccaatgactgtcatgtttgagcttttgttttgtgttttctatgttagccttactctgaatacctacctatcatttaaatatttaaatgtattttctctcccttcttctttttgtaaataagggaacaaagcaatcaaacaccttctgggggatcctagcttgaggattttatcaaccatttcaaatgtaaatgtgaaaatcagtccctgtaggaaactcgcatccgaatttctgtttgttgcagttgaaaatgtaaataagatgctgtaagaccctccttaaggtctaatgctaactgggcagtagcaggttggttgccctatttttattaggttttgaaggttttcattttctttctttcctaaatgtacagtagaatggtgtccgtgtgtaagtgtcgactgtagtggggtttgtccagcaagcctgaactttatactttgaaataaatgactgagtttttaacattctgagtaccctgactcattccaagagttctcagtcctt

SEQ ID NO: 31958 - DNA, 1239 bp, Mus musculus
ttgcttaactccccgttttcgctgccctccctccgttccttccttattaggctggtatggatcttggaatatctacagctgaccttaggctccgggcaatcttgtatcggctaccctagtgctgggattgcagactcgaaccacccagttaactacatcctggcagccaatcccaacaagtttgaggatgcctgtgaactatgtaaattaggactagaaatttgagcttttgattgggagacatctggatgggcgggggctctgcttccgcgagctgattgggtacggtacctgcctgtcacgggcggcagcggctgcagtttggcgaggcagttccggggtggcgcgcgtcgtcccggaactgagcgagccggtgttggagttccaggcgcggggtcgagcatgtccgggcgaggcaagcagggcggtaaggtgcgcgccaaggccaagtcgcgctcgtcgcgcgcgggcctgcagttccccgtgggccgcgttcaccggctgctgcggaagggcaactacgcggagcgcgtgggcgcgggagcgcccgtgtacctggcggcggtgctggagtacctgacggccgagatcctggagctggcgggcaacgcggcgagggacaacaagaagacgcgcatcatccctcgtcacctgcagctggccatccgcaacgacgaggagctcaacaagctgctgggccgtgtgaccatcgcgcagggcggcgtcctgcccaatatccaggccgtgctgctgcccaagaagacggagagccagaaggtgaagagcaagtgaacccgacagacgggtgcagagcccgcccgccacagtccgcagccaataaagtcggtgaaaagcgagtaatctagagagctgtgtagtcgcgggaccgagggggtgttgggtggggacgagttccaactttgagcgtgacgcaggccacctgtgtggccatgtgcgagccggaggaacccagcgggtggattgggagagccccgtcgcatcaccgtgggcaggagaagcggacctagtgcccagaggctactctggaattggctttgcctaactccccagtcttagggaaaagtggtagggaaggtgttgcgagctgtgaacaagaagttgcctcgcttgtcatacataggaaggttgagctatatgtaccctagccatttggaaaagacaggaacttgggatccttggtgggtgctagttatttatggtagtatttaagctaataga

SEQ ID NO: 31959 - DNA, 1267 bp, Mus musculus
ccatcgagaagaaagccacagcgaccatcagtgccaagccccagatcaccaatcccaaggcagaggtcacacggtttgtgcccactgcactgagggtacgccgagagaataagggggctactgctgttccccaaagaaggtcagaggatgactctgctgtgcctgttgccaaagcagccccgagatctggtccttcagttgctgtctcagtacaaactaaggacgatgtttatgaagcctttatgaaagagatggaagggctgctgtgacagggcctcctgccaggacaggcttctgttcagagtactggtttgtggaacaagaggctcttattacagtgaagagcaatgtccactgtcaggtgttttccaagtccagttccaggagcctcctcatgtttgcctgctgggatccctgcacaaggtgtttctttacaatagaccaggatgtgaagcactgctgctaacccctgctccctgtgacatcaccatctcctccctctcttcctctctccattttgggaattctgtcagcgaggtcttagttacttgtttttgactcatgtgccgtgggcactagagtagagaattctggaggaaaaaagtttatttcatcttgacttttgtgtttgagttatttttaatattttcctgtaaatattttgtaatattttccttgtagtgaaatggattacagtatcatttcctaattcaaaacaggatatgtgggaagaaaatatacaattctgggattaaagttacttcccacaagctaaactcttttgagtgtttcatggacaaataaaatgttccataccaagataccttctgtgtttgtgtaatgtgtaaacagttcatctggctggtgggcagaaacaaacaagtttgtagtttggttctcaggaactgccatttctcatgcagaatgagaatggattttattagaatgtaaaaggtaactttgaaatctacagggataaagaggaagaattccttcaagattatattgacttcccagaacgtcagaggggtgcacaatgtctccactttgactgctaggatgggggactccagaggacacagagctgtgggggtggtggtgtgtgaaagttcccaaggctcatatacgtggacgtggttttccccagttggtggcactgttggggaagcttgagagcctggctttgttggaagaagtacatcctggaggcaggccttgagagttggaaagactccttctccagttctggtctgtgcctgctgccgtg

SEQ ID NO: 31960 - DNA, 1118 bp, Mus musculus
gaccctgtcttgacatactaattattttactatttaccaagatgtaactgctttgttaaggctactgagtgactgacagtgcttgcgttgctgggtgtctttgcatgtgtaggtaggtgttcagttttggcagagtgctcaagcaggagcatttggtatcacgtgtgactctctgaagaatcttctataatctctgttggtttgctcttggtttattatttagccaaaattcaaattttccctatctagcatagtatttttttatttaactatattcctaccccctcccccttttaaacaagttttcctgttaagtagttggtaacaatataactgggtagaaaaaaatacttaaaagtgcatcattttcactgaagtttaaacattactgagaagaattctcagctgtttctagaggtttaaacatgtgattagaaaccaaggagaaatttgagtttcttcttagactcttgaggcaaaggaaggtaaaatgtccggagtgcccgcttctttcttagtagtcttcctcgctcttgttttccaaagaacaaaaaacagcgcatgatggtccgggctgcagttttgaagatgaaagaccccaaacaaattatccgggacatggagaaattggatgaaatgggtaagagtattggaaagcggcagacttagcaaaggctgtcatggtctgctgtgtatagaggcagcacagcctaggaaatggaaaaccctgatggctgccatcggtacggcactttgttttaatgctatggaaagaaagatagactgttgcaagctagagacctcataatctagaagagggcaccatcatttagtaggagctaattactgtaactagctaacaaaaccttgtctggccaactcactttataatttttccgatttaatgatattttcactttacatttatgttagtggaataagaaaagatatacaccattgcatacactagcaagattttatcgaaaggacccagatgtagctgtctcttgtgagaccatgccagggcctagcaaacacagaagtggatgctcacagtcagctattggatggatcacagggctcccaatggaggagctagagaaagtacccaaggagct

SEQ ID NO: 31961 - DNA, 1175 bp, Mus musculus
agtatataaaaaggtgttagcagaaaatgtccttttttcttgggaaagaattttgttatgtagccttgggactcattatgtgccctggctgaccttgacctcatgacagtcctcttgaccgagcctcacaagtactgaggttagaagcatgcaccaccatactggctgaaaatgtactatcaaatgaaatttcatgtcttaacctgaaatcagtgtctctgttggatgctgtaggggggaagccttggagcctcatttaaaaatttgtggcaacttagtttctctcctcaccaagtcctcacaattgaatttacaagtagattttgttcattgtttcttgaaatagtaactatttttatcgttgatgtaacaaaataccagccgatagcaacttggttagaaggataccttcagccttaggttcatacatgtgaacacttgctccccagctgtagcacatttggggtaggggttacaggcatggccttgctgtaggaagtgcatcacaaggcgggggtgggggtggggtggggggcgttgagagtttagaacctcgccttacttcctattccctctttcttgtttgtgattgaagatatttctaggttcctcttccagccacctgctgtcttgcttcctctgctgttatgaacttcctaaaataaactatcttctttagttgccttggtcatggtattttattaaagcaacaaaaaagttaactattcacaacttaagggaggacaggttgtgtttgggctctcagtttgaagaggtatgatccttcctggtggagaaggcatggctgcaggagagggaggcagctggtaacattgtgttccaagtgagaaaacagatgaatggggtatttgccttaattttccccctccctaccccccctttttttcctttaccaggattctggctcatgagaggacaccatcaaccttcacagtggctcttctctccagcaccctcaaagacacaccccgagctgtgtctcctaggtgacactaagtctgatcaggttgacaatgatgggtaatgatgacattaggcatgggtaagactaggaaatccagtcctgcatcttagccatcctgttacctcttcagagaatgtcatctggctgataaccctctttctttaaagtatacatgatataacgtgccagc

SEQ ID NO: 31962 - DNA, 1482 bp, Mus musculus
ttgtctgcgccatgtttattcttcaggacagtaatggaagctccgagttacaagagatcatgcggagacggcaggagaagatcagcgccgctgcgagcgactcgggagtggagtctttcgatgaagggagcagccactgagtccatgaacttccttattcttggtgtggtcattgaacagtgatggacatgctttgttttaagaagccttgaagggaatgtcaaagctgtcgtcttggtatatgtaatttatcgccatataaagaaacagtatatgcctgagtaagcagaggacccgctgcttctgtgcacattagtttgattaaaactgagaagcgggtaggtgagatggctcagcaagtaaaggtgcttgctgccaagcccaatgacccaagttcgagtccctgggtctacatggtaggagagagctggcttctgcaagttgtcctctgatcaccacacataaataaataacaaatgtaatttacaaacttttaaaagaaaatgtaatttaaaaagccagacgttctagactgttctgggcttgggaaatattttttttcactttcctaagatgtactttcctttgctacattaattatcgcagccttgttcgatgatctaagtggggatatttgacaatggcagatttattcattgcaacaaggaaagacacagccattgatgaaaaaaaagaaagtctcagctttcagtgactgggatacctgttgtccagggaggaggctcagttagactaccctctgcttacttgaggtctgacatgcccaatgagagtgtatttagctttatttaaagttcttaatgccaacagttttaaaaatcacatttaaatgaactgtacaaggtagccagaccttgaatgtatgaatagactatataatatgtccccgagaaactttgttactctcagctctgttgattgcgaaatcttgcatagattatgctttgatttagtttcttttctgcttattgtgtaaaatgtaattaaacatgagaaagcacgagtcaagagtaaggcatatgcactcacaatcaatcaaagtagcccgtgtcggtgtttattacagtattttgcttaatgaaggcctcagttataaatattgatataaataagtagtcaaagaatatcgggccatcttatgtgttttatctgtgtaacagggacacttaatttacatgtactttaaccccatgaaagagtctagatagagagaagacacatagctaaccttcaacaaatgttatttttggaaacacaggttttgtcatgaaacgtaatgttatttcacatatataaaaaaaagatgttatgtaagaatgttgtatattttaacataagtccatttagagagattatctagattcattaatttttcatagtgcctttttcacaaaagtcagctggagagagtctgcaataaacagtatttgctgtatattaataaatagcttctatctcatc

SEQ ID NO: 31963 - DNA, 1243 bp, Mus musculus
aggctgagaagtgatattgtcccttggaaatctgcttcttgtttccatcctgctatgaggataactttctatgtctgtgatgtgtgtgtcaagaaaacattatgttgtgtgtatttgtgtattttcaacatttgctgagatctgaggggaatctagggttttgccaaaaacccttcccttttttaatactttttgtttctgatttgttttgctttttgagacagattctcacatagcactgcttggcctcaaacttactatgcagccaaaggtggccacgaactcttgatcttcctacctctgcctcccgtgtaatgggattataggcatgtaccacaccacacctggcttctagaccattcttgtaagccatctggctggtgtcagcactgtgggactttactcagaattttctccgggaacttaggcacatgtctgagctctgtggagtttgtattgcctcatccagggatctgtttataaggctttctgtctgacaaccacagggactgactctgctctcctcaaagaagaggagagaactccagattcctctacatgtgagtccatcactggtggtccctgtttctgttgtccttatttatcaacttttctgctttggcttggttcttcaacatggacttcctacaaaagacattccaagctttctggcttctatcgtcctttcatttcgtttgggagatagccagataccaactccctccagagctttccgaactgtaggagagaaggcagctggcttcctggggccagcttgactgcccacttaggttttactaccagcttctcagtagctactgtgttgaagccacttctgctgtatcctcttcttgttcttcctcctcctcctcctctctctccttcctctcctcctccttgagagccagagtcttaccaggtagtctctcggatgacctcacatttctgggcatcttcttgccttagtcttaaaagtgtggtgactgcaggcacttgtcacagtgctaagaggaaatttcttcacctttccttatttgaagattatctttatgtgtgtgtgtgtgtgtgtgtgtgtgtgtgcgtgtgtccacacgcacacatgtcacatgtgtaggcatgcctctggaggcctaaagagccagctagagtgattatgagctgccgggtatggatgctgagctgaacttgggtctcctggaagagaagaaagctctcttagcactggacgacctctttagccctg

SEQ ID NO: 31964 - DNA, 1145 bp, Mus musculus
acgtttacccactgagctatctcaccagttcttttttagctatgtcttgtagtcggcttgcttgggatgcatggtgtaggtgttcagggagggaagtaagtaccagtcgtgggaaaagttattagttgtttttgttggtggtaacaaatgtgatcactgttgttttctgacattttctaaagatgtgtgctgcttctaattcctctatgactagttagcctgtctagcctttgctcagctcagctactgagcagagcaggaggcaggagcattattctgtgacttactgtccttgagcccctttcagggttacaatgctgtagggtgggggcttcaggatttctattcttgttcttcactctgctgccaagttcagagtcctgtcagttccaccttgcccttcatctgcctcctgcttgggtttgggagtttacagaatataaatcgttaaaaccctttccccccaaataggacaagtgtcttaattgaggtcaggctaacacctagagtgacagaatcttcccccagtgccccgttggcacacagagagaactcacacagccaaagaatggtgtgaaactgtgtccccaaagtgtgtccactgggataaggcatatgcccagttggacgcccagggcagcagctctcttgccaacttctggtgttctgtttggtctcaggccagatggcaacatagcagcaggtggaccatcaacccaggcctttcttctgcctcctcagggctaggataaaatgcccagctgtctcttcccttgtaggagtgagcctgtgcaatcactaattgcccttactgttacttaatatttacatagctttgttgacatttgtaactgtagtaccactgatatggatgtatttggattataaaggctttgagttgcttggttagagtaagtggaacccatttaccagcaagtcggcaagatgaaagggcttcctgagtgggcatggaggaggtggacagacctgtattagactgaaccagtagactgtgatggttagacacacccttactgagcctgtatgaattaaatagtctctggacctgttatcatgcacctgtttcctgacagtcatgagacaggagcacacaaaaggcgctcccttgagtctaaatgtatccc

SEQ ID NO: 31965 - DNA, 1219 bp, Mus musculus
ggttatctgtgggcctaatggaacagtgtttccggtgttggaacacacgtgcagtcattaaacactggactctttctgattgctctagcagttatatttggtaacattgtaattgttgttagtattttctttagagattaggaagttgaaaacggtttaggaaaaagaataaggatgtgaggggaaataactgtaagtctgtctgtctctttgaaagtactgtgtgtgtgtgtgtgtgtgtgtttctttgtttttgtttttcaagtcagggttactttgtttagtcctagctgtcctagaatgagctatgtagatcaggctggccatgaactcagaactcagagatcctcctcctgcctctccagtgcactaccaccttcacccagctacttttaatatatattattccagttctctctaatggtcctgttgttcacaggtaacggcgatgatacaatatagaatgtgatggttgtatgtgcctcaccttaacgtttttagttacgtgtccttatttatgcatatgtgtgtgattggagataagaggacagctttctggaattgtttttctcctaccacatgcattccaggactggcgctcaagtcaccaggctgcaggaagcacttacccaccatgccatctcacctgactgcttgtttcaagacagtttatttatgtagccctgactgtcttggaacttgctctacaggctagaccaggctggcctggaactcagggagccacctgcctctgcaccaggctggcctggaactcagggagccacctgcctctgcaccaggctggcctggaactcagggagccacgtgcctctgcttcccaagtgctgggataaaaggcgtacatcactgctctccagcttgacttttaaaatttaaaagaaaatgtactcgtgatgctagagaaaacacttaacctgtactgtgagcaaaggtctgtcatatttaaaatctgtcacatttaaaatctgctgtttcctttggaggctggaggaggggtttcgatgccttgaacttcagtaagtggcttctgagagcctgtgcagactgcacttgactgttcagtcctacgtgcaaagttaagttctccactgcgttgccatgcactgttctgtcccctgtaacagtgtgctcagctgtgtgcgggctcacatgtgaggaatctccagccccgttctgatgtgttttaaaaacgttatta

SEQ ID NO: 31966 - DNA, 1197 bp, Mus musculus
aataagacctatacatcaaacttatagtttaaggttatgttgacagctaatatttctatgaaattataccctaatacaaagataaaatttaaagggaaaattaaggttgaacaatatagaattacagagagtattaaggtcgaacatacagttcatgtgaagttcactttatccaggcctcttctgtttgactctaggcagtccacttgccaaaagaaaaccagatatgggtttgggatgtcttgctgggagggtttcttgggtcaaagggtcagtgatgattttagtttcttgccgagcgtctctgtgtgtgtgtgtaatttcagagaaaaaaaaaaaaccctaaagctcatttgagtcagaaaagaatggttttgacagatttctctgccatttgaggaccagtcaaaggaaaaacattttgagggcatgtctcaaaataactagcagaaggttctgttggttatttgttaacctgcttctactatgttggttatttgttaacctgcttctactatttcaagtcttacaatatctgtaaggagcaagattaatttcatgtcagtcctcagggtccatctttcccagtctacagttgaaggagagttgatctgagtatataaatctatgtatgtaagctgtggagtaggcagacctggatttcaatcctaatgtcactattggctttggcaaaaagaaaattctgaataacattttcccaattttctaaagcggtgattcattttaagggttagagatggtgtaaagtaaaatttgtagctcctggcagagattgtcaattaacaatcctagttttctataccatctatcaaaaccagctatttcgaacactggacatgctcaagtggatgtcagtctgttgggaatgttggatggaggaagattctggatgaaggcagtagaccgaacttaatcataaaacccatcactgcccccttttagtctccatcttggcctgctaattcacggtctcttgaatgagcttttgcttgcctcgcaaagcaggtaggcccagctatttaagccaagttttgtttaatagtctgccttggcttctttggaagtcaattgccttggaagttagaagggccagggtgtctgggggcgtagctgtgacaacggaggtattgtagaaggtaagaaaatgccaggttcagaagagaagactggcagatc

SEQ ID NO: 31967 - DNA, 1099 bp, Mus musculus
cttcctttcctttcctttcttttctttccctttctttctttctttctttctttctttctttctttctttctttctttctttctttcttccttccttccttccttccttccttcctttctttctttctctctccatctctctctctctctccctccctccctccctccctccctccctccctccctccctccctccctccctcccttctttccttccttccttcctttctccttttggtatgctgaatgacataccattcagccctcaccaaccactgtgagagtgaaagagtagtaaactcaatgctccaaggtatgctaatcattaaacagatagcaacattccttcctccacccaccggcttcctgggttcaaagaatattcattcaaagaaagtcaccctgacccaccctgaccattgctggaacctgcaatgcaaatgtgctattgttaggggctcttagaaactgtcttgagagttaacaattaccaggtattccttgtgacacccgtgactttgtacttccttgtgattcttatctggtatttttggtattttccaacaacgcccttcccacctccttgagttgtgttttttttcctttagaaaccccctttctcagctactcagggcgccatagtcctctacccctgcgtggtgtatgaccgtgggcccgagagcgctcttgaataaaaatcctcttgcaatttgcagcaagaacgtttctcgttggtgattttggggtgtcgcctctcctgagtcagaacgtgggggagccctcacgttgtgggtctttcaagagcaactctgagcagcattgcagagtctagtgtttaaagatcaacactgataacgtgtttatttagtaaatgagcaaatagacaaattcaattgtatcaacaaaacccactattagtctgacctcttgccatgtaagtgccaacaaattttgcagacaccaaaagtcccttctgatagttggtaccagataatctcagacttctgttactctgtttaaaagaaaatccttgtgctctaaactgaccatagctcagtgggtaaattgtttgctgcatatgcatgaggacctaagtatag

SEQ ID NO: 31968 - DNA, 1193 bp, Mus musculus
tttgctggccatccactaaacgccagtcacttatctgtcaccaggatataaatgttgttagcataaccactctattagggaagtcattactgtttgtgagttgtgacggtgtatgccgggaggggggtgggaaggagagcgacagaatggttgctactgggtaggcagttagatgtgagatgattatggaaaagtgtgtctgtagcttagcaatgagaaggttacaactctacaacagcatcctacaagggacggactcggcggctcccaacactgggtagcaacgggacgccgcgcgcttgacgtcgtcagagcagcatgggttcggtctccgagctcgcgcctgcgcacactgcttctcgcgctgctgctgggaactaccgccttcccgccagtcgtcacttccggctgacgcgacgcgtcgggcgacgtcacgtcctgccgctaccggtagggaccgtgagtggcggcaggccggctctccggcgctcccctcccctcctccctccctccctgtccctcccttggcggccgcgagtcgcggggactctggagccggcctccttcggcgtgagtgcgggggcctcaagcagcctgaggcgccgcggcagagaaggaggacgaccgcgaccctcggtccccgctccgcgtcaccgcgctcgccgccgccatggccatgaggcagacgccgctcacttgctcgggccacacgcggcccgtggtggatttggccttcagcggcatcacgccttacggctactttctgatcagcgcttgcaaaggtgagctgagcccgcgacggccgcggctcccgagtgccgacgggtgggtgggtcgtggctgccagcgacagccatcgcgctgctgggactagagggtcgcccctggccgggctttatgcgtccctcctccccaccgttgttagtgctccccaacacctcgcctttctacccacacaactacattgtgtttgccaaggatttacgggaagaagaaattaggccaggccgagaggagtgccctttatgtcctctcactcattgtttcatcctttgtggtgtgagcctcatttttttttttccccgacgaaagtgtacgttaggtttatgtggtccaaagtaaaaagcggctatctagatcgttttgacaccgcatgtcactggcatccagcccacggtttttcagaagttttt

SEQ ID NO: 31969 - DNA, 1099 bp, Mus musculus
aacagctgctgatagcagtttcatgtgttggggactgaaagcctgagccccagccgaaccctgaacagttataaaaacatttagcatccctctgtactgtagtaattcctactgtaaaatatcactctagcttgatgcttttatttacttttttcagcgttgagccttcaaactggcctttatatgctaggcaaatgcctgtccctgactttttgattttttaagggggccctgagttctctttccttagcctcttgagtgctggtatgcagacataggccactgcttggcctgcatgacccttttgtatttactaaaataatgcatgtttgtagaaaaaatagagtgaaattttcaaaagaaaaataatctggcattgtcactgctctgagtgggtgggacttgggagaacggagctgataaaggaggtggactaaagtttcatgcagtcgccaactttattcagaccatcagacagtttataaactctgaggacaaaggtcatgtgagtaaagttatctttgagttcaaactgtagagtcacacggatagttaaacatgtaattgcataatagcaacaagcagtaatgaataatctgaagtaaagacatcgctatccactgcacctgggaggtcaacagcaacacattccaagaacaattctatgttttaagaaaactgaattcatgaggctagttttcttggagagttctcacaaaactctttcctggactgtgtgtctataaacctgaccccagagagtggctaaggcaaggaggatgttgagttgaagatctggactccatactgattctgtctccagccaagacactgatgtccagaaagtgtctcctgttcagaaaatggagttcccgctactccgtgtctccctgagatgacatccacttgggtctaccaatgtagcaatcttttgaacttttttgctcgttagtggtttttttttcctttgaaatccatttatacttagctgaatctatgtttactgtgcattgggtttcaggattcaggaataattttaatgtggctagacagttatttatacagttttaaattttttgtagacatctatgtttttatg

SEQ ID NO: 31970 - DNA, 1812 bp, Mus musculus
gaagcagtgtttaatggttaaggttttgaactgcatggccttatactagtatttgattactacaggacccaaaaaagcgtgatttaatgaaatgctgattgggtagttggagtcagtgaaagcttatcctgaagggagaggggtggggttaaacaattggtgaaatggcttgagctctgcttgggtgtttggagtcctgggataaggccatgtttagtagctgtctgttctctcctcctcacctcagcatatttgaaaagaccttgtcatttcttccttgtacagaaatgtagattttcttcttctctttattaaattgactatgattttatcttttaaatgcagaagaaattgcttcagagaattcagattccatctattcatcaactcctgaagttaaggcctgagcatcagacgtgtgctgccgaaaccatatgttcatggactaaacaagcagagacaagcatccgccttcagagttactgtctgcctgaggcaaagagggcagaaaatattggggcatatgagttagctccagtgcacgaacagctactcagtgttgcccgtgagtgaaaatggctgagtgtctgaggtgcaggcaggaggattgtgctcacatagtgccatagcctgctgtttggaatgaaaagccaacttacaatctccattttacacctaaatttcttttagctgtttatgttatgaagaagaaaaatatattggcctatttttctgactttcccttaaagaagaatgcctttttgtccttgcctagtgatgaagaggaggaaatacatgataaagtaaccggtttgatctctttcattgtacaaggactgcttcagaacagctcatatttttagttatctaaataaaatgcctctaaaataataatttttctctttttttggaaattctgatacatttgaatactaaaactaactattcaaagttttctatatcatacacagccagccagagcaaagacagtttggttatagagtctgaactaaacatttcctaaatttgaaattgaattatttaaacttgaaattttcatatcttttgttgtgtgttcatttatttccttctggatggatacaattgcttctcttgtctctttaaacatgcatgttagttactaaaacagaaaaacacttaggaagagcaagtaaacaagttgaaatctcagttctgaaaatattctgaaaaactgctgtacgtagtctaacatctgctcggttgtacaaataaccacatgatttaatgaaactgggttaatcattaattttcagtatttatgatataccaaactttctcatatttaaacttgggtcattcaaaaagtcaacctttaataaattggataataaatttgtagtttatttacttattttacaatgtgaagagattaagttagtaatttggaaatacagatgaacagcttgtattaatttgctttctggtaatttatcttctgagtggcctttagtactttgatcagaaaagtctcgactagtttgtgactagaagttggcggcactacaggcggttcctgggagagccagggaagcccgtcacaggcattgatgagcctcaggcagtggtgttcccctgtccatgtttaacatgcttggttttctgctctgtagcagtattgttcatgtatcaagattagactgagagtctgaccctaaataaaattgagtgcatcttttgtaatggaagtcgcttggattcctgaagttgataaattaagggcatttcttattttgtgccattgctttcctattgctgcagcacgtttgtagc

SEQ ID NO: 31971 - DNA, 1159 bp, Mus musculus
gtaagcatttaaaaatggtctgggagacttctggagctggggaatgctcaagtcacaggcctgacctggaaagacagggaacaggtagggtgatgacctggctgggctccaagcccaggagctggagaaaagtttaagtggtacaggaccgaagaggcgtggctttggtagggcgttgcaaaaggggcgtggctctgggcggggacttgacaggaaggaggaaggccaggcccgtgtggcgacctggagcaagggttggctttcagcggtggccacaatggctgctcactgccggggcacagagctcggtaagggccagcgggttgcgctccccttcgccaggttgggggtgggggtgcccagggcgatccccggagggcggagacctgaactgaggcagaactcggggacagccctgtcgccaggctctatgcagtcttaaccctttaagcggaagcaaggaagggttaattagatctttgcactatgtagctctgtggtcgcagtaaaccaacccgagtgaaaagcctgccgggtacttgtgtgccattcatttactgccggactcacgtagccattcccaaagttggctgtgctggtggtcatcgccgtctgctaaaaatgattttaaatgcttagacaaaatgttctttttaaaactatttttcaccttattgatactagttcagatatttctgggaaaaaaaattaaaagtctgtaattcaaacgtagcaaaaacgtgactgagccaaatgtcaatgacttaactttgcataatagattgtttgctttgtatcctggaccctcttaggtgtgtgattttgggtaaattactcactctgtgcttatataccggcatctgtaaagtagttatttattaggaagctacttctgtctgaaggtggtttggatagtgtgaggaggggatacttggagccgctggtatatttctctgcacttagtgttgaataagcaacgataatgagcgcactaagttcttttcatagggactgattttgagtggctgtgagtgatacacagggttactcttttcagaagggacttgccagtctagactttagaagtgtttagaattgcatgcttgacaggtagtctctgtaccaggttaatggcactttagtccctctctccaacaga

SEQ ID NO: 31972 - DNA, 1488 bp, Mus musculus
gacacactgtccttggaaggagtggaggctgaccacatcagaactgagcgagtctccacctcctgcaagggaagctgcatcagttatatagatcaggtgtaaattctgctgaaaggcgtactaacgcagtacggagggaagttactattgtgcaatagtgtaattactacttaatgtgtatgcttgcttaattattaattaacgaaactggctttcctcacagatttaccatcacgtgactggacgctacgcggcttatcatgatcttccgatgtcttaggtcagcagccaacccagaaaagcatcttgcaacaaattgttcaaaaaaaaatgtttttgcataattgctaaggttatgtaattttggaacagctaactgactttccccattaaaatctcccctgaaatcaactcaaaacaataaagggaaacaaaccagctgaatctaaatgtggattcagatcaggaaaggttgaaatggtcttcgttaccaggaggtctacatttattaattttgtgaagattccctctgaaaaaaactcagaataaaatgtttctagtagcctgtactgcagaaaattctgaacgtacagtgaagttaagttgcctgagacctgagatcctagggcaggcagggctgtggagggaagggtgcttgctaccaaacctggcacacctgttcagctctgagcaaccacagggtggacggggagagccggctccaaaggctggcctctgacattcacacattcgtgtcccctacctctgacacataataaatacacttaaaactgtgataaaaatgagaatgggtgctatagcaagaggatactctgcccccctgtgctgcctaccaatgtggagccctgccccgggtgtccacctgactctctgtgctatactaaacatttagtaattgttttgctaatgagattgtgatgttgttgcaagaaaatgtggatatcgctgaatttttaaatacaaaaaatctctgtgcttatttatttattttgtttattttcggcggtgccctgggggtgggtggtatgggctggaacttaaaaaatccttccagcaggaggaggtgttgctagtgttggtatacatctttaactccggagttcaggtgtagagccaggtggatcactatgggatcaaggccagcctggtctacagagaaatcctgtctcaaaaaatgaaaaaaaaaaaaattctgggagcatctcctgcctggcttgggagcacctcctgcctggcttgggaggaccttctgcctggcttggaaggacctcctgcctggcttgggagtacttcctacctggcttgggaggacctcctgcctggcttgggagtacctcctgcctggcttgggaatacttcctacctggcttgggaggacctcctgcccagcttgggagcatcactctgcctggcttggtggtctttgttgtctttatctctttaaattatttcttttaatgaagaaaa

SEQ ID NO: 31973 - DNA, 1199 bp, Mus musculus
tgggagcagctcacaaccatgtgtaattcctgggatttgacaccctcacatcagttcacataaaatataattaagtatttttgttgttgttgttattgtttttttcgagacagggtttctctgtgtagccctggctgtcctgaaactcactctgtagaccaggctggccttgaactcagaaatctgcctgtctctgtctcccaagtgctgggattaaaggcgtgcgccaccactgcccagcccagtaattttttttttttttttttttttcttaagaaaaaactgttaagagcttgatcagaagctggtttgaacagcagaaatgttcaaaatactttttgtgtgtgttgagcactaatctaatggcatttgtattatttaatcttagacttcccgtgtgtccttaaaaagacacacatgaaataatagaaaatgcagcccagtgcagaatagggcagagatgaactcaaacagacttaagaaagcagttccaggccaggtcagcaggtcacagagggaacccagtggatgctaactgaaataggacacatcatttaatctcgtagcttccagcttctggctttcctcctactctgaggcagttacccagcctgtctacagcagagctagcctctggctctgactcttcactcttaagcttgttggtgctgtgtcttttaaacatttttccaataaattgcatgagctttacaaaatacttgtagcttgttttttgttatcattactattttttgttgttgttttggttgtagagtaatagtaaaatataaaaggaagaaaaaggctcaaattagagtaacctaaacttcatcattttatctagctagtgtccataaccctgaccactgaagctcggagctgttaatcacacttatcatgactctgcttgactggtcgccatggtttgtggctgtgcgactctagctggccttgcccttgcttgtccagtctcagatttgactctctgcctctgtgtctctttttcttgagtgaaatctgcttttactcagctttcgcacattataatgagccagccttccatggcctgtcgcatcccaagtttgtcctcctatttctcaaaggtcagagatcagctgtttattttcctgtttctagagaaagttctgtgacttatgtggtctgcagcttactgtgtgtgcatatatcacctttatgta

SEQ ID NO: 31974 - DNA, 1208 bp, Mus musculus
ccagtgagcatccagtattgatagtgtagcagaagccaatggcctcgagccagaacggtgactcattgcagtgaccatttgcaagcagagctgcttggacaaaaggacattctgtgtgacatatcgcagttcagtggtgggatttttttcttttctttttccttttttaggggaggttgcaagggcagaggatagatacggaaggatggggagatgaatggagttggggtacatgatgtaaagttcaaaaaaaatcaataaaaagttaataaaaataaaaaagggtttaaggccagcctcgaaaacaaaacccaaacctgtaaatggttagagaacaattaactttatgctaatgtactgggcatttatttaaaggcgaccaagggatgctgagagcagagagctattaggatctcaacctggccagcacttttactgataatacacctctctcggttggactggttctgttctatagaggcagctgtccctactcgacatcttatatcattggcacctccaacatcttgacatctccagtataatcaagatttcactctcacaacttgatccaatggcctctctctctctctctctctctctctctctctctctctctctctctctctctctctctctctctctctcagcttccagtcaagtgcttctgccataggcctggcctgatgagcttttcttaaccaaagagggagcttccccaaccctttactcttgtcttcttcatgtctctaaagccagagccaagtatccagtgctgcccagttctgagacttggaatataatctggcagtctttttaaattatattttcataaactgatttttttattttattttttttctttccattttttattaggtatttagctcattatcataaactgatttgttgatggcttacattcccatgactttaggcatttagggattttttaaaaacaaattagcaactagatatttttcaaacattagttcatttaatgtttataattccataaaataagaaatagtgttctcattcaacacatgactaagccaaatcttaaagagccttttgcaaagcgggtaggcagactagagcctgggtgtgagacctctcccgcacaccctgtgaagctcgctgctgacctggggacctttccttccctgccctcttcccaaagcctctctgttgttctccctgccgac

SEQ ID NO: 31975 - DNA, 1157 bp, Mus musculus
tgagtaatgtgaccttaggctctagacagcttggcaataagctctcttgtagtctagaaagcacagtggctagagaggactcgtgtgactaccagacagtggggacacaaggcacccacagccttttgagctcactgcttcctaagctctctgtcttccttatgcttacttctgttttttattttcattttgggtatgaatatcatgggtgttgggcctggggttgggggtgcccaagaggccgaaagctgaggtggatgtgagtcacctcatgtggatactggaagagcagcaagcattccgctgctgagtcatctctccagcccctgatggctttagtttcaattaattcattataatagagaaataatttcatgcacagcacacatgtctttagcagatgttttttaaaagaaggaatttttttttcatttatatataaatgtctggaaattgttacaagtaggcattttcattcacaaactcttattatgatgccagacattaaaagaatatggatatgataacctgggtagcctggagcttgctatgcagaccgcactggccttgaactcacagagatccaactgcctgtattccccccgcccaagtcctggggttgcaggtgtgcgtgccttccttctctgcctttccctctgcattgcagtattttccataatcacaaagagaaggtatatccctccaaaagagaacttctcactgaataacaataatataattttacataccagtaagaactaactaactgtagtgtatgtgcctcatagccaagtgtgcacccagtcgttacatgtggtcccagtcatatctgttgaaggactttgggggttttgttgttgttgttgaaaggtcctgtccaacccaagctcccttagacctgccgcatgcctccagagtgcacaggtgccaccacagctgctggaacagtattgacgcattgctgccagtcacaagtccgtgtcagagactctgcaagagccagagatggctcagcagttcaaagtacttgctacttcccagaagacccaggttcgattcccagcaccatgttgggtggctcacaactgcgtgtaactgcaggggcagtggatttgactcttctgtcctccttgtatgtgctccggcacacacatagc

SEQ ID NO: 31976 - DNA, 1158 bp, Mus musculus
ttctatccatttgttggaacagcaatacaagcaaattaaccctggactatgtcccaccagagcacctggccatgtatgtgaagtccaggccgtagttcaggtttctcatattgccctggcagggagtgggtctctggtggcattttctctcagtctgtcatagcatcatccacacgtgcagcagaatctgcagtgagcggcctgtgccagccctcctggcagcgctgcagctgtgccctggagacatcctgcccacactcaggctgaggagccagggctgccctttggacaaagccatgattatgatgtagtctggggcggaggcttgacatttcgaaaccgttgggttggagccaggatagagcgagctgagggtgacttccttcattgcttctttggggcttttttattattattactgttcccaatagtaatgtgtgtactgtatatctaatgtgtatgtgtgatggatatgccacatgagtgtgccatgacaagagtgtgaaggccaaaggacagctttgtggatccagttctgtcctgcccctatgtccattctgaggtttgaacttgagttatcagtgagggcataggcactgctaaactgtctcactgtccctcacacacaccagactccacactgtgtgcacagaacctcccttactcagaaatttgtgcttacaagtaaatcgttttcctggaaaatgggagtgagaatctatacgccgtttctatatgttttctcagcatccactgcctcttacaatgctgggagcttttgagttcctataaactccagagtagccctggagtaacagcagcatgagctgtcaggcaggcagtcttcaggtgtccccagccggccgcacagcggcctctcacctgggctctgccttcaccctgtcttggcctttgtagtagctctgcgctttgactcgaagctcctgtggttgtgggttggcttccgtgctgggttgaggagcttcgctagagttaggaatgaccagttgtgccaccacgcccagcctcatatgtttttttaaaaaagttatttttgtgcctttaaaaaatgacttaattgataatagatcatgcagggcagggcgccttctttctgggtcaggttcactgctccctgctttcagtagcagagggtgt

SEQ ID NO: 31977 - DNA, 1320 bp, Mus musculus
gtgcctgtccgtatgttctgggttagggttttccaggccatgcctgtcacctgctgttctgcctcagtcactttgggacgtagcagtcatgtgctttgcagatgtcagaagtaatctcccgtcctcgtgtttttcagctgcactggcgtctgttgagagctcacagagctgaagctgtggacctcagtggtgtaagaagatgtacaatataccttaactctatgaaattcatagttcggatgctgctgaccacagagcatcattttatcacctttggaaaatgtttattccaaactagctttaatggcccgtacgtgcactccgtagtgtcaaggtcaccgtcctccgcagtccgcccacccgcccgcttgctgctatttgagttcagagcgtatcagtcaggtgctttctccctcatgctccatcagagcttgcttggttgcagttcccaggtctggatgcttaagtctcagtgaacttgggtctcttgcttttcagtgaggctatgctttccttcgaagcttgtttgcttccctccttttttcttcccattttggcttctgcagtacttcatttgacacttgatttgtaaaaattttatataaatatatttaaaatgtgccattttctcactgctcagtgaagtctgtcctgttttctgctctaacccctcctcagtgagactgcaccatcagcagtccctgcctcgctccgtctgcttccacacaaatgctgttgcttagctttcctttcaaaagccaaacaattacaagcgtaggtattttgaagtactggacatttatgtcattgggatagatgtgtacagcaataagcaggcttttagatccagtacttggtttgtgtacagatgtaattatgttcattgtgtggaagttacacagtgaacacatgtaataaggctgcttactagagtttaatgcaaatgttcatagctcatttctttttttatcatgttaaataaatgttgatgttcttaaatcactggtgttagaatctttttccttttctatctatctatctatctatctatctatctatctatctatctatctatctatctattgctctccagggtttcaggatttcaccatgttgctctggctggcctggaacttgctatgtagactggctttgagagactgcctggctctgctccccaagtattggaggtagaggcaccaccatgtcttttcatgcaaaagtagagactctgagaccaggagtgtagctgagaggtagagcatttcctcagcatgtgggagccctatgttcaacttcaacagcagaaaaaagaaaatg

SEQ ID NO: 31978 - DNA, 1211 bp, Mus musculus
gctctgtgtgtgtgtgtgtgtgtgtgtgagagagagagagagagagtgtgtgtgtgtgagagagagagtgtgtgtgtgtgagtgtgtgtgtgtgtgtgtgagagagagagagagtgtgtgtgtgtgtgtgtgagagagagagtgtgtgtgtgtgagagagagagagagagagagagagagagagagagagagagagagagagagtgtgtgtgtgtgtggcagtggtgatggttagattttaagatatattcacagtggatcattctctcaagctatcttccaattcttggcagtcctgcctctgccccacaccacccagttttgtatttgatcttgaggcactgttgtatttttgccttgtactttattgccaactaatctcaaagcattgcagtggcatggagaatgtgctcagtatgttagttgtaaggagcagaatgttggatgtattcagtatttataagatcgtaatggttttggtgactttctaacagtaacagcccttttcttctcttatagcataagcagtacgctaatggacatagacagcacaatttccagtggacgctcaaccccggccatgatgaatggacaggggagcacgactgcttcaagcaaacacattgcctataactgttgctgggaccagtgccaggcatgcttcaactccagcccagacctggcagaccacattcgctccatacatgtcgatggtcagcgtggaggggttggttttgccattctttttcactctttgtttgtttgtttggttgtattatttataattgcaaataggattttttttcttcatgagaggaattggtgaatttccctcttaaatattgttattaccctatctgcttgctaggattacatgataaaaattttagatttcagtttgttcctagataggttgttttgaagaaacaaaccctttaaagctgtagtagacgtatataaatggacacagtgactcccaaggttctggcactggagaggagaacatctgggaaccagtgtcacttgtgcgactcctgtgggaggcagcctgagagatggtgccagggttgtacatgtagccagtacatgtaatttgaagggattagagccatcattccagccccctttaaaattttatttacttttatgtgtatagttgcttttgactctacatagtgacatgctcaggttctggtctcctagaactccag

SEQ ID NO: 31979 - DNA, 1089 bp, Mus musculus
tcctagtgctctgcaggaaaggagggaggctccgggaattgagtccagcctggtgtaaataacaaggtggaggccagggctccttccatagggagaccctgtcatagtgtaaatagaagatctggggatggctacagccattagccggccagcttgctgttcctgttagacctggtttgttaagacacatcttttctctaggaagatgatgctgtctatgcttctgtgcagtggacagagaacagccaggccactgccaagaggtgcactagttaaataacatagttagttttgaagtgaattagtgaagggaatgcttttgttcgttcctagagtcagttacagctctgcttacctgctgagaccatccatgacccacaccacaagcagtaacgccaactctttttccttttcagtgtgtagttggtggctgcaatgccagctttgcttctcagggagggctagctcgccatgtacccacacacttcagtcagcagaactcctcaaaagtttctagccagccaaaggccaaagaagaatctccttctaaagctggaatgaacaagcggaggaaactaaagaacaaaagacggcgctcattacgtaagtgctcacttagaaaagtctctgtgggaaaagaatgagactctagtgagaaatgtttgtagatgctaaaagaggattaagtgtatgtggttttagaatataaaatgcttatatttagagaattagataagtaggtggtagctagtttgatttgttataaattagaaacattgaaaacatggctatatttgtttctataagcactttagaaaattttgagcatgtcagaggtaaaaataaaataaattaaataccttgataacttgataaagtataggatgtgtgtgaactgtgaaacaacttgaacatatgaaaattatgctcttaactgctgggttctatataggacactcctttgatattttgggttaaaataattacacagtaggcttacaagtgttgggagttaggaattagccgtaactacagagctgggcgggccccaggcttgactctttggatccactgatcagcacctctgga

SEQ ID NO: 31980 - DNA, 2596 bp, Mus musculus
caatgggcttagggaaagttgcacattacagtcaaccccttccttcctcctttactttaagtccagtatttagagtactatttatggctagtgtggacattctgtgagtgaaggaggtcttctgtggaatatattaatatatactgcagtccacatggcatggaatggcgctgtgggagactgcgcagacactctctggcaactcagtggaacagcttctgaaaaggctttgcatgctcgctgcttaagctgctttttttcttcccccctagtgattacagtagttttattggagagacaaacaattgcccttaaaaacaccaaaagcactgtaagataaccatcttgacagtgtgtattgatttgaagtcctgatagaaaatatttagacagtggagattatcaaaagataactaacctttcagttatgataaatagatgtgattggttgccatttgtgttcttttgcagaactctgataagaaaaatgttcaatttgtatttaagcaaacagtgaacgacatttgcaatcaactaaaaattcgtctatcgaattaggtctgagaatcactgttaaagagtattgccgtgtgtctggtggctcccttttcaggactagggtctctctctctctctcatggggacagcgtgttaatatttacctacataactcttttgttaatggtttttgaaaaaaacctcagtttcaaattatttgagtaatctccatattttcatttaacctctgactctttaatttttttcctgaggaaagtgtttttttttttaattttttttaatgttaaaaaattgtattttttttaaaaatatcttcaaactgaatcttttaagcaccaaagttggttttgaaaaggaaaataaaatcactttcttgcttggcaggcaagaagccatatggaatttttttaacttttacagaaatgtgtaacttgtcagtactgtatcaaacaaatgttgcatagagataatagagcgttgcttgtaaataattcagcagatttgtaatatatttttctattatgaaatgtactgtagatgttttctagaggcatgaaagtcaatgtatatattatggtagaaataatattgaaggaaattgtaattcactagtgctgccagagggattgctaacaaagcacctttaggagagatgtctgcagactgaagggactgtgtactactgttaatgtctaagaacaaagcattgggcgggcgtccttccagaaagtctctgagggaggacggagacccataatagaagtttatggcactccctctgacagtggctgagtcgctgttccttactgttgggagcggtaccgtaaagtaagcgcctgctatgcagtcaggctgcagaaagcactccttccttggagtcctcactccctacagtgacagcaataccagcagtttttactctaaattttttaaagaatagacaaatataaatttaattctttggttccaaaatgggaaagattccatgatacatagatcatttctcatttgcttaaaaaagaaagaccacacgcacaaggtcctaaaaggatgggggggctttagcaggtgaagaggtaggcatggaacagtcatggagcctgagggacgagggggaagcactgcggatgggcacgctcgctcgggaacggtcggctaagacgctctgtagctaacaggagtctattttcagaagaagaaagcagtgtgtttttactatgtttttccttttgcttaagcacttcatcacttgttttattctgtatctgcgaagtactctccgatctcctatgttcctttaacattttggtttgttaaaatattgccaaatagagtgtttgagacatatagtttgtactagtatttttattttacttctcatgttcttgtaagtcattaattgaccgatgattgtagaccttgcttgagtattttttctaataaaacaaagcaaattatacttagcttcaaattgtaacaattcaatttaattttaggatgacatctggaaatacacattcaacattttctttaggtgcatagagaacattcattactgtcaatgtagaaaatttgtgatgtcaaaccatgctgctggttgttgattagcctctgcgtgcccaggtatccagggtccctttgcttgtcattgacttgggcttgacacttgtaagtgagctagtttggtaacttgtgcgtgtgcatatctacatatacattcaaatgtgattggaaagttaagtctgtaacatccattaatgtttcttcttacccagctccgatcttgctctgcctgtctgtatatgacatttatggtggacctgggttgtttctgccccaaatccatgtctggacagtacagaccataggccctgctctcattttcagagctgttgcttgtcttttcctgcctattggagtactgagacttgaggggcccgagagcctgaggtgttacgtctgctctatacagaggtgcttactcatatcatgtagctggtaacatttttggagcagtgaacacagaccacacagtttgtactcaatatggccatgttgatagtagtagtgagcacgg

SEQ ID NO: 31981 - DNA, 1368 bp, Mus musculus
tgtctttcagggattgaatgagagtctgtaagtcagactctgttacaaccacaaggaacgtttgttctagcgaaaagaatcttgaagtaggaaatgttgtaaaaattttaaattctttatttttctagtaaacctgttcatacattaatgtggttgcacattaattctgaatttcagatgaaaagaaaataaagtggacaatacttaaccctcaagtattttcacatgtgtctatctcattgaacataaaaagccgggtgtgctgactaaagccctgcatttgggaggacgaagcaagaggatttccaagagttcaaggcccgagtgatatcctgaggcaaacaaaccaaaaaggaaagaagaaatactgataattagagttttttttctctgtgtcacacattagggaaataggtgccattgaggtggctctcgatgaaggtgttgggcaacaggcatggtggcctgagttccatgcctgggagtcacgtggtctgaagcgagaacagaccggagaattgtcttccccaacaagtaaatgtgcaaatgatcttctgcaaaggtagaatttgccagagttaaaaacatggatgatctgttgtttgcgttgaactgttttcttgatgcatggttaacaagagatgagataatattgactgaatatcaaagtgggtaaatgtggttgaagcagtgtaaatagtttgagtaacagctttacttttttaatttttataatactcctgtataaatcctaaaggcaaaccaaattttagacggtgtggacttcgagtagaaagcctgacacagtgatgtgtctgacaagacctcaggttgcagagatacataaacatatgtggtttatttgtaaagaaaatttcaaaccatatgttatttggaagtcttttttaaaaagcagagtggcactttgtgaggttttaatttaagatatttttctattctatttcataaaaggttaaaaagtttgtgtataaatattttttttaattgttcaagaatcttatgacctggtgtagggcattttgcaattctaacactatagctttaatataaataacatttgtagaggttttctttgtaataaaggcgagaatattttgtaatttctattatttcctttagaacctgaataaccttaaatataggcatgaaatgttgtattatgacttttatattgttaaaatttaaaaacaaaacttatccaactttatttctttcccaagttaagtttgtagtgtcacacgggactgttaatctgcaaagagggtgtaagcaggctagagcaggttttttctaggtcagttgcgtctcagagatgagcaaggtgatgatagatgtgtttaacctcac

SEQ ID NO: 31982 - DNA, 1163 bp, Mus musculus
tgctggcacggactcaccctcagccacaccctcttttattaaggacagctgcccacatttgagtagacaatgtagacagagctgatgattcccaggggttctgagactcctgagctcgtgagcaaactgaacggctgaagttaccagggtacccattggccactctcttgcagggtgcactgtctgaagctcgtcaggtggaacaagtggattcgaagggggaagagcaaagctcaggtaactcccagaagtctaaaagcaggcttcagccatctggctctaagaacgcaggcgctaagaaaagaaaacttgatgatgcttgagtgtcacgtaatattgtacaatgtaactgttctgtatgttcatgtctgggtcatttttataatctgctataatttttgaaacaacttcatgttttatacatataaagctgtattttcagagcttaccttatacaataatgaaaaatacaacttttatgtaaagttgtctaaatgtaatatatctcacattaagtccacataacttttgtaagcccgttcgccttgctgtaactagctgtcgtcttctgacgtgactctcctttaaagcagtactatgctgacatgggctctcctttccaaatgggtgacattttaagctgagcaatgtagatgacttctagtgagaagagttgctgttataattcagataaaacagtcctcagcaccaagtgtgtcagcaagaatggcctgcatattctaagtaaatcacgacagcagcctcctgaggccgcagcctgactttgacgttcaggcaaacagaggagctggtgtatttgtatgagtcaaggtttatcgtcaactctagaggaggagtgttcatctgcaaatgagtcattaaacgagttcatctgaagaattttctttatttctttccaacatccagtctggtgtctgcattctctacttgagtgcccatgcactccgtgtggttatgtttccccatgtactttcttttctctttattttgtactttgtattcctgaagagatttcaatttcaatcaaaataatcctctatgtcgatatttggatctaggagatcctccccgtatgatgaaaggtccatttggtttaagattaaattttcaaatgtttcctctaagtccgtttcaccaattaa

SEQ ID NO: 31983 - DNA, 1101 bp, Mus musculus
aacacccatgtatacatacaaacaattaaaaactgttgtacaaaacatatttactattaaatttaatgaaatattttaggaaattataattttgtctatgtgtggagattattctcaggcctggtctctaaatgcaaaacactttggcccaagtccagcctttaactcagctcagtcatgctgggtgctttagctctgtgacctccttagtcacccctgactgtccttcccgtgcctggctgagcaccaccctcctaattttcagttattggcaagtgtttccattaggttctgatataataaccataaaacagtcactatgctttgttttgagtacttagttatacaaattacaaaattactatgttttaatggttcataaatattaaaagttttatgcacttttgtgatttgtatatattctggtagctttatgtggaaagcgaccattcacgtcccatttatagtctttatccttttaatttttctctttctagattttccatggttcggaaaggtaaaagatgtgctgcaaaatgtttttaaactgcaaaaattcagacctctgcagctggaaaccatcaatgtcaccatggctagaaaggatatctttcttgtcatgcccacaggaggagggaagagcttatgctaccagctacctgcgctgtgctcagacggtatgtacaggaggaagtggctgatacgactcgaacccatgcctcaccagactgtttttgtctactaccctggctacacgggagaaagagcttatgtgaggacagagagaaatggtgaagtctgggttgggcatagagagttcacagtgcttacaggcattcaggtaggcttcagtgggagagggcatggggtgagatagctctgggccaggtgagatagcctgcgctacacaaatgcctctgaacccaccagagtgaactgtgtcctcccttgtggcatgggggagaggagggctctgaatgacatctgaagcaagagaaggaggaatatgcaggaagctgaggctagatgagcacataatgtgtgttatggagcataatgtgtgttgtgtgtggagctaggggcataatgtgtgttgtggag

SEQ ID NO: 31984 - DNA, 1202 bp, Mus musculus
gcaggttatcacagcactgtttgtcacgtcacacatttcatcagcttgcttgggatgactggaagctgttatcatgcactgcatcagtccaaacacggaggtgtctgtgcggttcagttgccaggtggcttgcttgcagagacttaggagactgttagaccagttttgtgtgacatgatgagaatggcaactgtcatttattacacatttagcttctgaccagggcccgtcaggaactccctacgtgttgaatgaaccactgaactttcccagcattactttgatcttagtaagagcatattatggacacttggtagaaggggacattgaagttcattgatgttctgctgagatcatttagctgggaaggggactagtccgaggttctgactctagaacatgctcttagccctctgctctcctacttttaggcttgtaatgtagacagaggactttccagaacccaatagggaacctcacagtgtttgttctctctcctctctcctctcccagctttgacagaggaactggaatccgtagccagtgagcttcatgccattgacatccagattcaggaactcacagagaggcggcaagagctccttcagagaaagtcagtcctgacagggaaaatcaaacagtacttggaggactcttcggctgaggcgagcagcgacttggacacatcaccagctgcttggaataaagaaggtttgccactctcctgccttgccattgtcgtaatcaagaatgaaatcactctgtggatcagtgtgtaccgggagataaagctggcatggggaacttgcaggcagatattctttattcatgtgctataatattttacatgtaaacttggaacttgggttttgttttctgtgtgtatggtcttagtagcaaacatcagtgtcaaaaaaaaaaaaaaaagaaagaaagaaagaaagaaagaaagaaagaaagaaagaaagaaagaaaagtatatcagctaagattttaagcattaactaaaacaaaaagttagctaaaccctccaaacagaccctgccccttgggttttttctttgtttgtttttggttttgttttgttctttctgagactcaatctttaaccctggctgttctgaaactaatgtagaccagtttggcctccaactcacagagatctgactgcctcctgaatgcctggattaaatgcatgtgcc

SEQ ID NO: 31985 - DNA, 1114 bp, Mus musculus
tgtctgcatggccaccccccaaatcttccattccattcatagaaacctccacagagacaactgcagcatcagggagtacatttgagcgtcacagtttaatgcaggcaggccatccaggccttgctagtgtctgcttgaataggccattttattccctgttcagtcaagttggaacctgctgtagatatggatcttctatcccatcacatcttcctccttcatggagtggagataggcaaagaatgaggcctgtgagggcagccgggcctgccaacatgctcaccccagtccctgttcctgctgctgggcatgagtgcagggactcatgaggactctggtatctgtcacatcagaggccaagcaaactcctcactagggggctgtctaaccctctctgtgttgcgttgtctttctcccctaggttctgtttgtggccggcttggcttttgtaattggtctcgagagaacgttcagattcttcttccagaggcacaaggtgaaggccactgggtttttcctgggcggtgtgttcgtggtcctcattggttggcctctgataggcatgatcttcgaaatttatggattctttctcttgttcaggtgaggcccttcttttctttcttttcgttcgtgagccagagtctgagagaactattgcagaaaccaaggtagttgggctagtgtgggagacttttcctgaatgaccgctacttatattgagtttttattgtaagtttaggtcagtcaactaaaaaaatgtttcctaaatgtaaatgactgcctgagtgagataataaagtatttataaaatatcctcagtgctacaaaattcattttattgccatttgtgaggtgtgtccagcatttggtattcctaacaggatgggtgggtacgtggatctgtcactgtgttacataatgttgcttcatagtggctgctacctgctgctacctgatggcagtgtgctcagcgcacgcgcgtggtgaggaacccggtactgagcactctggaaatgccgtcagttagccagaacactgtgcatgtgagaagacagacagtgctcatcagtcacctaagacataaaaattagttaaggactagacctgtcttagg

SEQ ID NO: 31986 - DNA, 2656 bp, Mus musculus
caaagtcccaacagctgtggcagaagcagcggcagaagcagcggcaggcttgtgaggcctgaggtccgaagatggggaggatgaagcctgtccgatgcttagtgacttgaaggctgtttcctagtcttgctgcagtatgtgaaacagccgttcgtacagaaccatggtgtctgttactttctttttttttttagaagattcaggaacaccaataggcatttgatttttttatgatgtccattgtggtggcccagacatatctaggtatgctgggtttctaataatgatgcctggattggattatgtcatctccatgtatcgacccaaggaagcccagtttcatgtgtgaatcactcctttttttttttttttttttttttttgtaaacatagataaaataaaacttttgtggtccttttgaatcttaatattttggagccagataaaaatctgaactacatagtcatttttgaaatacgcagaggtcattctgagctgtcacgtcctcagtcatagctgaccacgttctttcttgactctacagcagtctggaagtgcagatctctcgagtgtggcctgggtgtgttcatacaatctgtgccgtgcagaggccgagcagagagcgttctgaccatggagtagcctgctgcagaggctattggagcagttttgggaccctaaaccatacacaccatatgagttctccatgccatgatgtagtttttctctttgggttcttaatgaaatctggccattgtctcccaccttgctttcataacttacagtgacgttgaaggtgtgcaacatggtaaaggttgttgtgtgactgtgagaggggctgattacttcatcttgatttttcctcttttttcagctttattgcaatatccaaaaattagcatgcaccgcatctgcttccctcgctgttgtccacctgagttaggaagtaaaagcttttcgttctgactaaattggccatagcttcttataaacaagacgctggggaagcatgaccttcccatcgtctgccgctggtttgcccacaggaaccgtgatgttttcctgtcggacaccggagcacctcgtcagacacagcactatttatcttaccactaatgattgcactatttatttttaacagtctcgaagctttttaatgcataaaatcataattgaaattatatttatttacaagccacttctataagacattacaatgttgtttttagctaaatttctcagtgccaggagaattcccagccttgcctatctacagaaggaagaactggttcgtagtgggatggctcgttcttgtggatcactgtcgtgtttggtacttgcatctgacttatggtgtaacctgtgaaaactcgataagtggagaatcctacctcaatagctcatgggataataaaagacctggcgttgtgtctgatgttcctcaaaacgtcacacctttcctgacgtgtcaatgctatgctttgagaactgacctgtgtaaggtgccctgtatatttataataggctttggcctatatgattgacagtggctaggtatcactcgtgttagaataagagtctgccattttactcctttgtagacatgactctatcaaagtggttttcacactacagcaagcatccctttcagcagtctgatttcagaaaacactggacctgggaagaatgagaggctcatagtccttagtaaggctgaggcagctttcagtttagggtgagactagtctgcagtgagcctaaactgcttggcctccctcgcggcttttctcaagcagaacctcgaggctctgcttttaaacaaagcagccctcagacttctagaagtcctattgtgagttccctcaaccctacccccttcttaaaggagccttctgtctttaacaaaaaacaaacagatactttggttattccccccaggtggaagacaaggtccagtccttagccttaagtgtttctgtcatgttcaagtgtatcttctgtaacagaaacatacttgcagtgtttcttttcccttctaattctctggagtgcagctgctgtagaagtctcatggtcaaatcatatactctaacaatggcgtattgtaaatacacttgtctgacctcaataaaagggtacttttctattcagtggtggtcaagtttatctttactttgaagtttttaaacttaaataacactataaaataacatacctaacataccctatttttaaaaatgggcattgtgtaattttgtctgtcaaatgcccttgaacatttttatatccaaatcgcttaaatgtggtcatatagcaactattcccaaaaacacatttggaagctatttaaatttatgagagaatttagagtggattgagagagagcttgggagttctgagctctgggagggatccagacttggttcctgacaacgatgttgaggctcatgaccttcagtgcctgcaggtccaggggatctggggtcctcttgggtcctctagcaccaagcatacatgtcgtgcacacacatgcagtcaaaaaactcatacacataaataatgaatattcagtgccttgagccatatgctgtttttaaaaatgtcaaactcctctgggcatgttggtgcagacaggttcctgtgagttctggggcaa

SEQ ID NO: 31987 - DNA, 1278 bp, Mus musculus
tagtacacataaactcacagatacatagtaaaacatccttttgatcttgtttgttttttaagacaagtttctttgtatagccctggttgtcctggaacttgctgcctagaccagaaagcaccaatcaatcaatcaaatcttaaaatgagttgatagaaagttactcattgagcaaagagttaaaagccatggaaaggttcatatagcaaattgtattttagcagaaaacatttgacttaaaaactaaatactgactactttcctgtaactagttttgtcgtagaataggtttgcacagtctataaatataaatctgaactcaaaacccaagtttatgggacatatggaccaattagatgaaaactagggaattaatttgtgcttatcaaacttgctatagttgtttggatccaacgtgattcttcagatcattccctcatggcctcattggatgctttctttgctctcacagggaatgtacggcattgagaatgaagtcttcctcagtctcccgtgcatcctcaatgctcgggggctgaccagcgtcatcaatcagaagctgaaggacgatgaggtcgctcagctcaggaagagtgcggacaccctgtgggacatccagaaagacctcaaagacctgtgactgccagtctctaggctgtagaacacaaacctccaatgtgaccatgaacctttagtcttcagccatgtatgtaggtcacagtttgcttcttccctgacatgtgatatgagctcacagatcaaagcccaggcttgtttgatgtttgcactaggagctcctgatcaaataaagttagcaattgcagcatacttctgcctgcctttttctctggttccttgagatggtgtctccctgtgtagccagcgctagcctggaactgcgctcttctggccgcatgcagccttcctggtgttgagattacaggctcaccttgtgtgttctttaatggtttctggaaagttgtgatacgtttcttaaatgattcttctagacctccgatgtccttaaattctaccatctatgttcctgtaaccaccttccaggcagtgccagaatattcgatcagaatgtgccctatgagtttcatgttttgagaatatatttacagtttgaaagttttttgattatgatcatgtatgatcacatgtaggtatgtgcgtctaagaccagctgagtaagataccctgaaactgagtcactggcggttgtaagccccctgacgtcagtgttgagacacacgccagggtccacagcaagag

SEQ ID NO: 31988 - DNA, 1156 bp, Mus musculus
gaccagagtactccattagtacagtctgggcccgggagaaggctggtgtgtaatggcagtcacttcccatctggtaaccagaggttgctccctaggatatgtctggtaaaaagagagaaatggcctttgaaagtcatttaacctctaactctctaacctccacatgagagccctggcacatgcttaccaccactaccccacccacagatatccattgacacagctgttccaagtctaccgtggcaggcagtgtgtcagaatcggctagtggactttctctagcacatactgtggagtcacactgtcaccaccaccgtcagtaagctggacgtgtcaggagtcgatgtcttagggctgctacagaggctgtacaatccaggcaaagggccagcaggctctgacacataacactttttactgtttgctttttaacttacacattttaaggaagaacttgggggacagtgccactgacagagagaaaaggagccacctcctgtcccacaccagcagcccatgcacacgagtggactgtgccagcatctgtgtttagtggcatgttcagagctgtgtgagatgtgcttagctgatccctgctgcatgcacacgtggaactagttgcctgaatcagcatcaagcctgtagagttgacagcctggtgctatcagcatggtcttaaagaagaaaagttgctgatgtgcacagtgactacacacagattgtgcacgaagcagacacggacagatgacaccggcctcacgaggcccacacgagcctgtgttcttgaggtgctgggataactttggagcccaatatagagaacagtccaatagcacatttgctatagaaagcaccacccatgtgatacataggattcctgctgtacccattttccatgaggctcaaagaggcttccatatgaatgactgtgtgctcatcatcaaagagtgaactgtactaacattagagagaaaaacagaaggcttcgcctcatataggaactgtgccatttatgtaggcataggcggagagtcagacttcagaaggcattgacaaaggagtagtgataattatcctggatcgtaacgtttgtttgcattaaagaaaatgctgctgtggtgaatatgtatggcttaaacaccccttcaccacacac

SEQ ID NO: 31989 - DNA, 1099 bp, Mus musculus
ctatggagataacaaatacctcacagttcctgtgctgtgtctttgaaagtctggaattccgaagtccagaatatgtctataaactcctaaatgtgaggccacaagatttagtctcagccctatacaactcctgttgtgtaagtgggagagtcttatatctgtacatcacacacacacacacacacacacacacacacacacacacacgaatagtaatagtgtctagtatctgccttattctcagccttaacatgtcctctgacattttcacacacatcccagagataaatgattgacacatggcacaaatgaaaaggttatcccgactactgaaccttgctcactgtaataaggacggcatcccgcgcctcctccttgttggggttctcgctgctgctagcatttgtagtttcttctgctgttatggcaaaagaataaataacataaagaagtgagctgtaatattgtgagcatttgaatagcagcccttgactctcacttgtgggagcacaaaagaagaattgcattttacggttgcttgtttatctagacggtcagtctctctgttgtgttaaaagccttcctggatttgctttatggttgaagctgttgggactcaatcaatgactcacagttgcttgagagttttatggtgtgatatcctgcttctgtgtaattagagctcctctggatatctctcactttcaaatgtgtgttatcttagcaactgtttcaagataccaggagatgtgttgccatggggtctttcgggttaggatgaagagatgaaggatgtggcgtggactaggcagctgtatagagaaaactcagaggtggtacctggtttcccatgtgggtctaagcagtcttggaacctccaggttcctgcctcctccaagcagtgccctcctgggtgcctgagcttggtgaaataaacctacacatatctctctgtcacctgccttttgagtcatactctcaagatgagttatagtttagttttcctatcaagatggtgggaaatgtcaccttgatgttgaccactggatgtggttaccatatacgatgtacacagcaagagttggtgtcaacttcctgt

SEQ ID NO: 31990 - DNA, 1152 bp, Mus musculus
tttcttctagttttcattcaaaactcagacttgttcagttgctgtggccttacagtgaagttttaggattcttgttgctattgttcgtttgggatagtggctgggcctggatctcactgtgtagaaaaggctggcctctaactcacagaaatctgcttgtctctgcttcccagatgctgggctattttaatatctgataaggaaccgcttactatttcttgtcataattttctcttaggtgcaattgagatagtttttcaacttcactgaaacttcttgagtttcagtaatttattcattcttactacaaaattgaaacttcttgcctgagcataagatatatttcattaatattcaaagcttattttacttccctacatagagtattcaggcttgtttttcatagattgccatagttctatggagataactttaaaggtatgtcaagcccatccttcactcttctgtgacctcaccacaaagcaccctgcttgccctgcagtgtctgagaggttgttgtttggatactaaggtactgacagttattttcatccagctctctcattagaagtctcacagtaacagtttcctggctcgtcccttccagtttgctaggaatagactgatctgtgtacgtcgtttgtaaatggcgatagtttcctctttcctcacagttgtttcttatgcttccctgttctttaatgaggacaagtttggtgttcccttctgcgtttttcatgctgagtttcattactttctctccttacttggctctcagtactcattggcttctggctctgtgaccctgagtcaacggctcacttaaggaacagagtaaaggtttcagaggcagagaagggctgagcaagggttcaaattcagggtcctctgctcccagctcactctctgaacactgccccgtgcaacctaagtagaaaggacgtggggccagcaaggtggctcagcgggtaaaatggcttgtcacgggagcatgagaacctgacttcagtactggaaacccacgatggaaagaacttgacctcaaaatgctgtcttctctctctctctctctctctctctctctctctctctctctctctctctctctctctctctctctcacacacacacacacacacacacacacaaata

SEQ ID NO: 31991 - DNA, 1103 bp, Mus musculus
aacatgggatttgttgctttagcaacatccagctttcaccaccttccaatcataaggcatggcctcttattgtcaccttataggtctctgattaagagcaggcttaactatcttgtcatggatcactgggctttctggatttcttttctccactcttgctagatcgtttttaatcctgtgcctgactggctctgccggattcgcttttctcccagagccgtgtacagcaggcatgtggtcccctcgcctgcatgcgtctgagcttctgtctgctgtttccacaggcacagtgtctcataaatgtcagtggggacgcggtggtgtttgttcgtgactccgacttagaggtcatgtcatctcagcagcctgctgccaactgccagccctcatgtaccggagaagttacaacttgaagacagcggctcaactggctcaaccgagtgaaattcatgtgtctccattgtgtgtcaccctcttctcagcccagaggcccggcgtggggtggggtactgaggagcagggatgcggctggatagcttgtgtgcacatctgggagagttgagaatttctgatcttgacattttgtttgtccagtctacacagacaggccccatggattctggtaccttcagttatgggagttatttgtaatttgtgttgatttttaataaaagtataattaaaaatgaaatggaaagcttatcaagagtctagggtaggaagctcctgtggctttgaaaaccaagcaggaatccaattgctaatgagtccatagctgatttgtaaatggaggaaacttgtgtgtattttcagagaatgactgcagctttctcagtgtcttctgcttgaagtgaggactttgttagctggatgggtgatgtgtttgttagctggatgggtagtgtgttagaccatcttttaaaggaaggtttacggtgtgggtctgtagaattgcctgagtgctctcaggaacttctcagaggtgtccgcacccaggagcggaggatgcctcaggactggctgtcctcatggaggagggagggggcacctcacgactggccgttgcttcatatttaattgtctagaagaggcttggctccaac

SEQ ID NO: 31992 - DNA, 1167 bp, Mus musculus
ctattttactgttagcttcccaaagcatcttttagacagccacgatcgactgttaaggtttaagttacatggctgtttaagcaaaaaagtctgggaaagacaaacaggaccgtattacacctgatgttacctaggctgcctgcagggctccagtgctggagtgttccgacaaaggtggaacttactggaatgtcacaactttgacactctcctggataacttgttcctacagcagctccccctgctctggcgctctcctgtctcactctgtgccatcattgtgtgtctcgctgcaccgcatcgacatcttcctttgcaggaatgccattttccttcccagactccattccagcacctcctcatgtctctttctctctctctctctctctctctctctccctctctctctctctctctctcgattgcatgcgatgcatgataacttcttttctctcatgacatggcttagcctcacagacagctgaatgttatcacctctgtttggaagccttaggggattatcagtttgcagggtctgttcttaatgtgtccttctctttctctaattttagctgtgactgttgaaaaagcaagtgccatgggtgatggaaatttccggaatcgctctgctccaccttgtgcaagtcccacagttggggttgttaagatgacgccgctttctttcatccctggagcaaagataaccaagtacctcggcatcattaacatgtttttcattcgggaaaccacttctctccgcgaggtaacttacaaaacggaaggttgtttaagcccatttgtttgtagaagttgtagatccttgttgtaaaacacataattttctcctgtatttgaaactgcactgccgggacacgtgcaggtttctaatgaggtggtttgggttctttttttttttttttctttttggtttttgagacaggctttctctgtgtagccctggctgtcctggaactcactgtagaccaggctggcctcgaactcagaaatccgcctgcctctgcctcccgagtgctgggactaaaggcgtgcgccaccacgcccggcatttatgggtgtaaagtttataggattgtgattacatttcaaaatcagggccactctcttgtgccatttgtaacatgggaatttaacctaagtagaaaggga

SEQ ID NO: 31993 - DNA, 1113 bp, Mus musculus
ataagaagacagggtccgtgtgctggggagggcaatgttttaagggaggaatgagagctagtacctgggaacatcacacagcagaaaaccagccacacacatcagcaccactgcctagctgcgtccctccctcccctccaacttaaggtcaccctctgactttatcaacaactccctctagtggtagcaaacctttgtgaagctaagtgattgacacctccagagattgctaggaatcacgcccagaatcacacccttcctagcagccttgggtagcactcagacagaggttgtcctggggtcttaggtatttgttgtgtatatgtaagatattgtgaaaaggtgaaaggactgctaaagcctctctactcttgttcttcacgctcagccgggcgtggtggcgcacgcctttagtcccagcactcgggaggcagaggcaggcggatttctgagttcgaggccagcctggtttacagagtgagttccaggacagccagggctacacagagaaactctgtctcgaaaaaccaaccaaacaaacaaacagacaaaaaatactgcagtggtcttcacgctctctctgtactagcatatttgtatttttgtctcaaggaattataaaactgaaagaaaaagaatagctcattagaaacactgaaaatatttggggcatccaatttttttttaaagtatcaattaagcaaatacattgtctatctctaatgtattggtcgtttggtaatattttcagatttgtaaaatttaattactcaaaatatgacttgtacagagcattctcctcagtggggcagccttgcatgtggcagctaacatggagagcgtgcagcagttgcagtcctccgaatgtggagttgcttaaggactgcaggccacaggatgactgggacggtcacaaacgtgtaaacattgatcataatgtccacggacggcatatctaacagggtacggtcttcctgattcagcagactgagggatgtagcaagtctagaaagagatgggaatacaggaagaagccagaccggtcctgacatatattcagcagcttaaaagtctctagagactgcacaggacaggaagtggctcgacacatac

SEQ ID NO: 31994 - DNA, 1238 bp, Mus musculus
tgtcacttagcactgtgtaagctggttgggagtggggaggtttgcagccaaagcatttcctgtcttaccgtttggttcctatggacaaccaagagttgatttgtttctttgtttctgtgtgtatgtgtttgtattcattaaccgttaggaaatgctacctttgctgtctctccatcggtttctatgactacccctcccaaccccatctttgtctcagaagtcagctctgtcagtgtgacgcagctgctccttggaggaggactggcactgatttcatggtcgctagtaatttatcagtcagtgcacactgctctggtgtaaggtgcattgtctatgacagatacactgtatggaatagatggtgtttaaatgacttaaggattttagaaatgccctatgactttgtttgctatttatcttttattgagcctgactaggtatcggaccctgatcagagtgccttcttacttttaaaatatatttatataggattgaagagaatttaccggtgggctgcggattctgccatataccatatgatgaactgaacatgccgtttcccgctcatctcacatattgctataactgcaggaagcaaaaagtccctgatgttctcttcacaactatcgatctgcccacagacgcagtggttgttggtaaaggttgtcttattcaggcaaggtatgtttgtgacagctgaattggtatccttgagaaaccatgaggtatagagacatagacttgaacgatatacactgtttcttatttgtttgatcctgaaccaacttggcaactctatcttgtatttatctcatctacagctgtcagtaaaaacacactctataacactcaagtttgtacgcacagaatcggtttaacatttcaagtctgttgtatatgtgtttattatatttatgacttagtttgtcttctagtttggagtatggctaaatatctgctttagagacctctaaaatattctggaacagggtgggttttttgttttcttttaaagaacagtgcttcctccatgcaaaattcagctgtttatcattggataggacatcctggactgtgacacatacagcagatagctttaagtgtctagttcaccaacaacggccaggtttcctggtcccttggatgtttcttttttttttttaatttatttatttattatatgtaagtacactgtagctgtcttcagacactactatctgaagagggtgtcagatctc

SEQ ID NO: 31995 - DNA, 1114 bp, Mus musculus
gagagagaaattagggaaacaactcccttcataatagccacaaataatataaaatgtcttggggtaactctaactaaacaagtgaaagatctgtatgataataacttcaagtctttcaagaaagaaatagaagaagatcttaaaatggagagatctcccatgctcatggattggcagaagtaacatagtaaaaatggctgtcctgccaaaggcaaactatagattcaatgcaatccccatcaaaatcctgacacaattcttcaaagacacagaaagagcaattctcaaattcatctggaaaggcaaaaaacgcagaattgcgaaaacaattataacaataaaagaatagctgggggaaccaccatccctaacctcaagctacactacagagcaatagtgataaaactgcatggtattggtacagagatagacactgtgatcaatggaatagaattgaaaacccagaaataaaaccacacacttacagtcagttgatttttgacaaagacgccaaaaatatacaatggaaaaaagaaagcatcttcaataaatggtgttggtctaattatctgtttgtatataaaagaatgaaaatagatccatatttgtcacctcgtacaaagctcaagtccaagtggatcaaggacctcaacataaaaccagatacactgaatctaatagaagagaaagtggggaagatccttcaactcattgacacagggagaaatttcctaaacagaacttcaatggctcatgctctaagataacaattgataaatggaacctcatgaaactggaaagcttctgtaaggcaaaggacatagtcaataagacaaatcagcaatctacatattggggaaaaaaatctttactaaccccacatccgatagagggctaatatccagattatataaagaagttaatcaccaggctggtgagatggctcagtgggtaagagcacccgactgctcttccagactgctcttctgaaggtccggagttcaaatcccagcaaccacatggtggctcacaaccatccataacgagaactgactccctcttctggagtgtctgaagacagctacagtgtacttacatacaaataaataaatct

SEQ ID NO: 31996 - DNA, 1177 bp, Mus musculus
atttgattgttatgtttgctctcactgcgttccttctcctgcatttctgatcatcttctgaacctacatctttgctactttcctccacagcaccttacccacaggggccggggatctacctgtgtcccagctccacccccctctcttgtggttcctttcaccttaagtcccgcctcctctcggaatctagccttacccctcatcactctagccttgtcagccccgttctgaggaaaagtgtttctttcagtgaagagctgttcctggctgcttctggtaggatcacattatgtcagcttttttttaaataatccctttgttttaaatcatctctgaaaacatgttattttatgccatagagaatgactgtgtgctttatgtgtgtgagtgatttcactgacagttaatcagaaccacacatatgtcactgacgcttacttgatggctattatcagtagtcactgagttttctgtttaacaaagattatgtgtcaggatgtggctgtggatgtttgctgtcactctcaggaccgaggtctcactcagtgtccttgtagatgctctgttcccctctctccatacctgctccatccacatccgacctgtgccatcctgttgctaaaccagaaggctacatgagaaaattattctgtttgaaccagtttaagtctcattttggtgctattcttttattatacacttgttttctttccattccattaatcaagttattctgctatgttttctggtactttatttatcactgcaaacttaccttttattttgtgattttaaatatgcttcatataaagatcttagttttgtttccagttagcattgtgtagtctctaaaaaccttaagattactgtaagaaaaacttttgttttcagagatcagaatgggactacacacatgctaacccttgtttccttatccaagaacagctaaaaatgtaaacatggattaactcctccctaaggcactgcagtgaacttgaccggatgcatctttagctttgagagccagtgtgagccatcccatctccatagatcgtgggccatacttgtccttgtgttactatcaaaacaatgacgacaacaaatgctagggaaaatgtaatattagccttaaaatacatctaagggtgaggaaatagaattctttcatccatgacta

SEQ ID NO: 31997 - DNA, 1567 bp, Mus musculus
atttaatctattacatagattgttgccctttcaaacttgttctgcagggtgttgtagggtaggtggtaggtagagcttgagacagttactctgtcttgagctcactatgtagtgcaggctaaccttgaactcaggctccttttgagtgctgctgttatagtgtgagtcatgacatctggcttttctcagacctctctgttccagttcttttgtgtgtatttgtggccatgaacatgctgtgaccgtcagcagaagtcagtgaacactctcctttctctgctgcccccccccccccccccggctccccctaacttgaagcccagtgtcaggtgtgctgctgggtgctcctctgtgctatgtcaatgaatagagctaatcctttaaaaagcttctgagccctgtgtgttcttctccctccttgatcttattgccatgcattcatatcgggctagtctgtcttccccaagtggactcactcactcctcaagtgccttccccagtggtgctggggagcaaacaaagcttgtctgctgaggaagcacactatttctgagggttctccaaaaggcttttgacagtcaaaagtaggtatgtttctgagctttggagattgagccccaagtctggtggatactaactgtgtactctaaactatacccaaacttgtggtgtttctttccagttaacattttactcacggtatctttaatcccggccttagaaagtcgagtagcatttctctttcttttcttgtcctctggcagctgttcacagatgggatcacaaacaagctcatcgcctgctatgtgggtgacaccatggaagatgtagttctggtgaggatttacggcaacaagactgaactgttagtcgaccgagacgaggaagtgaaaagtttccgcgtgctgcaggctcacggctgtgcacctcagctctactgcacctttaataacggactgtgctatgagtttatccagggcgaagctttggacccgcagcatgtctgcaacccagccattttcaggtaaatttgcaaattttttcttttgaaaaagaatgctatgcacactaaagaaatattaataaattaaaaaattacacatttagttttcatgtatggaggggaggaaggagaggagggagaaggagagggggcagctagaggtgggagggaagggaggatgtatggagagacaggagaagggagagagagaaagagaatatgaatgacgagagagaaagagacagagacagagagagtttgagtgtatgagtttgagtgttttttgccacagcacattgtttgtggttagtggaaaacttgcttgtgtgagttttctttttccctgtgggtttctggaaccaaattcaggccatcagaattgcacagcaagcagtttacctgctgtaacatttagctggctttttagacacttttttttttttttggcttttcgagatagggtttctctgtatagccctggctgtcctggaacttactctgtagacaaggctggcctccaactcagaaatcctcctgcctctgcctcccgagtgctgggatcaa

SEQ ID NO: 31998 - DNA, 1112 bp, Mus musculus
ctttaactgcacgttaaagggaatttgttacttcctttggaatataggtttaaatatcatttatattttatctttttgcatatccatttcatagaacaaacttgtttataaaactaaaaataagggaccaaaaaaatcagattactttgtcataggtacttttcattaaacatttgtcagtctcagctcttgatgatttacatgtaaatcaaagagaagaattaggttctaatttggtgttagaggtcaaaatccctctccatgtctctctgtccctttccttccagtaagagttcatgttgtattgcttgctccttgtcttttgagtgttagtaaggaaagactctgttatgtgttctctttatcagtcagtagttttgtgtttattggaaaggctgattagatcttggatttctatgttaatagttgatacataagctctaagacactgtagttagtgttcaggtaaaacttaaaattcaagaacgcctgacctgatgttctttgttgtgatttcaggtgaggagctagtagctctgagataatgaaagcatgtgacctatttgaatctgtagttacaagtagaagataaccacattttagtccaacaagttggtaagcttaatgcatttggcctaggagcattgctttgacactccagaggtgatttgagaacaggcagtatgggagccaggtgtgtgtaggtacatcttgtatcccagcacataggaggcagaggcaggcagatgtagtctacttagttccaggacagctagagctactgagaccccatctcaagtgggggctgaggaaaccacaaaagggggctggagagctggctctgcctttaaaggcgaggctctcaaccacagcagcagcaaaggcaaattggctacacctgttttagctggcccttcctttactgtagcatgtgaaagctgagctttttgaaggtacttgtacttagaataatggattaaaatttgcattttatttacgtacacatttgatctgttatcttaaagtcatcctcttgaactccctattttctgcttatcttgtgagatataagtagataaaaataaggaagtgagtgggctggacctgatatc

SEQ ID NO: 31999 - DNA, 1099 bp, Mus musculus
acagctgttgccagtccctgctcttacagtgagagtgatgtgtgctggcctgggctggaggtgggtatttcctcgctcacatcctcttgccaagctcttacacagaattcctgtgaactttcctcaccgctgtttctccatgtctaagagctgggctggaaagggtccgactctcaaataggtgacttttcttttcatttgtaataagataaggtcaagacatgtgtcttgttataattatatagccttgtttagttcgtttttggctttaacatgctttaataaatggaagactagttttcttgcattgagatttgaccagtttaactggatttttcctacagtggtgagggcttcaagcagtagtaaaaaaaatcaaaaatatttttgaaaattcaaattcatccattatttgctttgtgttgtgtgtcactggtgcaattatttaaagattataaaaatcaatgctagcctttaagctgatcattttttttaaaggttaaggatgccctgagaatctggatgatctagaagcccctccttgggaagtgagtgtgcacatcagattctagggtgtgttttcattatctgttcacctttgagacctcaaggagaaattcttgtctgaaggaattagttattaagagtaatggacattattaatactgggaaatattaaaaaaaattaaactcacggtgaaaagaaacaacatgttctgttgctaggagaatatttcccagtgctgtaatttgatttttctggcaccctaaagatcataagacctctttaattttacattgttgcagaatcttaaatttaaggttgagttccactttgtaatgatttgaaacagaatagttaatgcagattttaaacatttctttcctttaaagctttgtgtcttgtacaatgtgagtttgccaaattctcttcatctgctacagattaggtatgccattgctgctgccatgtggcggcgccccgtgcttcttaaacgcactgactggagctttgtcgcctcacttgttcacatgcacggagcctggtaacagccccatctgtattttgttagcttcattttcttatctttagatttca

SEQ ID NO: 32000 - DNA, 1761 bp, Mus musculus
ttcttctttcttcttcatcaccccttcctttggaaaagatggaagtagaaaatggcagagttggggtatatgggcatgcagctggacatggtgtttgttttcctttgtggggtggacctaggaggactggacatggagagtattgtggtgcactgtgtgaaactgccaaataatcaataaagatgtgtttatcctgtgtgttatcaaacgctgttaggacgaggtgcttttggctctgctctccctttactgcttaaaatacccagaggcccttactccatggtagcccggggcgcctgctgaggactgctcagtgggagcagtgacgtcatccgcttcctaagatgagcagcagctctgtgccttgcttagagttacgctaggtcagagtgcaggtccattgtgtgatggaaggtatggccagcaggagtgagaggctgcacggcttctctctgggaaacttggtggcagtgcataagcacgtgaagggcgtttctcagtcgtctgtgtctcctcaggtgtcagcgatgtagactatagtctctatccagatcgagagctccagggccagtggctgcgctcttaccttgaagcttacaaggagtataagggctttggcagtgatgtcactgagaaggaagtcgagactctcttcattcaagtcaatcagtttgcgttggtgagtaaagtcagcgaaacgttctgagtgttggtaaccaggtgctcatcacctggcaaaacaagttttagtttgtaaattttgttgaaaatagtgaaaagtgtggttgcttgcagtctgcctcattaatttcctggttttaaggacacactctgttgttgctttacccacttgtctatctgtgcctgagttcactttgaaaatactgagttatcttctgagaatattgtcgttcattagcacagcttacagctgatgtgctaagacattcctgagtattaggacggttctttcagctactttataaatttcaagtatgattttatgaaattggctttgggagcattggccatcttttcagagagcctacagtgatggcccacaactagactgttgatgctcttaggttcaggcactgattctccagagaccctggcagcgcagtgcacgtgagtggctgtgtcgatgtgacagctgctgtctcatgtcgcatggtcgagctgctgggcacagtactcacttccagaaagaagtggacttaacagacttcatgcagcgttcacatgctgtagattctaggattgtatctgaacacagcccattaaccagatgctaggtgctcacggctgctctagctgaggaatactggaagtaaagttcttcagaatgcttataaattagaatgaccaggtgattttttttttttggtaaaagttaacacccatctttacaatttttagtgaagtataattacgaataaacttaaatatgacttaaggggaaaacctcaaggtggtccaggcttccagtaccagctcttgggaagcagacacagatctatctagatcttaacaccagtctggccacacagcaaggaaaaccagcctggactatatgagaccttatttccaacaagtaaaccaagcttcctgcaaacaagcatcctgacctcggtgtatgacttgggcccatagccttgtcatagccttgtcatagccttgtgtgccaggcctcggggctgcggttgcaggtgtccttggccatgctggctctcgcagacagtcacacgtgtcacttttatg

SEQ ID NO: 32001 - DNA, 1197 bp, Mus musculus
gctcacttgtaaccatgaagacctgtgtttagccccccagcatctacctacaagtgggcatgacagacctgtccttccagtcctatctgagtggccttctgaccagccagccagttcagtcggtcagatagctcctgtctcaagaaatggctcagcaggtaaagtgctagctgtgtaaacagtaggcccggagtttgggtccacagtgcccagtgtaaagagctaggtaggtatgatagccctcctctaatctaagttcagtgcagggattcccagaacagcctgactagctaggctagctcagctctgggtcaagagagagaccctgcctccgtgtacaaggtggagagagaacaaggaagacgccttttcatacacatgcatctctgatgcatatccctacacacaggcattcacatagacacacatgcaaaactatagggtggaacgtgatagtgtgtccatgtgcacacaggtgcatacggccccacatcattacgcactctgatagaaaaagataaagggcatcaaagtaaacagtgctctgtgtgtgtgtgtgtgtgtgtgtgtgtgtgtgtgtgtgtgtgtgtaccacatgtgggattctgagaacaacttggaggtgtgagtgttctcaccaccatgtgaggatcaggcattgaacctgtgtccttaggcttcatggcaaaacgtttattcactgagccatctcactggctgaagaaccaactgttctattaatattacccctttagcattttctttacgtttatgtgcagttttctagtatatagtatgttcactatattctgaggtctgataccaacttctggttgttcataaataaaactagttagttgttgaatctctcttctcttttcacagttctactgatctcttacgtgacgtctgtccatttcagttctggaaatgtcttgttgcattgctttctgtttgcagaatacagagcgtgtggtaggatttttacacaggtgtgcacaggcgtgtgcaggtgcaagctccaattccctttaagaccctctgctagctgctgtttaactagtttgctctccgtaaagcaactctggtttcctcttgtggagcactgaggtgtttgagtggatgagtaactcctccactcttttcccattaaggtctttgtccggcttttttgtcaaggctacacttcctaatagt

SEQ ID NO: 32002 - DNA, 3821 bp, Mus musculus
ggtaggaggacttgttttgatttatcttggttttgtcagtctagtttttattttgtggatgtgtagggggaggcaactatttcatgaaagaaagttaggtctttgaggtagacaagaaggctttaatctttgaagactgctctgtgggttgagcagtcaggggtaactttacttagattagtcagacaggctttgcactttggtcacataagtgcttatgtacaaagttggctccatggatctgcatatttaaagtatgcactacagatctatcctaagattgtctggtgttccacatgacttatgttctcagccaagtgctttcaaatacttggattgtctcaaggtgttcaaacctaataaagtagaaacatgccatttgaaatggtaaattctagccacatatatacactcttaaatatgtgtctctaacagtgttagacctggcttcggtttctacctccccagtgctgtcatgttcatgtttgtttttatgaaccacgttacttactgtaagatcattacaattttgctgacttccttgaatggaaacaaataatgacaagctcgttacaacgttcaagcaaacctgaaaaaagaaaaaacaactggcttagtggaattttcattcatggttgaaacattgtcgtaggatgataaaaatgtgagcctcctgattcttttctttcctccttaaaatccgagagtgtgtgtcatgtggaaaccctggagaagacagtgttgctagtctgttcctgttcgtgagaatgctttgaatggaggctcactgtgctgcggcggctgcggctgctgccggtgctgctggactgcaaagcagccagcggaaatgtgacaggctcctgtggcgtgagtgcaatgacagcgaggcgtccttgttcaccctgctagcacgtaagagatcgtggagagagaccagcacacgggaactcttgcccccattccttggccagatttgggtgctctgatgcacccgcttctcatacagcttttggggatcatggtgtagactatcaagaggattcaaaatgtctttctttgtattgaccatgtaagggattctaaagagggtatattgggactgttctgaagagcatccctctaaaatgtgtcctgtggcttgctagatatcagttgccttcttttgttcagctaaggaacttgaatgccttacctaatcactcaactggtagtaagctcgttttgtaaatgtgaaagtggatgttagaagtggcattcatggatgttcaatgtaatcaatagaccgtagtggcctggatgctttcacaagcaaaattccccatttctgccctccacccccatcctgtttccctggcacactgtatgaccttcaacctgaccagtgatatttgatagccttcctctccctctgtgctaccaccatttctggaaatgagatgtggtggccccgtcttgctgttggcatgatctgcctgagatgaacatgagcacaaccctcatcaactaggtctgcttggagtgtaaataggacggtgtaaataagctgctgcaattagtgtgagtgttgtcttgcctaaagagtgtgtagttctgcattttcctttgtagaagtttttctgtcactaaatgatccagcctgttgtcattaggctgggaaccgagcagtaagatagcaggaactggaaggaaggtttaatggtttagttaacgttggcatttatttatttagcctctcagtgcctaatacgacttttctccattttttacttggctattaattttttttgtaggttagattctgggaagcagtatatttatagagctcatctttgagtcacaatttgaaactaaaggaaactaaaaatataatttgtttgtaaactgaagtgtggtccccttttctattttcagagtttgttgacactttctacaaaaacttgaaattcaatgtgaatgtaaatctcatccatacgagacacagggcaaatgacgtctctcacgtttgtcaggcctctcctctggagtggctcagtgtgggccaactagttttctctccctgacccccaaatgtttattttaactttgtgttgctaacaaaaaagaattcccgcaaacactcgaaagaaaagttagaatatttgaaaagtactcagttgtctcagttgtccgcagagcccgtgtctcctggtgacctcactgactgacttacagagggcagtaggatcaggtgggactttacttttttctctctaacttgcttttaagcattttatcctgcattccagagtactgtagacttaagtattccctgttaacgtgtcacctgtcaccatgctttgtcctggggttgtcctcgtggcagcagcttctgctacctcacagggaaggtgtgtgcaggtggagagcctcctgacaggtctctggcttcaactgctgctgattttcctctgtcagattgtaggctggcctttactgtgaagctgagctgcatcctctggcccgttcctgttctgagtaggtggtgagccgcctttccccacagtgacagcagtgttcagtcttgggtttgacaaatgctatcagctgctccagacaaaacatccccatttctggaatttcagtccatgtttctgtaaacgaaaatactgaaggctttgcattactttgaattcttgaaggctaaattcagtgacacgttacagaatgagttagattggttttagcagtttttaatgctgaaaattttcacttttggctcagtttgatacgggaagaaaccccaaagtatttggattagaaacaagtcgtgatgcttgatcgataagcactttaactcctgtgttggctgacgcttctttctctcctggactgtagactatggcaccaccaacctatctttgtccattgtgcattgtatggcgtatgcacttgcaaaaatactctttaaaatagttataattttatcttttggttgtcttacccatggtggtcctttagatcctgtcaagtaagttttaataaaacactaggtagttatagaaaactgagaacaccacattgtcttttgattagtttgcgaaggtggagcaggaaagcctatccgattggaattgcaggcttcctagctgcaaactcttgagagctaggttgaaacccaatgacacctgcagagcggtggagggcggggagtgcctgttgtccacccctgcactgtggcgtgctgctgtttgttgtaggtagcgacgtactgagtgttccttgttagtaatctggagtcgtcctctgtatttacatgtactaaagtaactgtaaactaatggaacttgtaagaactttcctgtatttaggagcttttgtacagcaaggtcacatgtcctgattgaaagaagaagacatgctattacctatcatatgcaagggaaaaagctgaagtgaggagttgtctttgcattagctgtctgttgaattggggagctatggcacaggatcttaaatttgtgtttctcaaatgtgaattgtagtctaatgctgctttgtatagactaagtgctatggctagtctcagcactgaccgtggagtgatacctcgcagtgagcgcagcctttgttctagcttccccgactccgcagcactgtctgcgtgctggacagcttgcttatctgtctgctagcagagatacttcctgctttttcctttgttgttacatatttttatgtttgaaatttaatttttactactgttaatttaagtaaaatttgttccatgtataaattggcattgccagtgaaaatcaacagcctcattcatgacgctgctgaag

SEQ ID NO: 32003 - DNA, 1175 bp, Mus musculus
aatatttcatgtctgatgccttcatttcaacaatataaatcaaatcagtgatgtaacaggaaactgccccagcctccctggccttctccctgtccctttccccctctctatgctctgtctctctgcctctgtctctctctcctctctcctgtctccctctctctcccccactgtatatgtgtgtgtgtgtgggggggggtgtgcccgcgcacatgtgtgcctgttccatctttccccagggttctctgccttagacaatttgattctcataaaagtctcccaaactataagacatcagttaactgttgtaactgccgcttagcattaagcagcctgtcacagtggctcactagaccactggggattgttgccccaaggactcacacatatgggtatgtgagcccagaatagaggcctttcatgaaactgactggggttttatcaaattgctggtacatgattatacctactcccctcccaggttgctacctagtaacagtcagtttgcttatgcctaaacacccccttaaggtctagcagaaacctcagccataagagactattgataatttctgaaaagaaattgttgagacttccgagctcattccagatcttctgtcttactttgtttcaggattatagctcatccacattttaatctgatttttggttatggatggttgtctgaatgatagacctcccccccttcttaggatcattttcagccctccaagttcagtgggtcagctgcaactcactccatgatatttagaatgtcttcctgtctgtctgatattaaatccttttctagctgacatccagtgttatcagtttatgcattcaggtctagtgacagatgcttgtgtccccagtgcagagttggtgatggaactgatcactgttgctcccatgtcccatggtttgtaaatcagtgaactccagtgattgctcatgtgtgtgggaatccagtccctctatgacaacttggacacccccctatgcaacagtgaatgacagggacatgagctatctagtaaccaccagtaaccactagtcatcatggggatgtactgcacatttcttaactttcactttaaagcattttcaaagcctctggaaatttgcaagcagaggctaagaggagaagctgacctggcgactcgcatcccatattg

SEQ ID NO: 32004 - DNA, 1147 bp, Mus musculus
aacctaatccacaaggaagactgaaggcaagctcacggagagataaagaaacagacagacatgttgctaaaactcagtcccagcctctctgacccagctacactcaggagtctcatcacctccaatttcatctgattaagacaaagacaaagtaagcacgttttttttgagaacaaaaatgaacagccatgtgggtttttttttttcatagtattcttcttcggcaaaaagccaccgaacttttttttttttaaattgtttccaaggatgaaagtgactttgccaagcaaagtggcttcaaaacaggcctcaaaaatactaatagaaagacagatggttctactaagagcttggctgccaaaaaaaaaaaaaaaaaagatattaaaaaaaaaaagaaagaaagaaaaagtggtgctattgaagccggctgcaaagttatctggtgactacaaatacttttgtcccagagcgtgtgctagctttgcctgcagagcccaagcagccaaagtaaagactgtttcttctcttccctgtgcccagccatagacaaaccagtaggtgctgagcgcaaggaacagcccgagcatgcgcttggctctcttctgcaaaaggaaagtagtgctacgttaaagaactcctgttggagtaaaacaacccaccaggaaatttacttttttttattggacactgcctatcacttaaaaaaaaaatgctgattcgcctgttcctcctcacccctatcatgaaaagaacctgtgagccttgtgagctcacaaggtgcaaacaccaaaagcaggcagtgaggaggcggggcagtgacttgcccggagggaggactaacccaggcgagactgcggtgctcctcaaatgatgaaaattaagacccctgatgttttaacacagggggattgcctcctgggggcggggcatcacagctttgacttaaatcttatctaatagtagactctattttaaaaactgaatcattactttcttgtagagccacacttttatatgcactgatgtcacatcaaatgtcaaccaagtaatagatgttcaagtaataggtgataagacagagtatattgtcgactcagggctgatattgggaataatctctatccgaagcatagtaacagaaaagcaa

SEQ ID NO: 32005 - DNA, 1169 bp, Mus musculus
atacagtataggggttattttgccttttgtattcggaactgccgagccacatattgagccgatctatgttttaaaaccaggcactccactcttaacttgtaaagaggcttgctctctgtggggcaggggagggggatcctgcccttgttccttcaaatcctccttatggttatgatcatgatcctcctgtctcagtcttcctgataatccatgagcatggtccacctgcctcaaaatgtacctgttgtcaagtccctccaccccaggtcccacctttctacttctaagtctgtgatatgaaactgaacccagtgaatgtccagcagggtaagggaatgtccaatagggtatgaccacttagcactagaggaaacgaaatccccttctccaagaagcgagatgcccgtctcttggctgcccctccaaccccatttcgtgaggtgaactgtgaggaggtcacactctaaccctttcctgagccagatcttggcagcgttctcaagggcatctagcatgtatctcaatgagctagccttggcctgggaccttctcagtgatcttagctgagaaagtccctgctcgtcctgtgatggtgctgagtgtctggaatgttctggagcctcctggagagcagcagcagcagcagcaccgctttctatcgccgggaagtttgtttggaagagagtgacggacaggcacaaaatggctgaaggatttctgacagacaaagcttctcgttagtgacttgaaaggacgccttgatccaaaatagtattaaacaagtgtttcttcaatatgagatcattatgtgtctcttctaaatccaaatactaattgcaaccttgctgtgagcacgcagcattaagacggccatagccatggtaacagagtgccacgggaagccggagcctgtcatctgcacggtgtctttagtggtttgggtggcaggcagcacttcctactatgtctctaatgtccagctcaaagagggaaccacaccgcacaccttcaggtaattctgccttgcaggctctgttccctttgaacatcgcccgtctttataattaatctccgcgcaggatggcttgctaatgcccaggcaaaaatgcaagcacaaattaaatgttcagcaggcatggtacagtggccatttacatttcaaaattatg

SEQ ID NO: 32006 - DNA, 1198 bp, Mus musculus
atacttaggctagtttgagaaagactgacattcaacagagtggtcatacctaagacatcttttaggtgatttgaggcctaaatgataagaaaaagtcaggcataaaaatacgtaggagaagaaaattctagacagagaacagtaagcacagtagttctgggactgttgacaaatgaagacgaggatgaaggaagccaatggccaaagcatagcagagggtagagggttagatcaggatgaggtcagagtggttgcagtgccttatgggtaataggaaagggtttagattatatcctgggatcacaatggaggagtggcctaatctgatttataatttgaaaagatcgctgtggagaatgaactgtgggcatcctgtattattaatgaattgtaggactagagtcacggtttggtttggataaatgtccctccatatggcctatgtggtaaaggttggctctccagcctgtggttttgttagagatggttaaaccttcagggtgtggggctaatcagtttcctgccctttattttccagccatgatagcggcagttacagtccctatgctgcccccaacaaggtgggttcagagcaccaggacctatcagccatgaactggaccttataaaacgtcaattgaggtaaacctttgccctctataagctgattgactgatgcattagtttacaataacttaaagcacattaatgtgatgggtgactggctcaggagaaagtcaggctggcttggaccacttagaagtattcaggacagatgcaggggaagtttaggggtgctcaaccattatgaactgggatggaagtaagcaagactgactggaggataatgaaggtcggctctgttaagccgtgtcatgattaagacggccattagagttggggaagacaggattgtttgcttaggagggtatcaaaaaagggaagtcgagttttgccctttaggctttcaatacagagatcctgctgtatatatgcatttaaggctcactagtcagagctggatgcacacataaggacattgttatcatcttggcttgtggtggtagctgaagccatagaacggagtggtcccttacacccggccatgtaataaaagaaggcaagagaggcccatcccaaatcccaagtcgctctaagatgtcaaggtcaggagggaagctcccagtggaggaattaa

SEQ ID NO: 32007 - DNA, 1105 bp, Mus musculus
agtgagttaaagtctagtacactgacagacatctgcatggccatgtggtgaagacccagggcacctgtcactgaatgaacacaagagaaggacaaatggaggtggtgaagagagaagggacagtctatctttgggtgtgaactattcatgttttttgcagaggcctcctttttctgccaggtcctgggaccttcagccttcaaagtcagggccaagtacagttagtgttgccagtgagccagcccagtggcctgtcttgctagagttaaactttgagtttatattcctggtgcatagaggttctttactcctaacgtccagtatggaaaagcaccatggtgtgtaagctctgttgtgtctagtctttagtcatttcattctcagatacagaaagccccgaagccaaataattagcgatatgtagtctgtcttttccttcctccagagaattgtacaccactactcccatttctggatgaagggcaacagatttggaaattatgtggcttacaactaagatgtgtgccgtgccatgtggttgttccctctggctggtttcagaaggctgtgaaaatcttcccaaggggtggggatgagatggagatatatctcttcagaccccagggctctggcacctttcccaggaacaccgatgagacttctttcatttctccagagatttgaatcaggttccaaaaagctagtgggctgaatcactagcacgtgggaggatgaggcaggatgatagttgtgagtcttaggctagcctgagctacacactgagttctagtataacttggactactgacagacaccctctttctaacataatgaatgagctccaaacactaagacagttgaagcaggaggctgcaaattcaaccttcggtttcagtagcgtagcaagatggtctcaagattaaacttgtgggtttgcacacacctgcacacctgcagatcttctctggttgatgtccagtagggaacgctccaacagcatgtctacggctaccgcacagaggaagcctgaacgacacaggtataggatctgtgccctttgacttggtggctgagaacagatatgtaccgcaagtttcaacctcag

SEQ ID NO: 32008 - DNA, 1090 bp, Mus musculus
tgataacagactatgaaactgacctttgcaatggcttctttatggggatcaaaggaacatctgtaattccttttccctgttcattatttgtttaattgcaggggcgtaatgcagcatgagggttgaaattgtatccgggcaattacccattcttcaagactcactatcccaacactaattgatcgtttaaggcacaagacagtagagcattaggaccatgtaaagctaatctgctgggcaccatcaacaaattaatattattgctgatatttgcataattcactgcaattatttaatgtttaatcaggatgtgcagatgagactccccgggtcacacgggagtgggtgtaaccgggactaaacaggcctggaagctcacgaggattctcttattttgtatagctccatcttttcacaaacaagccagatttcctcagaacacatgagatacccaggagttcaggagtagagcaaacctgagccttggctaatgtggcttgccgatgcaatgtggttgttagagttacttatggaggactctattaagggtgctaaagaatggataaatgagcgatagctggcagcctatgtttgaaaaaattcaaagaagtgactgagaaactttgttagggagctatggtttttcctgatgtaaaaagaaagctttaaaggggcttgggagaaggctcagtggtaagagcacttgctactctggtagccaccctatagttcgctttcttgaacccacctagtagctcacaactatcttaattccagttccagagtatttgacagagtaaaggtcctcttctgacctttagggggagctacatgcatgtgatgtgatgggaagacacactgcttccaccacttgtatgtaaagtcttcttacaagagaaacaagctctgcggtgatgtgtctgctctgtgaagaggtagagagcctatctcagtcacactgggatacaatcctctttgtatcattttgttacttgttgcttggtaataatgtagctgaagacatcatcttgcggggctgagcgctcctgggctcctggtgacagctttgagcatgatgtagggaagactt

SEQ ID NO: 32009 - DNA, 1856 bp, Mus musculus
agtcttttacagtccaggctagccttaaatgcctgtcgatccttactgccttcacctcccaagtgctgggactacgggtaggtgccaacacactcattttctttttttagaagattcgcttttatttttaattatgtgtctatgggaatagagggggtggtatgtgcacatgaaacagagagggtgttgaatccgctggagcgggaattaaagacttttgaacccaggtgctgatagaagccaggtcctctggaagatcagtccgagctcttagctgcagagcccctgctgcagctgatggagcctgtggggttttgttgagctgctcgcttttagactgaagcacgtgtttttgcttttgtttcagtatggaagggtggagagtgactggacaatcgagctaccctgacggcaaagctcagggtatcggtgacggtgccacagaagagcgactcctgccctcgagctgggaccacctgtgaccatctagtcttgcacattgtagtcgcgttcctcatgtgttaccaaatgaggtttttttccttgagccacagaaagttgccagtgttcaatgccacctatatacatggtagcaattgcttactgtagtctccctcaccctgtaccagatccttagtaggagaatgggttcccaaaccaataagatgtctatgtgctggaagggctactgaggaaatgtcacaggcggcctccctgtgactcatgggcactctcagagcaggacactttgtttcttttgctggtgaggttcttttgttttttgttttggttgttttttttttgtttgtttgtttctaattggggcagatttgggctccccatgcagccctgctggcctggtgttccctaatgttcaccccggctggtctcagactcagagcagccttcccgtctccctcagccttctggatgctggggtgattgacaggcgtcctaccatgatttgtttttgttttttaatcaaaagttcggtcacctggatttcttttctccgttggtccctgggtccacgctaaggtgactgtcccttcttcgtatcacggtctgcactaatctcacccaaggtgtctgaggctggttgtccgcactgccctttttacgtaactataactggctgctcactgcgctgctatgagactaggggtcctgtgccttctagatctttgcatcctcaaagcccagcacatagtaggtattttcagtacatgtttactctaagaatgaacatagaagtgtactttctgtctctccatgctgaaaccctttcggaagccaggcctgatttgggcagcatgtagcagtatttacctcaggctgtctttcctgtccatggactcctccagacagcacagtcagttggaagaattgtcttatgttttaagattatcttggaattgaagcgattgccctggaaagatgaaatactaaccacatggaagtgacagatactatacattatgtgttaaatgccaaataaagggtcaggttgggagataaactctggatttgaatcttaatctacactttgaacccttctcttgaaggagcattgacgaagcgcctggctagtaacagacactaattccagaccatgttctccttggttaggaactgtgagtgaaaagttctctcatggcccagcttatccaggagaaagtcaggtcttgatagaaagcctcggaaggtcgacactcagccatggtacatggtttcctggtttccatagctttcagcttactgatggaacttgggtctcttcagagcctcagggggaagggctttataaaaactccacccattagagacagtccttaagacatttaacatttaaccat

SEQ ID NO: 32010 - DNA, 1166 bp, Mus musculus
ggtttgttttctgcctcttgcaaaatatatgaggccttactaagagttagattttataacttttgcccaagccagttttagtttcaatgtgtttcttcagttggggtgtttagcaggcgaaggggggttggagaggatgggtcaggatgaaaacttcagttcctagcacctatacctggcagctcatggctcacagctgcctgtaactgcagctccgggagatccacaggcacttgcgtacttgggcataaagtctctctctctctctctctctctctcacacacacacacacacacacacacacacacacacacacacacacacacacacacacaattaataaacaaacggttcctgtctctttacccatcttctctgtctcattgataatctaacaccatgtaacagagaaacctccttcgattctcctccttggaggatgaagatggatcccacagaatgcaggacagcaaccaactgcaacatttgcagagtcacaagccatgtctgtggggctctgtttcctcctgggtgttctggaactcgctctggctcctgggagtgtgttgtggttgcagaggaaaacgaatacttctcacccaaatgctatcatgtagccggctctgtctgggaaccaggggacagatgtcccatgtcatctgctctgtctggggaccaggggacagatgttctatttcttgacctcaggctggcggttacagcaggaggctaaattcattccatagaacagcctttgcgtgtgtgaacactgctgtttgggtttaactcggtgttgtcggagagctacgctaactgtaagaaaggtctctctctgtgtgaaaactgcacacacacacacacacacacacacacacccatgcatttctctgtctagctaacgagttatcccaaacacatttattttaagaccataaacacttaacaaatgacaagtacccttgggaacatcgccagtaccaatctcttctttctaaaaagtgattttcagaaaataaatggtccctgctgcagcccagcaaagagaattcattcattcatattttaaaattaaaaaatacttattatggaggctggggaaatggctccacaatccgtgattaggagcagtagctgctcttccaaaggatccaggttcagttcccag

SEQ ID NO: 32011 - DNA, 1099 bp, Mus musculus
ggagatcagtcagtttgttggagcctcaacccagggtatagcctatggttttcccaggcaagacaatgtcaagtattccttagccaaattataagaccactaattttccaaatttataagtggattatagtaatcttgggggttggcagagaaagagaaagactcaggtagacatgcgcctcctgtcccagtgtctggaacaattggtcctcccttccccccgttggtgtgtccacagtgcatgtatggagatcagaggataaatcgtggaagtgggttaactcttgccaccctgtgggatctgaagatgtaaggtcagtaggccttcgaaggaagtgagccatcttggccaccttcaagtcttaaacgctaactctctctctctctctctctctctctctctctctctctctctgtctctctctctgtctctctcttcctctctcttcctctctcttcctctctctctctctctctgtctctctctctctccccctagcaattatggagcctcccttctggcacagtgcgaggccgtggagaatggctgtcagcaggtcctgtggctgtacggcaaggacaaccagataactgaagtaggcacaatgaatcttttcctctactggataaacgaagacggaggtaattgctcttctggtgtcttgacagctgatgctgtcaagagcgcagggggcggggacatcgagggcagtgcggggctggggactatagtggctgctgtggagaccgcatcagggttggtttttattcttgtttctgctgtttggcttgaaaagcttgagactgatttcaaactgagctgctgtacatatggctcagcatgtaaaagccctggctgctcttgcagaggacctgagttctgttctgagcaaccacactgtggctcacaactgtctgtgactctaatttcaggggatccagccctcttctggactccaggggtactgcacccatgcacgcacacacagtgtatagcccaggataaccttgaagtcattataccacaagggctggctttgaaatgttagatcctccattctgtatggcaagaatatatgggattgtatcatacctggct

SEQ ID NO: 32012 - DNA, 1193 bp, Mus musculus
cagcaactgcaactgacagctgtgtttctccctctgaaatcataactcagaaagcaaaccaaaacggaacttaaagttcttttaaattacaatgatttgtttatgttgtgttgaccgtgcatgccgtagcatgtctgtggaggtctcaggtcagcttgtagtggttggctctcttctttccaccacgcgaggctcagggaccagactcaggtagtcagcttttcaggtgtggcagcaaacaagcatttatccactgaggcatctgtgtcccatccttttatcccccacacccaaatttaaatacgcattctcagtatattctttaaaaagctttgtgtcactaagctttgtttgggtgaccttctgggatgtggacacaggtctattttagactcttaagaaggatgtctcactgttggttacagaggcatggtttctctctttattacagccatctcttggcgtcaagaagccttccaaagccctactctttgtgatcctgagccccgtgggaccttatttttctagtggatcttttactccggtgtccctgtgggccaatccaaagtacatcagagcctggaaaggtgggactggagactgcaagatgggcgggtaagtcggtccctgtgtccttcctgtatagtgacagttgtgcgctttcaatggcggtgtgcttggtagagttcacaagcgagtagctgtctgtggtttaagatttagctttgtaaacgtgttagttgttggaggtgttgcttgtggcccctctaaggcagcagtgtggcatgggtattgtgtcccactcgaccggcaagaaagacgcaacaaactggaatcttccgtggcaaaagctttattgcttacttcttcaggaagaccttgaaccgggaaaatggcgccgcctttataacccgcagtgtgacgtttcagcaccccgatatggcgtgacggctcctgattcgttgctcgcccatcaccccactattacactccgagaatgggagtgactaggcgtgagttcactcttgcacctgcgtacaaggcttgtttactagttaggcacagcggaggccagcgccatcttataatggcgattgctcgcggcacggctctccacacatgggcatggagcagtgacttgaaccagggtcctttccagctagagactggccctggggatgatgctttcactt

SEQ ID NO: 32013 - DNA, 1185 bp, Mus musculus
taaaatccaactataattgataagagaccacagatgtccactttaaaataaagatcataacttgttacatttgagtgtaaaagtataactgatatgggagtatgctcaatagggatctaacatctttttcaaaaatctcatttatttatttgggggcagggaggtgagtgtagagttcagaagcaacttggctttctcgctatcatgtggttatcaggcttggcggcatgaccccttacctgctgagctgagccatcttgaagcctcagagaatctaacgtcttatcttttccttatgaataattcatagttttccagagggattcacagatttttttttttttaaagcatttattccgggtacctctcacgatgtttcatgttaggaaagagtgaataaaagctgttgaaggagccaatcggcactgcaacatggggacagttttgaaaattgagcttctgtctgctctctgatctgggagtctgactgtctgtcctttgctggaactcaatagggattctgtcctttcagatgtttgacaaggaggagctcctaaagtgtattcttcagcttctacagatcgaccaagaatgggttccctactccacctctgccagcctctacatccgccccacatttatcggaactgaggtacggcctggctctatttaggggatatatatatatatatatatatatatatatatatatatatatatatataatttaaagtctttaaaaaaatttatttttatgtgtacataagtgggcttgtgtgagccaccacgtgtgtggatgtcagaattgcatcttgggtattgattcttctactatgtgtgctgtggggatggagcttgggtagtttggattggcagaaagtaccttcatcctcagagtcatcttgtatgccccaaaggtaattttcattttttttttaatcactcaccccactaccaccacgtgagcacacaaacacacacaacacacacacacacacaaacacacactacacttccacatacccctccctgtacacacctgtcccagtaattttttgacctcccttgatggctagttctggggtgtggctccctcatgacagacccttggagatcgatgcggtcatgctgtagaaagtttgtcagagagaacgcttggttttatttttattatcctgaatcctt

SEQ ID NO: 32014 - DNA, 1173 bp, Mus musculus
tgtctgtcttggcagttgggattacaagtatgtactaccatgcctggctttcatttatgtcgattctaggattgaactcaggtcccatgtttgcatgcatctatgtgatcatttgtgtgtgtgtgtgtgtgtgtgtgtgtgtgtgtgtgtgtgtgtgtgtgtgtatgtggctggcatgagatcaccatggtgtgcctgtggaggtcagaggacaacccacaggagtggactctctccccctccccctccccttccctctcccctcttcccttcctcttccttggccttccaagattcatacttaacttctgaccaggagtggtggagtggtgctagaatgcttagattgccctgttctgctggctgatcaggttgagtactgaaaggacctttctattccctttctgttcccacattgctcccccccctcccctctccattccagttaaggccaaggatagcaacgtaaccactgagattgtcttagtcaccttctgagacttttctcttctcctcagctgtttgaaggcttgaaagcctttcggggagttgataacaagatccgattgttccggccggacctcaacatggatagaatgtgccgatctgctgtgaggaccacgctgccggtatgaacatttgcattcccttctatttcatggttattctgctctcacacccccccccccccaaaaaaaatctttgctgaataattgcatcagaccatatgagagtgaatgctgacttatgtatgtgatgccttcaattagaggtcagagggcaccttgagaatcagttctctgtactacacgggatgatggcaagccccttaatgtgctgagcatcttaaattgtacattttagtacggctgtacgaagaagaaaattaaaacccagcccagggaggttaaaccacttgtccaaggtcactcagaaggaggacagcaaagtgatctgcggtttcctggtccatgcagtcatggaattgattaaacttcatctctgctcagcacccccaagacctgacttgttgttggcacaggttacttggatagccagccatcctcacatctgacacctctgcaataagatcatgctcctgttccatgatcacgctagtgcactgtgatcatgttagtgcagtgtgatcatgctaataatgcagtgtgatca

SEQ ID NO: 32015 - DNA, 1218 bp, Mus musculus
gggaggtgcatgtacagtgcttgggtgtagctcagaggacaacttgtggagtcttggttttcccctttcaccatgtaggtcctaggatcaagctcaggtttgctggtttggtggcaagtgtctttacttgctttgtcaccttgtcaggccctgttgcagagattttgaacaattgactgaactctgagcacaggtttggtctatttggttctcagtgttaacggtatgatattggggttgttatttgagacttgattgggtcagtttttttagacaaggttggaacttctgaatctcctgcctccacagtctttcagtggtcaaacccggggcttctgcaagcaccccaccaactgcagcgagtcctcagacacccccagtgttaaattctgtgctgggtgtggtcgtgtcatcaccaaggaatggtgttcacattggacctttggaccatctagcccatgcagtgtgggctccaggcactttccctttctcctctacaggccaaagatctcatcatcacaccagccactgtcttaaaagagaagccggacccggattcgctggtctttggagctacgtttactgaccacatgctgacggtggagtggtcctctgcgtctggatgggagaaacctcacattaagccttttggaaacttgcccatacatcccgctgcctctgttttgcactacgctgtggaagtaagtgcttgggagcacccgtgggccgtgattctctggccttgcaagcttctttagggtcggggacaggccctgctgtcttaactggaggttgtcataaacatcttcaaacttctcctgcagccaagtggattgccgataagtctcagagctagttttgcaggttggcttggcttatctgtgatattagtaaaatgtgatatgtgtgtgtgtgtgtgtgtgtgtgtgtgtgtgtgtgtgtgtgtgtgaaaatctcagcacttggtaacctaagactggatgggccgaaagttcaaggctaaccgagactatgcctttctttctggacagcctaggccacagaatcccaaagaaccctaaagcaatgagtattactaatttattaggtgctctctacttctcagatctttgagtgattgtgaagggtcggtcacaggatggggcgctgtgctaactgctttcttataaccagcctgtgggatggcattgagcacgctccttcaccgtggagtgtttg

SEQ ID NO: 32016 - DNA, 1130 bp, Mus musculus
aaaaaccacggagcacgtttacagtcccagactgcgatttctttcccttgcattgtttggtttatgtatgggcacggtctctgcttcccagcggagttattggagggacagagatcttattaaagcacttgacagccctccatccttctccaccagcccccagcctgaagggttttgcagatcttcgtgggtgcttggctctgccactttcctggctctgatactcactgtcaattgtcacccatagtacagaatgtccctgtgacctcacatcctggcagggttcagagagggactggaacttgagtcgtctgttttgaaccacaggggacactcagtgttcagggacagtgctaggagcacgaagcggaatggtgaattcaggataagccctctgctcacaaagcgatttgttttaaaccaaaatatagtaagatatactacagtgaggtgctgtggattctgtctgtgtgatttctggtgtgttaacgcaattttcctgtagcacttccgagaggcccacattggtcacgtgtgagtcacgtgaccagtcagtggagcgggggctcagttctttaagcacctccaggactcagctctaataaacgaaacatttcgggtcacattggctgacctagaactatacaggctggccttgaactcttgctaccttttaaagacaataattcaataaatcaatatctcaaaaaattattgtatgcatttcaactgaaatgactttatggttttatgcaaagcattcagtgcaagatagagctcatagtgaaaaatagtgtatctgttaattgaaatttgtacacgtcctctgcgtagcaatagtaaagcgtgacctactctccttgcgttttaggtgtggactgagagtatcgataatctggggactagaaatgacaggttttattgcttggctttgcatggtgctgattgttgaacccaggcctttgcacacactaagagcctctattactgagtcacacacttagccgtgatccctgcttcttacagttttctatctgctaaggaactgctgctttcctggtctctcctccatcctcttcttattattctgttctcaatcctcacatattaaaaaagtgagggtgctagct

SEQ ID NO: 32017 - DNA, 1215 bp, Mus musculus
gtgaggaccatttcacattaaattacttctgtatgtgcacatcaaaggatgcaaactaagagacgactacagagcgtagaccacagactgagagtgagagttccatccagggctcagatggtggaaggagagaaccggctcctgccagttggcccttatccaccactgtccctgtccatctagccacccgctcctattcaaaatctattatatttatttaaatgttataaaaattagagagaaaaggagttggtaagagtggttgtatttgagagttgtctgtggggtgtggagcgtgagagcgagacggaaaaacccaaactcttctttattatccaaaatataccttaaaacttcccagttctgagactagatcctagtacagcgtatgattgggggagggactggggaggtagcaaatgaatcaaagacgctttcagatttgtcctcctctgctacctcccctcctgcgatacaaatcactggaggggatcagtgtctccaccctggagtgagccagaggtcggactgtagctcgcggctgagccagtcgctgctgatgcaatccgcagcggagcgcgcccagctctccatcttccgcgcttgccgaccgaccctgagcgccacgtgtcactgcacagccgcctcctccagaggagactcacatttgcacccaggagccggagccacgacccaagccacgagaaatgaaggtaagcgtattgctgaagttcatgctggaatgcagctactcacccacccggaatatctcggacactgggtggagagaggaggatggaaggaccaacttgctttgtcccccgtcctgggctactaagcgtggggatctggcctcgtatccacccgcagatgctcccgctccggttcttgtcctggttctgtaaatgcggtacccagatttagaggatgccacagcgcctctcctacatgctccctaggcgggaagaaggaccgtatcgttgcgtttgagctgcccagagatagggtttggcgaggatgctcggacgctcttctgggtagttgtaatagaagggggaggaggaccctcttatctgccgaaagcagatcgcttgtcttttaaggtccaggttccaagtggaagcttccgagttacggaccactcgagcttcaggaccagagagtgcaggcggtgaactctaattatcatctgagatagctagcccagaggccagc

SEQ ID NO: 32018 - DNA, 1166 bp, Mus musculus
caaacccgactccagtaacttcaacagtgcatctctctggaaaatctggtttgttatcttatcactacaggctcagcacagtctgtagcctattggaatctgctacagcttcatgcatttactctgtaacctatacatccatatgtatatatatcagtacatttgctgtgtgctgtatgatatgagaattaatattagtaactaaaactagaatcaaagaacctgccatttagccgggcggtggtggcacactcctttaatcccagcacttgggaggcaaaggcaggtggatttctgagttcaaggtgaaagtataacaacataaaaacagaattctaggcctttaggcccaggcttgggaatgtggcctttgtaaaggtatgctaatcataaaacaaatagcgacattcctccatccacccgcttcctgggttcaaagagtgctcattcaaagaaagtcacccagaacctgcaatgcaaatgtgctatagttaggggctcttagaagctgtcttgagagttaattaccaggtattccttgtgactcttgtaactttacacttccttgtgactcttaactggtatctttggtatcttccaataacgccctccccacttccttgagttgtggtttcttcctttaaatacccccttacccagctactcggggcgacacggtcctctacccctgcgtggtgtatgaccatgggcccgagagcgctcttgaataaaaatcctcttgcaatttgcagcaagacccgtttcttgtgggtgattttggggtgtcgcctctcctgagtcagaacgtgggggagtcctcacattgtgggtctttcaaaggccagcctggtctacaaagtgagttccaggacagccagggctacacagagaaaccctggctcaaaaaaaaaaaaaaaaaaaagaacctgccatttgcccgaaccatgctaccaagcaagtaagtgggaccataggacactgccactgaaactgtaggctcttgggaattgttacaatacattccgacatggtgaaaagacacaagtgtatccacctatgtttctggcatatctcactcatgacaatgtgtagttataactcaataaaatgttactcttaaaagtcaggtatgacttagtttttaaaaagctgaacagatagactgc

SEQ ID NO: 32019 - DNA, 1190 bp, Mus musculus
tttagtacctttcatgataatataattttgaaagaaaatacacttaatttttaaacatgttatagccaattttcttaagtctatttcttcatttactgatgagattgtcactatcgaatggtgtctgacaggcttgccctttagcttctagagtgtctttgtccttgttttttgttgttttgttagcccatctagtatactaaagtgcatattcaaggctctctacagacacctcaaaatgatttaaatgcagttatcaaaataagacatgtgaaggtgacctctatcttgagaagctcagtgggtgactagcattgtgtagctattattcccattattctttgtgctgctggcctgccttaagttctgaaccacttcaagtagctttcatgaggagttgtaatgttcctctatttctgccattaaagctggtatattttctgtcgacctgtaaccgagtccatgtggcagtggacctaacccaggcaggactgtaagtttaagcaaaaatgtttatgtaatgtttttagcaacgttataaataacatttctaacttaaaagctgcaaatagtgttgcttataggattctgtatcaggctggagagatggctcagtggttaagagcactgactgctcttccagaggtcctgaatttaattcccagcaaccatatggtggcttacaaccatctgtaatgggatctgatgtccacttctggtgtgtctgaacacagacagtgtactcatagaataaataaataaacgaataaatcttaaagtcttaaaggagtctttatcaactaccaagcagacatttccaccaagaaatacctatagccaggatggggatgaggctcagtgttaagtacttgcctaaggaacacgtgaggctccaaaattgagccttaaccacaattaaaactacataattacacacttcatagtcaccataactatttttattacattacaatgattaggagcagtacggttcatgacaaaaatattacaaatttcagatcacttcacagcacgtactcctataaacatttaaaagttaattttaattaagagtggtcacttttaaatttaatgtttgatatgaccaacattccctaggtcagcgcaaccaaaggatggaaaacaactggatcacactgcatatgtcccataacaaacaaacaaacaaa

SEQ ID NO: 32020 - DNA, 1206 bp, Mus musculus
catgaattctgcattgaaaaattgaacagataataccaatagctgtaaattctgtcaaaacatgaaaattatttctaaagaagtacattagttttcaaagaacagttattagaatcagatctgtggtttagttcaataatttgaagtgcctgtttgggatggtggtaggcattttagatgaatttgggaaaaataaagttctgcagaaatgccagtttcagaccccgctaacccgctgagtgggctgtgtgctgtgttagctccagtgccccaatcccgtttcatgtcttcatgttgaaacacttctgcatttttatttgagtgccaatttcttactagtgctatttcttagtgtaacatgtttacctgggatgtattttaactatttttgtatagtgtaaactgaaacatgcacattttgtacattgtgctttccttctttccattccttttctttctgttttgtttgtttgtttgtttgtttgtttgttatgggacatatgcagtgtgatccagttgttttccatcctttggttgcgctgacctagggaatgttggtcatatcaaacattaaatttaaaagtgaccactcttaattaaaattaacttttaaatgtttataggagtacgtgctgtgaagtgatctgaaatttgtaatatttttgtcatgaaccgtactgctcctaatcattgtaatgtaataaaaatagttatggtgactatgaagtgtgtaattatgtagttttaattgtggttaaggctcaattttggagcctcacgtgttccttaggcaagtacttaacactgagcctcatccccatcctggctataggtatttcttggtggaaatgtctgcttggtagttgataaagactcctttaagactttaagatttattcgtttatttatttattctatgagtacactgtctgtgttcagacacaccagaagtggacatcagatcccattacagatggttgtaagccaccatatggttgctgggaattaaattcaggacctctggaagagcagtcagtgctcttaaccactgagccatctctccagcctgatacagaatcctataagcaacactatttgcagcttttaagttagaaatgttatttataacgttgctaaaaacattacataaacatttttgcttaaacttacagtcctgcctgggttaggtccactgccacatggact

SEQ ID NO: 32021 - DNA, 2983 bp, Mus musculus
gtggcttagactgttgggtgcttgttctccagacccctctagtgtcgaggtttgaagcattggtaggttaagattcctttcagtacttcctacaggatgagcaaacaaggtgaagcatggccactttctgttcagctttcctttgactctagtgtgaacttgggattgaaggtctaaagttggctcctgaagctctgctcctagaatgctcttgtcactcccggggttaggaggttgggaattactttgactgaatcagttttagtcacaactcatttaggtattttactttaatgaaacataggtgtagactttaatgactaatgttgaatgttctttgaagacggggtatttatatgacaaattttgaatagctaaatggtaaagcagtaataagacaattttggagggtggtcaagtacaccaccggtcagacaatttcacttatcatcagaggacaggggcatcacagcttttaaggcaccaatatctacagataatgtggcttactgtctgaagtccagaaacttggggggacaattaagatgtatggacacctaccatacatggaggcaggcatggggagctgagtggctaagtttgctagtagagaaacattagtgggaatcaagtccttttggagaaaaagccatttgttagacttacattgtgcatcacttactatgtcgcctgttgtgaaagtcagagcttccatttaaattatcagcacgcctgagccgggaaatggcttagtggttaggagcacccagctaacacttgtcagtaactcctgtccctggggatctaatgtctagtttgggcctccattgggtactggactcacatggtgcagacatatatgcaggcaaaacactcataccataaaataaagttgttataaatgtcaggtagtttgctttgaaagaaagagtaacttgaaagtatacaagtaataattattttgaaattactaaatatctaaattactaaatatcaggtattttgttagatattttaatacctaaatttaaataataatttaaatttaataatttaaaagtctaaaaacatcaactatccatgaagagatatagcctaaagaattcttaagcccattcggttgccaaaatataaccataaaacagaactacactctgggtactcaagcgtccattaacagtgaaagtctgtcatctgagcatggcaagccatcgcatattaacatgtcttatatatactttttttttatatttcagggtgttgacgatgccttctatacattagtccgagaaattcgaaaacataaagaaaagatgagcaaagatgggaagaagaagaagaagaagtcaaggacaaggtgtacagttatgtgaatactttgtactctttcttaaggcacacttaagtaaaagtgtgatttttgtacattacactaaattattagcatttgttttagcattacctaatctttttttttcttctgttcgtgcaaactgtcagcttttatctcaaatgcttattttaaaagaacagtggaaaccttcttttttctaagtgccagtattccctgggttttggacttaaactagcaatgcctgtggaagagactaaagacctgagactctgtcttgggatttggtgcatgcagttgattccttgctagttctcttaccaactgtgaacactgatgggaagcaggataatgaagcttccggaccatccctgctctgtgtccatctactcatccaatggagtcattagcagtcaatcgccgcttcactggacactgaggggtcacagacttaggctccctttgagtcgcgtccagcgtgtcctagactttatcatctttcagaggcgtaggcagactgttcacaaaggctttctgtagctttccactgcaattaatcttggtcactccctcaaatagtatattttttctagaaaaggggaaaaatggaaaaaaaaaggcaatggaaaatgttgaaatccattcagtttccatgttagctaaattactgtaagattcctataatagcttttcctggtaaggcagacccagtatgaaatagtaataaccatttgggctatatttacatgctactaaatttttgtaataattcaaacaactttagcatatataaaaagttctcataagaattaagtacaattcccctttgtcagattgttcttatcctaactttcaagtcttttttgaatttctgttgttgaaagtagttttaatggttgtgaagctgaagatgatctgagacagttatagcttggcaggtgttgaggagaccagagttgcagggttgggccttacgtgaacctgtgacgaacgctactgggttttgcagcactgctgcattcaatgttggcgacgcattgtttggtcaacataggggataaggagactttgatggcttagtataatgcattctcaccatgtaacagtcctactgacaaatcaagaaatttgtttataataataaaaaatttttaaaaatttcgatgttcgcttcaaggttgagattttggggtaggaggctacaacaagagtaaatcttaaagcaaggttttaagaaggtttgaaaatgcaggtttgactagtctctcaactctagctaaacaaacattcccaagtacttcccaaatctgataggtatttaaaattatctaatgctttaagaatagttaacaggaaaaaaatctcctcagtgcacttaaagcaacccttcacatcatttgaaatgagatggaaatatcactggactatgaggactggatgtctgtctgattttaagcaaatcactgtctgcttggttttgaatcatctcaaagacattaacctcccagccgtgtaacatagtttacatgttgacacacctagttatcaagctcagcacaatctgtaactgttttacatggattaacatcttcactgccagtcttgggcaaattgtgcaagaggtaaaattta

SEQ ID NO: 32022 - DNA, 1204 bp, Mus musculus
acaaattccctctcctggagctccccctttaaagtctagacagtgaacttcaatgacctggccaccgagtagcttatcataggacatatgtgttgagcagagctcatggctctggcgacctgaagagagacatgatatattcatttaaagaaaagttgaggttgggccactgggcttcctttttttccgacatcttagcgaggctgctgtggtctacacgactctctgagcttcgccatgccgcccaaagacgacaagaagaagaaagatgccggaaagtcggccaaaaagaataaagacccagtaaataaatctggtggcaaggccaagaagaagaagtggtccaaaggcaaagttcgggacaagttgaacaatcttgtcctgttcgacaaagcaacatacgacaagctctgtaaggaggttctgaactataagcttattactccagccgtggtctctgagagactgaagattcgcggttccttggccagggcagcccttcaggagctccttagtaaaggacttatcaagctggtttcaaagcacagagcccaagtaatttacaccagaaacacaaagggtggggacgctccagctgctggcgaagatgcatgaacaggttcaatcagctgtacatttgggaaaataaaactttattgaatcaaaaaaagaaaagttgaagctatttcactttgaatgggatcgtaagtatattaggtaatcagaactcctccttagtcctaaagcaattttatttacacactgtgttctgctcccacttgactttaagatctggagcaatgatcttactccactcatctctgagtcctccgcagagagtggagtagtgctgttacagtccaataaaaatacattactgtgtacctagatcatatactccaaatacatctatcctacctggcaaagtactgtgacttattatctagtattggataataatcctcaaaggaggattaccaatgttcttagtaacattcatgttcagagagtttcagtctttgactctccgttatagccaagcaagtgcaaggtcaaagtcagacagaagcacaggtcggggtcacctgccagtgcccttttctcttcactatagactgtgttattttgcctcccttgtgctaagcaagtctctgttgcaaagcttttggaccattaacagagacaaacatctttaccccgaact

SEQ ID NO: 32023 - DNA, 1099 bp, Mus musculus
agcctcatgtgatggcttacatttctaattctagaacttgagaggctggggcaagaggattatcactagagagttcagagcggaacaagctgctctctctctcgtgtgtgtgtatgtgttgagatatggttggacttgaatgtacttactctttccttctgagaactggaattccataatcctgcacaaccatacctagtggaagtcagttttaacagagataaaaggagtgcctgagcattcttggaaataaagtttgaaaatagacaccaaggtactactcaaaattgtataggtgtgtcatgcagtttcatgtttctgttctggtttccagcgtgagtgtatctctatccacgtggggcaggcaggtgtccagattggcaatgcctgctgggagctgtactgccttgaacatggtattcagcctgacggtcagatgccaagcgacaaaaccattggcggcggggacgactcattcaacacattcttcagtgagactggagccggcaagcacgtgcccagggcagtgtttgtggacctggagcccactgtggtcggtaggtgcttggggcctgagtggaggctttcctgggaaactggggtgtctcggaaaagcccaccgagacctgtgcagagtagacaggatgtacatatacatagtatgtagaattgtgactttgttgggtgagaaaattaaagttgtatgagctgtatgatatgtgtactcttagtgatatatatttcctaggagaaactgttgacatttgtgcttaatggaattgaacagtccttgcctgaaatactcacactacgtatggtctttctctctctagatgaagtacgcaccggaacctaccggcagcttttccacccagagcagctcatcactgggaaggaagatgcagccaacaattatgccagaggtcattataccattggcaaggagattgttgacctggtcctggaccggatccgaaaactggtaagagggttgtagaagaggcttcatatgatggttgtcccggtcaagggggtcacaggtagtgggggagttattttggcaaaaaggttagaatcaagaatctatcatgagtaccaa

SEQ ID NO: 32024 - DNA, 1115 bp, Mus musculus
tgcatatttttatgctagaagacttccattctcttatcctaaaggatctgaccgagcactcagtgggtaggaagaagtgtaagccattgcttttgtaggtaaaccaggactcacagtcactctctgcacaaccctagtgactcacaagcatgcacagaaagcagggactgtggggtgctgctgagcagtaggaggtggggtggattaggcctggccttcttcctctccttcaccgtacctgtctgcagggtgaccacataaaacagtgtagttctgaaaacgagacaccttagtcccctccagtgctgcactggtagtgagctctgtctgcggacagttctgcatgttctgtactgcttaggctttgtctgtacagctccatagtgtgttctgtggacagacagaaactctgacaagcagtcccaagaaccagtcgcacaggagacagatcccccagttcactccagttctcgacactggaaggcaggaatcggggttttcactgccggcttcccttgcacactcttgttggatgtgctttctctgtgcttgcctgttctttgggtaagttgatgtctaaatgggtgaagtattattttgtaagatttaagcatggcgtttacatgcatttaatcatgagacttcatgtcactcagagacactagttttgcacacaagcttcctatacttttaaaaattataattggtgatgcacatgctagatttatatctttttatgtttactaatattgtatatatgcatgtgcatgagatttttttcatgttaataatttctttaatcttaaaattaaacatttagcaattctcattctcaaaagagtcttgctatcttaaattattctttgaaatagcagataggtactttacattaaacactacactgcaaaccacttaatatttctcttgttacaaaggagatttcatagaagataaattattgtagatcattaaatactaccaccttcagacaaatggagcagtaattaattattgctatttctattctgtttcaccccaaagaacatttgaatcatcctctccagagcatagtgggatttttatagccagtgaagtacaattctgtatagcactgt

SEQ ID NO: 32025 - DNA, 1111 bp, Mus musculus
ggactgaccctgcgtctctcctgaggaagctcagaatgttcaaatctatgcaggtttagaagttcaggtcagcacctggggccaccactctttgctgtgggggacacattttcagtgttttttctttgcttcatctatccccagaagttctgaacacttatacatttgaccagagtgtaaattctctcagttgggggaaatagaaagtagaatttctaagcaagccagaaggatgcttataattcagatctgaacggtatgctgccacggctttgagaggtttgctgtcttctgaggctgccccaggcggcctggactggtggacattctgatgctaactgagaacagttttcagccatgtcctccgctgcattactgatggttgcatgtcccgccatgacagtgctctccgatcttttctgtctaggtcgaactggaaggtacaccctgatagagaaatggagagacactgagcggcacttggcaccgcatgaaaaccccatcgtgtctttgaacaagtgggggcagtatgctagtgacgtgcagctcatcttgcgtcggactgggccatctctcagtgagcgacccacctcggacagtgtggcccgaattcctgaaagaactttgtatcgacagagccttccccccttagccaagctccggcctcaggcggacaagtccatcagaaggagggagcctaagcgaaagtctctcaccttcacagggggcgccaaagggctgacggacatttttggaaaaggcaaagagactgagttcaggcagaaggtgctgagtaactgcagggcaacagcagaggagctgaaaaggctgatccggctgcagacggggaagctgcaggccatcgagaagcagctggagtccagtgaggcagagatccggttctgggagcagaagtacagctgtagcctggaggaggagattgtccgcctggagcagaggatcaagagaaacgacgtggagatcgaggaggaagagttctgggaaaacgaattacagatcgaacaagagaacgagaagcagctgcaggatcagctggaggagatacggcagaaggtgacagactgtgaaggcaggctgaaggactacctgg

SEQ ID NO: 32026 - DNA, 1301 bp, Mus musculus
ctgaacatggagcctttcactcttcgcagtattgacatgttgtccagcagctggaatgcaaagcctttgtttgtatttgtagcattttgagaccattaggaaagcattgatctacgtttatacatgaatacaccctgaattaagagcaaagaagttatgtgactgcttagtttaatttattccatgtaattgattaatgtatgaatgttgctctctaatgttttattaatacttatcctgtgacttaattctgttaagtgttgtgggactctgactgtgtgcatgttggcagactccatctgagctttgctcatgtacagcttcggagcctcctggggcgctccaccatccagactgactccacggaactcgccacacttatctggagcctctcttagcccttgcttaagtgagataattcagcttgctttctagtctggaagttaattgttcctttacagtattccaaacatgacatcacagaaatatcgtaaaggaagtaaattgttcgtgtaaaatgtttgtgatctcagacggtcctggtgcactctgtgaggctctcctgccttcctgcctcctcctgtgggtccccatgagaaggtcccacgagaaggagaggtccctgggggtctgattgctgtgctttgggaatcacgcgcaggtgatatacttgagaacaacccacttcctttttggactttatgccatgcacagcagggtgaatgttgcttgccaagacgtcgacgtggacagagtgcttgttctagacatagagacagaggagagagcacccaggtcaggcattttttaccaaggaataaaattaaattcagagtatgttttttatttttaagtttgactttataggatattagtctccatttatatttgtatcatttgtgtataaagccaaaaatgagtcagtactttgctctcgagcagtgacttcactgcagtcaacagtaatatttagacaggagctgccaggtgcctcagcccttcccattctccagtaaatttggtacagtataactaagactttaatctgaaatttaaagtagcttttaatcctgaagagaatgcatcctctgtattatttacatgcaataatatgaaagtgggttagcatagtgatgccgcaaccacactcaaggtgagctgaggtgggtgaccacacccaacttacttctggtttgatgaatgttcgatgaagccgagaatgctgctttattttagtttccaatgaaaagatttaagactggctgtgaagtagtagacacttgtagagaactgaaatttgt

SEQ ID NO: 32027 - DNA, 1100 bp, Mus musculus
gggtcttgctgtcactgcctcgcaggtgacttgagaagtaaattattctttctgaaataaccattgcctgaacacatttgctccagatttgtagcaactgtttcatatctctatatatttaaaaagaataattcaaagtccgagtaacttgcagctttcggtggcacgggtgagtccacaggcccagggcctgccttactctcagactcttcctctgttgagtcattgcattgatcagataaattgaaaccttgctcataaaggaagacactgtacaaatggattatcttccatttaaaccaaaatgttggtggtaggtaggttacactctatgaaaaaaatgaaagatgaagctgggcgtggtggctcatgaccgtgattccagcactctggaggttgaggcaggacagttgccaggaagcccaggctatcctaagttacaggggaagttctaggatagcctggggtctggtgtgagaccctgtggaaagaaagagaattgcacagatcccctgacacactcagttgtgaactgtctggcttactgaggaacctaaagaagggcggcttcccaccagctcgcagcagtcctggctctccaccaccgtcacctctgaacctggaagctgccagctactctcccggcctcccggcctccccgactggtggggtgcagccttgagagttgacaagcacgttgagaagctgtgctgtgtcacgagtcacagggccttcacaggctcatcactgtccagtgttttctaaagcttttttagctcggggtgggggtgggggggggaaacaactaatttgtgtaggaacatctgaaaatattttagtctgctgtcacagtttttacctattgtgactataaatgaattggcttatgaaccctacctttggctacatgtcagaggggtacagccaatggtattaaaaaactaccaaatgcaaaattttgcatatggagaagtatacaggttctaaataataaattagatcacaaatttttgtgtctttttaattagtactacaggttacattatgtggtttttctacaggtattaaatatattacaagtttttttcttaccaatgaat

SEQ ID NO: 32028 - DNA, 1867 bp, Mus musculus
ctgctttctgtgccacacttcataaaattggcttttaaaatatgtatccctcttggagctgtcttaagggactcagccaaaccagcagtttctgtttctgcatgtttctcatcttgggttttccttattttcttacagcaagaaaataaaggcttgagagagatccttcagataactcgagaatcctttttgaaccttcggaaggatgatgcgtcagagagtacgtctctatctgccttagtgactaacagtgacctgagtctgaggaagagctgagtggctttctgtgcggtcactagaatgggcccagaagtgagtggatgagtgaacataaagcccaacttcagtcagccttttccgtctggtatgtacagggacactggcaaagagacggcagcagaatgtataaccagtggtcataaactagatcccagtcacagtcagaaaggagacgctgagccacagagtgaacagcgagtcttcaaggtgctgctgagcactgcagtttcagaagtgctgttggcttcttagatgctacatagatcaccctgaatactcctaataaatgttggaaagcctaaattatcacaattttaaaagtaaggttggtgtggttttctgaatggaagactttgttctaagtcttaccttcctgttcagtgtcagagttggcatagcttgtgtacataaagctgctgagttggtgctcacctgcccatttgctcggccctcatcaaaggcagttcatgtttaaagactataggaatacgtcacttgcatcacaaacagaaggaacatacttacacctaattcccataactcttagctagcagttattcacgacttgcttaagtgtatgcatctcaggaaagaaagacaaagaatatactttctaagaaagacagccatatatagacacatttagtaggttgaactactttgaaagattatgttttggttctctgttaacaatgaacctggttcttcctcctcttttcatcatgtttaaggatacaagacagttcaccaatagacaagagttgacaatttaatgtaatgagataggtatggtcatttccaagttaatttggaattcctttattgttatttaagaaattactcttcatacacttacaaagtagatacaggttccaaaaatcaaagttctgagtctgagtctaagcctcatctagttcttataacctgtgaggtttttcctacaacctgtgactcagaaactggcagtgaagtgtggacacaaagggattgtgctttgcactttaaaaaaaaaaaaagcttcttaaggccacaggatacagaagtgtgctttcataccaactgcaacctaaacttttctgtagtgataagaataaaagattatgagatatggctgaaaatacactatacttgtatctgaagtccatactgaaattagcacagacagaaagttagacttttcaatatatcatttgttaagtacatattactttgcagtgtaattttatgtgtaatttcatgtattggcaaaattaaaaggacttttcactccagaacctttcattctgaagtttgaggtgagtggggtcataggtcagttaggaaagggccagttccccagatgttaaaccgttctcatgcagaggccttaatattttatatataagtgaatttacttttaagatttttctattgttttttggaaagtaacccttaatttaatggtactttctttcatgtagttttgtcccaggccagaattttaaaaagaagaaaagcggcacagacgagatgagtcagatcgatgtattgagcaggtctattgtgaaacgttatttgagaagtaattatttttataaaaaattattta

SEQ ID NO: 32029 - DNA, 1972 bp, Mus musculus
ccctccccacccctacaagctatggaagcaagagagagaacgcagagtgaccaacatcctggaccccagccatcacatccctcccctgagagagaggctttatggtcgggttgctcggatcaaagagctcttccagaaggaacagccggctggagagaggacacccttgcttctgtagaaggctgagggtcagtgtgcttgccctggagttctcgtctagactgcccagttgtcccaggtccatgcagggccagccagggtgggtgacagggtgacgcccccgtggatgtacagcagtggagttagaggattctaagtgatatggtgagaaaagtctccaaaaagttggccgtagatgtttttcctcattttccacagtcttgagaagttaccttttgatgattgatgtcttttataaaatacaccaaaaaataaaaatgtctccttgaagccctagtgttttgttcttgtagcttcttggacagttatgactcagtcagaacctgtggaggggaggcaggcagtgggtatttattcgctttgtgtgtagaagtttagggatttgatttgggtccttgaatgtcaagactaagggaaaagtaaccccccttttccttaaaagcagtctgattatatttggctgcatcttataataaaatcaggaacccttttcatttattttcaatattcaaacgatttattttaaaaactggcaaattatcctaacacgtaacaatgtagatttcctgttgttttgccagttagtgctttaagtggtaaataactaaattttttctgtaatctaaaatagctcagtttattaaagataataaaacttttatatgagtaagttatttatagcccattttgtgttggggccatttagagcagtgttggctgctgacccttctttcttaggttgcattagacggtgactggaccgtattttgtcagagagacatcaatgagaccttcctagcacctgtgaagttgtgctaatgattgctctgtataatcaaagcccctgtgctctgaagctcagagggattgatcacttagccaccaccatgggttctgtaaggagggacatgctcttgactcctctgaacggcagggctgagaactggcttccctgacgtgtgtggcccacagtgcgctggtttgtcagtggtgtgcttcttagtctcttcacagcaatgactatagccttgacatttcagggagtgggtggagtcttcagttgtggctttgaaaaaaggttctgaagttaaaacataatgaaaaattataaaatgaaccccttttggtttatttctgaaaatcctattctgttattactacctagcttcagcaatatatatatatattttaattgctatagggtttctggcttgtcacatgcttgcattttagttgtacagattgttggagaactattctttgtactgtcggaacacactgccagtcagagctaaaaaaggcagagtatgctttctcggagggaaatacaaaatatttgtaaattttcataatttttaataccatttgtataatttttgtaataaatacctactttgaaaaaaatgcttaatgtcctccttattaggatgtctccaggagtttataccagtcttgtatgtacttatataaatttaatctggaaaatacagttgttttaagaacttcacttaaggataacaggaagtgaagggaatccagggtgatatgttatggtttatgtagatttaaatgtatttactcattttttttcattatttattgactttacatcccaatatcagcccccccctcccacagctccttcccccatcccctattcttctcctcagaggaggaggtcctttggctatcaccccaccctggaacatcaagtcattgcaggactaggcgcagctcattgaggccagacaaggcagcccagctgggggaatagaatccacagacaggcaag

SEQ ID NO: 32030 - DNA, 1199 bp, Mus musculus
ccacatccacccctccaaactcctccctgtaactcctcccacacccacccctcctgactccctccaatttcctgccttctgccttttgtttttgtttgtttcaaatatttcactgagtctagttcatgctactcatatactcatgagtaagagtgtccggtggagcgtggctgacctgccaggggccacattcttaaagaaaactgactctcagtgctggaaagatgtctcaggtgttgagagcatttgctgctcttgcagaggacttggattcagttgccagctcccatttcaggtggctcacaactgcctgtaacttcagctctcggggatgtgactccctcttctgggctgatgggtacccacactcacacaatcttttaaaaagggaacctgagtccttccccagaaggcatcggctgccaatggctccagtgcactgctgacttgcatggtcctgtgtaggtctcatgcaggtgatcacagctttaaaagccacgtcaacaccacttgttatgttttgctttaggtggccaccctaacagctgacgataaaacagccgtgtccttctcttccctcccgggacaaggagtcatctataatgtcatcgtttgggatccgtccctcaatacttctgctgcttatgtgcccgtgcacacatacgcctgcagctttgagtcagtggatggtaactgtgcttttcctggtgagtatgtagacttcaacctggacagatttgtccttggctttgccacttgatttccaccagtgaagagcttaaggttgttaaaaacgttttgtcgagctttcattcactcagtcactagttgcctttggtaagaccccacattagggctgaggggatggctcactagttaagagcacttttgtaaaggaccaaggttcagttccagcactcacatggcagctcacaaccatgtataactccagttcttggtatctgatgccctctgctgacctccaagaataccaggtatcttagggttttactgctgtgaagagacaccatgaccaaggtaactcttataagagcaacatctaattggggctggcttacaagttcagaggttcagtccattatcatcaaggcaggtgcagtgtccagacaggaggagctgagaattctaaatcttcatctgaaggctgctagtggaagactgacttctaggcagctaga

SEQ ID NO: 32031 - DNA, 1981 bp, Mus musculus
tacaaatccaaagactgggtttttctcaattacacctacaaaaggtttgaagggctgacccagagaggctccattcctacatacatgaaagctgggaagttatgatgatcacagtcgcccatagccaggagaactcaggtagctgcatccgcaggctggctcggcatcagcaccaggagctctgggacagtgctgctctccagccagaggaacgactacagcttgggaatctgaggctgctatggctatgggaattgctcagcttttttttttctttttctttttttttgtattaactttattatacaaaggtactggaacaaaagaaacagacattccctcctaactgcactgcctacgtgcatgttgagaggtccatcctgcccatgtgctgcgcttccgattgcaacactaatccagccagaactgcattgcactgacggcaccatgacagcctgaggttgctctcagtgtccctgcttcactgcagagcccgtgggtctagaatcagtgaaaagccatcttctgtagctgctgttagtagaacatttgccctgttggtttggacattgtgggctctacatgaagacagtttctgtaccggctccaaggaacttaaggacgctgacttcaacgacattagaatttcctgtcaggctctcacgcagaccctgtgatagggaagatgagcttctgttagggtgagggcatttctcaccttcgctccggcatctccaaggctgacggtgctgagagattgtgacttgacgactgatgtgcacacatggagatggacctgaatgattgtcagctactcacttttaacaatgctgtagcattgttttagtttgaggatggtgagctgagtttcagaaatgaccatgaaagctgcttgtagaacctagtatgtttttattaaactattttttttaatgtcaaacttctgatcagtcaatggacactgtggagagcagagtgtggctcactgtggctttctgcagaggtggtacttgtccagctggtgaccctttgttcccttgattgcactagtgccattgttttccaatgaaccaaagatcctgaacagtggctgtcagcagggagtggagctccggctttacaggggagctgcgctcccttgacagaggccagccctgttcactgttagctcatcactgtggttaaagcccattatgaaatacaggaagtgggtgctggctgggagggtgtgactggagactgggcagaaaagtcagcatcagattcttggggtgtttccctaaggattacatcatcttttcttgcttagcattttgattctgaaacaactttctgaggagatgtagttttgtgagttgtagttgtagtaacttctcagggaatggctaatgtttatcatctatgattgatatagtgagactttatgggaggaatgcttctcctgagggcactgagcaatgccttgtgacccctctttcatcaaggccatcagctcctgatttattttggtgagtcctttaaggccccccccattttgctgttgagtctggtaatcaacaccacttgttatctactggctcagctgtagcctgatcaatcctatgccaagtatttggagaaagcactgaaaatggtagataagcctccctgactttagctgccttaatatctgcagggtatatgagcttctccaagtagtctgtctcaagggtacttaagcagcagagacccctgaatatagggattctaccttttcttttagaatgggacttttctagtgtgagtgtctaggttggataggagaccttgccaaattctctagctcaggtgtgataactacctaactatcgtagggtgggtgttgtcaatccaggtaactggggtagtttgagattagtgtacaggagaattaccaaacttatgtttccatgatgtagggacagagcactttgtctgatctctctgttgtggttgtaaaagc

SEQ ID NO: 32032 - DNA, 1226 bp, Mus musculus
tgttagtggtaggcaagagctcactttttaaaattaattggagactcccaaatgaaatacatacacaccgtgatataagattaggatttggagagaattggctttttagcaggctacatattttgcccaagcctcatggggatttctccccacagaatgatacaaagagtttgggctcagaggctctgggattccttgctatgcaaagaaagaggctggctgctcagaggcagagagagtcagacactgcctgctaatcaaaggctagagacaaatctaatttgatttgtttttaaggataaaagggaatatagcttcttcttcaggaaaacaccaaatggcagatgacgccgccggtgcagcgggaggacccgggggcccagaattaggaggccgtggccgtggtcgaggtcgtggggctcgtggaggtaaagctgaagacaaggagtggatccccgtcaccaagctgggccgcctggttaaggacatgaagatcaagtccttggaggagatctacctgttctccctgcccattaaggggtctgagatcattgacttcttcctgggagcgtccctaaaggataggttctgaaaatcatgccagtgcagaagcagactcgggctggtcagcggaccaggttcaaggctttcatcgctattggggactacagtggtcttggtgttaagtgctccaaggaggttgccactgccatccgaggggccatcatcttggccaagctttccatcgtccatgtgcggagaggctactgggggaacaagattggcaagccccacactgttccatgcaaggtgacaggccgccgtggctctgtgctggtgcgtctcatccctgcccccagaggcactggcattgtctctgctcctgtgcccaagaagctcctgatgatggccggtatagatgactgctacacttcagccagaggctgcaatgccaccctgggcaactttgtcaaggccacctttgatgccatctccaatacttacagctacctgacccccgacctctggaaagagactgtcttcaccaagtctccttatcaggaattcactgatcatcttgtgaaaacccacaccagagtctctgttcaggggacccaggctccagctgtggctaccacataagggtttttatacaagaaaaataaacgaattaagtctgctaaaaaaaaaaaagggaatataatggtaattgcttaaatgttctt

SEQ ID NO: 32033 - DNA, 1159 bp, Mus musculus
ctcatgtacacatagttgtacatattctcacatacacataagtatacatatgttcacacatagtcatacatgcagctcattgcacagtaccacctaagtacataacttatttcatggaattcaaagacttcatgctctctaaaatttcatgttttctgggaggcatggccccacctgactagtcgttccactagttctggtcacttttgagcctaccatgctccttttccatctgtcccccacagctggccttttcattaagcatcaaaccattcatatttactgtcaatgacactttttattttcatctatgtaagatttagagagatagatctacattattggattatttggtctgtcttttccctgttttttgtgatcattgctagtggctaggctgatttatctttttcaggtgtggtgtttttcctaacataaatcctattgctctctgactttctttggaaaccaggttctaaagccttggagtattccaatgggatttttgattgccaatctcccacctccccatttatgggaagcttgcgcgctctgcaccttgtggaagacctgcgtggattgttggagatgatggaaacggatgagaaggaaggattgagatgccagatcccagattcaacagcagaagtgcttattgagtggcttcaaaatcaaatggtaggcttctgtatgctccttctctgtgctgtcaatctcctgtgtgatccttctctgtgctgtcagtcttctgcatgtgccttctctgtgtgtgaatctttgcatgatccttctctgtgctgtcaatcttcttcatgttctttctttttgttgtcaatcttctgttgtttactataaaactgagagcatagattagcagatcagcagaagagaaaaaaacttacaaggcagaacatgagaccccagttcctctctgctgtaaagaaaacttagaatttttctttatatgaatggatattttgcctacccatatgtctgtgtaccaagcatatacagtgaaggtatcaggtttgtgtgtgtgtgtgtgtgtgtgtgtctgtctgtctgtctgcctgcctgtctcacaacagagaattgtgagccaccatgtcagtgctgggaattgagccatgctctgaaagaacagacagtgtagtcccta

SEQ ID NO: 32034 - DNA, 1198 bp, Mus musculus
gttaccattcaggctaaattctacttgataaacttctttggctcccacaaaaattgctgagcagtttggagcttggactttaatcttgactccatttgctttataatgaagaattttagggtattaccacatcaacttgaagcctttggatgcactcatatacccatcagaaaagtttttgttagaataactttggaaaaacaaaaaaaacaaacagaacctttacatcttaagtttctttttttttccctttgctaaactcatcattatgttgaactaaggagtcctgcctagccatgtcgattgtaccttacactcagactgtcagctgatggggcttcgtattatttcaatcagaacccaaatattttaaagctgtagaacattttctaatggctatcctgtccaacagcaggttgctcatgttttctgtcacacagggcccaaaggctttttgtaaagaaaatagaaagctacaaagcagctgttgagtggtatgtgtctatgagtgttttcagcagggttggagacaatctacttttcattcagggctactctaaatgagatcccctgtgttctggacaggagcttagacactgggggacaggtggacaggtcactttacagtgatagatctggtgatagctatttccaaatgtcagcagtatgccgtttttatgctctgcaggttataaagctgttcattgtgaaccttgtaacactgctggttatttctaattaaattatcagatgctaacatgctcccattcatgatttcatgacaatattggcttcttcctgtattggggttttagtttaacatgaataaataccaccatttgaaagctcagtttgttattagaacctggttaaaataccagcagactgttacagatgccaaatattctttatcaaggacaatgtaacaactgatgatatgtgataaagttaaaaacttttgattatatattttatttacaaaagtattatgcaaagtttgcattaccttatgagaggaaataaagtcaattgataattgccttgtgtatttgtcattgtttctttgttcagaaaaacaaagtcttcatttctggtggaaacagtaactgatttttgtttgtaaacttgcacgtttgattgagtttttttgaatcagacaaattgagatctctgcttaagaagtacatataaaaggaaa

SEQ ID NO: 32035 - DNA, 1176 bp, Mus musculus
tatatatatatatatatatatatatatataccctcctgcatatgttcagatggttttcctttatcttggtatgttcctcaggctggtcttgaactcctaggcatgagggtctgccatcctctgccttccagccttcagagagctgggactaaaggtgtacagtacagtattggctttctacaataaataatctgtaacttataacttcaaatgtaaggcatctaccatgtcagtggttgaaggaatgacaaaaaccaactcgtactgttcaatttccccctcttatggcttgaagatgcattcctttccacttcacccatctttcccaagtggcctgggggacaagtcagggcttgtagagagggtttgttgccccagctgcttggaaggctgaagcaggcagattccaagttaaaattcttcctggccttcagagtgaattccaggccagcctggataatgtagcaaaaccagaaagagtaggggaaaggtgtcttagagggatagcactagcctagaattttgaggcctcagattcaataccagtgtcccagcagtagaaagagtagccaaggacaggatgggcgctctctctctctctctctctctctctctctctctctctctctctctctctctctctccctccctccctccctccctccctctctctgtctctctctctctctctctccttccctccctccctccctcccttccttccttcctttcttttttttttctttcttctcttctttttctttttttcaggcatagtttctctgtatagtcctgattgtcttggttctcactctgtagaccaggctggccttgaactcagagatcatcctgcctctgcttcctgactgctgggattaaagtgtgccaccaccacccagctgaggataggcttttttttatcaggccacttgatgccatcccagtcccactctggtctcttctaggtccattacaggacaaaggaacctttagatcagagattatttgtagaaacatacctcgttctgatggctcagaggttaagagcacttgctgctcttgcataagattagtgttcagcgcttagcatccctgtctgacacccccttatgacctttataggcaaccacatgaatgtgcacacacacacagacacacaaataagcataaaaataa

SEQ ID NO: 32036 - DNA, 1285 bp, Mus musculus
attcttggaccaaatgaagttctaacactgacatccacaaagctctcaccccaggcttaacatgtagcctgtgtgcagtatatggctctggggtttagatgcacagactcccagcagaagtttgttgttcttgctgtcatctatgcttggagaagagagtcatgtcatagaactgggagggttttatgacatctgtctgcctgtgccctttctgagcattctgagagcacttggagttcagctggtgccgactgcagacttcgccaggatgatagtgttcctttggaaaccttcccttcctcagacaactccttatgcgatacttcgtatttctttccattctctgttgccttactccccctaccaccagcttctgaggggttctagctcccactgtgtagcaggaagtgtctgggagtacccccaagggagcttcctgtcaagtgtgcactcctactccgggaggcttctccccttggcaccagaaaggttctgagatgattgtgtgagaatctctaacttctgcgatctgagctaggacatattgtcaaagaacctacaaggtgggggatgctggcaagaaacgcatacggcttaggattaagcatgaaaccaaagagaccttgaccctgctgtgttctgttgtttctaacgccaagaacccaagcaaacttaaatgccttaggtttccgttcaagcagagggaaggcgaggatactgtagctctatactgggagaacagaggaaaatgtttctttttaataaatagttgtttatagactattagaggagcagtcctcataattccagggaaagttataagcctgtttggccaaagaggtaaatagaaggggccctgatgtctttgtcaaggtgttgggtgagcttagcttagcactgctgacgtgaggggctgcaggacaaagggatcatgctgaaggctgtcttgaccttacccaggagtacggggtctgtgtgtacactcgctctgtcagggtttgcacttaggagacctgtcaatcagtgctaccagacatcctgccagcctaccagagtgaagtgaatgccagttcctgcccctgcctccgagatagtcagtatgaagggagctgtgatctctggaagtagtgagctacatcaattccattccttggtgaccagaaacattaagtgttggtgtgagacagagcctagcctggggacactgactgagccactgtccctgggacaatgtgctctcatttcagccatggtgtagtcagagatgcccactttagtcaggcac

SEQ ID NO: 32037 - DNA, 1169 bp, Mus musculus
tgttggaagaagtgtttcattgtgggtaggatttcaggtttcaaaagcccaagccagtttcagtgcttcttcctcctcttcctgctgcacgcagatccatatgtacaactctcagctccctctaaaactgtaaccaaggcccaattaaatgtgtagtttgctgtggtcatggaatctcttcacagccctagatacctgagcaatcagtcttggactctatcagaaagctaaaccatagcctgtgcagatgagcaagcattgttcctactgattgctcggaagtaatgctgtgtagaatagcaaccaggcctgccttcaagtttctgcttgagttcctgcctcagtgatggactgcaacctagattgcaaacaaaataaatccctccttcatccaagttgtttatggtctatgtgttttatcgaggcaacatatgtaatgaatattcacatttaacaactataaagttgacctcttgatattcctgcccttcccagacacgttttacagcatctttaaatgataattctttcttttcctttttcagtaagtcaaccaaaaccactggagccatcttgatcctcttccttgttcaacaactcttataacactgagcaccaaataattggccttccccttgaaaagtatccagcttcaccattttcactgttgtcatagataggcgctctccctgtagcttgtatattggaacagaatcaccactgggctctgctgtggcccagtagtctgatctccatacagcagctagggtgaatctttgaaaatgctactcagaatgtttcttcattttacagaacccctgatagactctcttatttggagggaagaaaaacccttagtccagttggcaagaccttttagcatctgtatcttctcacacagagagaaaatgttatggaaaatggataaggcctgatcctcactcctgcacccatccttctgggttcattttctaccatttacttctagttgctgctcaagacaagatgtccttccttttcttgagtaaagagctactgttctgatggtttcttcagcctatgatacatctgaagctagctgtctcccgacaagctctcacttaacctcagatctctgctgagatgtcacattacaagctgtttccttggcatccacataagaaattacc

SEQ ID NO: 32038 - DNA, 1794 bp, Mus musculus
tggaaaatttatagtggaaataatttgctgtcgtttcagacttggatcctacaagcctgtccgttctgtaagtggtactgcaggtggtgcttgtcttaagtgctggtggtggtgttatgtctaaatagaaaggattgccccttataaagcctgtgattagagacatcctgtagagtggaactaacactctcgtcttgccttccttcccctctcaggtcccctttgcggatggccacacagacaaccacttacctcttttagagaacaacacacattagtaccttgtgggtggagaaaaactttttgcctgagacataaagccttttctaataataacatgttgtgcaatatattcaaagaaaaagaaaatatgagaacccggaaacatatttaaaaaagaaaaaaacagccaaggaaaacaacaaactgcagtcgtcttgtatatgttgtgtctgttacaaatgtcatagaagaaattatgcagctaactggagagtcagcccagccaacagtgccaggtgaagacagcacctctgatgcctcccagcaaacagacaatatggaaagcagatcctagaggatggacgtcaacccgagtttaaagaaaagggcattgataaatgcaaatgtgtgcgtcctttgtttttaaagatgtcagaataaaatgtgtaaaacatatggaaaactagtctagactttaaaaaaactgtaatcagctcacatggttaataaaggaaacagggactggccctgtgttacagccatattaatattaagccatattgacaagatggtgttgtccagtttggggttctgatgaaggtcactgcattcctttgaactccagttgctgactttcctgactgttgaaggttgagccttagaaaactaaggtgaagtttcctaaggcccaggtatatacttgctatgatgtgtaacaggtgtcactcacagcttgaacaagggacactgcagggagaagaaagcataaatgtttaaaaagataaacagtttgtaagatgtgaagggtaaagttgagtgttgtatgcttatgagtagtggaaaactggacatctgagacaggcaaggcagtgtccatacaagactgaagtctgaagcagcctagacacagctgtaaccctggacaggtgctgccctcaggctctgcacagaactgatgaggctacggtaacttgaaggagccctgtcaggtactgctaggaactgctgagtatgtgtgccagcctcatttcattctgtctttttgaaagataaaggttaagtcattgagtgagaagactgagtttcagtccctaccagacacaggacagtggtggcttcgagtgtggcctgtcacaatcagtgtttcaagtgaatgtttttaaggataaaaaaaaatgcttgaaagaaggtaggccatcagggaaggaggagacggcaacaaatcagcagcaaagtgtatgaaaaatggcattttatagaaaataggacattttggttaaagtgcgagaggttaagagtcaaggagttaaatgacttaatactattataatgttttaaaattttttttaaaagaatccaggaaatttcaaataatgagtcttttctgaggtttttgttctattttgttttggttttccccttaaattttatagtttgtctagaaacgggacagctctccagaattttgttagcaagaactggtcacttgagactgaatgttgctcttcatgtctacttactagggaattcagtcagttttcagggaagaaaatagtaatttagagttatttt

SEQ ID NO: 32039 - DNA, 1165 bp, Mus musculus
acttggtttttattccttgattaattctaagctcatgaaaaacctggtgtgtctacgatgaccatttccacactgttaagaatggtttagttctgggttcttggttgttttgttttgtttgaagtagtatcttgctctgaatgcacagccctccagcttttccttcctagtgcaggattacagatgtgcctctaacctcagcgataaccctggtagttgtctccaaagagcttctgtatggtccagggcagttcatcctatggaaaatgaaatgtcctatgtgggacactgtagcttggtaagaagtgcattttaggagccacaccacatgtttcttttcccttcctctcaggaacgcatcatcaaccatgctgcaggcagccacggcgtctctggaatatttatgaaatatgatctcagttctctcatggtgacagtcactgaggaacacatgcctttctggcagttttttgtaagactctgtggtataattggaggaatcttttcaacaacaggttaacattcatttctttgcctaatttccttttattttgttttgttttgaggtaaggtcttactgtgtagatctcactgggcttacaggcagtagctgccatgttctgatatctgatttcttatagtgtttattactttatcttgtgaagatagttcactgatggagtatgctgtagtgtgactctcactttttcaaggtccagcaccaacaaacaaacaaacagacaaaacataacatgatgattctattagaaataagaaatagtcacacacacacaaaaagaaatagtcacattttcatgttttaatatttggaacttctttgaattctaaagctctaaaatatatttcatatcctgtaagcacatccaattcacaggaatcagtaacgtaaggaagattattggtaagccacatacatcctgtgtattaattacagacagagctagaacagaatctgtgttccactactgacttggtagtccttagatagttcacttaccttttatgaattgtaattatctggtttgtaagtgtattgtagagttaaacaagaaaatgcccaggaagcatcacagatgtattgaaatttttttccctgtacactatgaagtcatgatggtggtggtttgatttaatcagtaatgct

SEQ ID NO: 32040 - DNA, 1222 bp, Mus musculus
tagcctccagttcactaccctgctgtttggcctgcacttagtttgttcttcatactacagcacttatttcagtgtctaacaggaataaacagtttgtacttaggtgtgaaaggtgagcttagacattgagcagagtgcctttggtgcccctgactctgtgtctgttacactgctagccacttgtatcgcttttactgagaaatcaactctgttctagactagaatcccgtcgtaaatacatggctcgtctaattcagaagcttcgctataggtgagcaagtcttggcttggtgtgtatcttactgtttttgttgcatttaggatgctgcagctgattcagagtaggctgcaggaagagcattcccttcaagacgtgatattcaagagtgcttttaaaagtgcatcaactgcactgccaccaaggtgagataggtgcttccactgtccacgtgttgaccagaaatttgctttggtataggcttggtattgctctgctgctctttcttagaaagtgtttatgtgttgaagacatcgatgattttgagcttttcattgagtgactttacttttgtatgtgtggtatatctccatagtaaatttttactatgtttaagaacaaactgtaggactgtataccttctggctaagaatttatttttactcttgtgtcagaataggtaacaagaattgttgtaatcatgaaagtgatttttcaaataaaaatatgcaacggctttatattggcttagatagaaaataacagtttgtaagtgggtcatgtgccttttcctgacgtcggtgtcatttccatacagcctgtaccacagtacagaaatacatgagggacacagggtgatgttggactctctttgattttcatagttcttctgcatgggacctagtcctttgagtagacttgaagatacataatgatgtatatttatctaactatagcagctatatagcaactctaagcagattcaaaccactgccctaatcctgacatttaagacattagctaaaagtttgtctttagggaatcttctttttcctgtgtgccccttttacaccactacatggtcacaatatccaatgtgcattaagacatctgaatatgccttgctttatagggaagatgattcatcactgactccagatgcgtgcagaatccatggtcatctctatgtcaataaagtagcagggaattttcacataactgtgg

SEQ ID NO: 32041 - DNA, 1183 bp, Mus musculus
ggtagtgtctggagtagaagtaggtctgtccttgcatttgtaagaaactacttctatgttaagtgcttttctcctttttgttcccaaaggtggcttctatttaaggttacctaatttcagattattaccaaaaatgaacttacttagggttttctttctcccttcaagcattttgttttctaatggctagtatacttggagtcttttacttttaattaccaattttcctggttggaagaatcttaattttgaaattgaatatggttgaacaaacagtgaataattagggctttctaggtttctagcacttttactagaaagctcgatctagagatgaagtatattttatccagaaataataaggtgagagtcaggtgtgtgctgcatacttgtaatcgtaataatatcaagaggctgggcaggaggatcaacagttcagaaccagcctgtactacaaaactctgtctcagaaagctaaaacaaacaaaaacccggaagtactaacatgaactactcctttttaatattttaagatttttatttatatgtatatgccatgttgtgaactccctgatggtgggtgctggaactgaaccccagtattgaccggtagtaatgagtgagaacagactgtttttattaagagtcatgttttgggctttctgcataccttcatacagcatttacacttggtgattggtttttgagttcaaagcagacatcttacagttaccttaagctctgactgttgccattcattaagctgaattgaactacaagatttctaaaacatgggagctttcagcttctgttggtctgcactccaaatattttgtcttaagacgtataaacctgaagatgagatctgctttctagatgcttcttactacttctctctgttctgcttctaaatgggtgctcaagtgtggagacctgcatggccctgccacatctgacagtgtgaacattagaattcacatttaactttagaattggctctcaggtggtacatttcattaaataattaggatctcaatctctttctttacaaacctggacgcaaagctttttgggatgtctgctttctctttctagatttaaagtttatttcaaatgaaatttattgtattaatttgatttgtcatttaacaaaacaggcctgttgtcccagtaatctagatgg

SEQ ID NO: 32042 - DNA, 1099 bp, Mus musculus
cattcgatatagcagtcctttaaggaagtgggtgtaggccctcaaaaccctttctagtaatgtacttcttccagtaagactcctcctttgaggttctaaaacctccctaaacactactaaatacaagcctactggggacagttctcattcaaaccaccacaaattgaattctggtatttggaagttaattttatgtgagcatggtcatatgaaagcaaagcattggttgaatcttatgtaaagccagctttggtagtacacatcgttaatcccagcacccaggaggcagcaacaagtgactcttgagtccacatcagcctgacctacatagtgagttccaggccagccagtgctgcacagtgagagcctgtctcagagtgaaaaggctgtaaatccttaagtattagatgctttcctggtagtttgctctcattcatccaggttccatttctaaggctggctctttctgttgtctgaatctctaccaggacatgtatgcatcactgagcactgatacttgaacatctggagcatctactgtataattccattccacagtaaagaaacagcattgaaggataccaacatagtgtgtgatggatggctttatgatggaaggaaaaaacttggaattgctgcttcttgattcaagtttcatgtccttagagaactattgtatctggtgtttagtctgagactgttgaaatatcccttagtttcttaggattattgattgtggagttgcagttaacaaaggtgactgtttttggagaagcagaaatgtttttgaatagtcactaagtaaaacttttgaagggccagagggatggcttagccattaaaacttgatattcttgcaaaggattagagttcagtttctcatatccatgtcaggctgttcacacaaaagaaaaaattttaaatgttcttattctgattttaaggaatgtaagtgaagttctaactgttgtgttttactgtctgaaatctacagtttcataggtgagttgatttatatttctggtgtccggctgattgacaggtactgacagctgcccttttctctttcagcaagttgcgaatcaacatagacattact

SEQ ID NO: 32043 - DNA, 1170 bp, Mus musculus
ctaaatggctgctgcacttagaaagatttcttagataaatgttatgtcttatgggtcagtgacttcatctcttggaatttatcctcaaaagcaatctcagcctcaaagctctttaatggcctatgtgtacttctgagtcgggtatgcacccaggctcacaaaggcatctgcagatgtttccagggttcctcaccgaccagtgtctccccagttctctcctgttggacagaaacatgtctgcccctacatgcgaaagagtgaaagctggagatacttagcaaccttgtgtagttacaccactttgagaaagccctgtgtgtgtgttgtttaatcttttcattcatctcttcttcccttcctctttgctccccttataaccatcttctgaaccatcctctactatatggtctgttctggtatcctggctagattgtgttggaagttgggcccaattctctttttcctcaaggcccctcaaggtttcctggaggttcctgttagtacctattttttttttgtaaagtcctattttgaaaacaataatagagcttaggaaaactaaaagccaaacatcttattgttgctttaggcatggtcttcttatagcccaggctgctcttcaattcactgtgtagcagaaggggatggtcttgaattcctgatcctcctgcttctaacttcctcaaaactcatttttaaccatgtatgatctgcttttctggaaaaggcccagagcaaaaagaaaaaaaagaagaaaaaatcttaattccaggaaaggttggctgtctgtcactccttgttcactatggctttctttgcaaatagaactgagtgacagccttatataagacccaggataggacaaactaacaggaggctttcctggtgtatagtgcaattctgaacatccacaaacactccagctcttctctaaaacccagtaggggtgtagtcaacaggaatgctctgggcctccagctttgcttcagttatagaacatatgaaattcaggattctggaattcaaaatatatgaaagccacagaccatgtaacaatgagaagagaacaatgagtctctgtcatgagcatcagtgatctggacttttagaaagagaatcagtccttattccagttggatatgggttcttgtgtgaaattggaaaaagttc

SEQ ID NO: 32044 - DNA, 1173 bp, Mus musculus
atgaaacaggcctctaaacttagggaacagagttcaattcccaaaccccatacactagctagaacaaactcctaggagtcattctaacttacgcatacaggcacgcacacgtacacacgctcatgtacgcacgcacgcacgcacgcacacttaagcatgtacacgcaaacacgcacgcgcaaacacatacccactcatgcgcacgcgcacactaaaggactaaatgtaataacaatagtatgaaatatgtcttcaagtgagttttgttgatcttacagactgcactttccctgaaggcaggtagctcctcatgtttttcatccagagtccaggcagaaaagccccttaactcagagcccgctcctccggcctccctccaacagatggcgctaggaagtcccgcctactggaaaggacccggatgggtggggtttctcggctgcgcgcgcagctcgcctcactccgcttgtgctctgggaaggagaagggcgtgtttccgcttgctcctccgccatggctcgtggtcccaagaaacacctgaagcgtgtggcggccccacgccactggatgctggacaaactgaccggtgtgttcgcgccccgtccgtctgccggcccgcaccgcctgcgggagtgcctgccgctcgccatcttcctgaggaacaggctcaagtacgccctgaccggcgacgaggtgaagaagatctgcatgcagcggctcattaaggtcgacggcaaggtcagaaccgatgtggcctacccagctggcttcatggatgtcatcagcatcgacaagagcggcgagaacttccgcctcgtctacgacaccaagggccgcttcgcggtacaccgcatcacgcccgaggaggccaagtacaagctgtgcaaggtgaggaaagtcttcgtgggtaccaagggcatcccgcacctcgtcacgcacgacgcgcgtaccatccgctaccctgacccgctcatcaaggtcaacgacaccgtgcagatctcgctagacagcggaaaaatcaccgatgccatcaagtttgataccggcaacctgtgcatggtaaccggaggcgccaacctgggtcgcatcggcgtcatcaccaaccgcgagcgccaccccggctcctttgacgtggtccacgtgaaagatgccaacggcaatggcttcgctacc

SEQ ID NO: 32045 - DNA, 1103 bp, Mus musculus
cagctgcctttgctacggccgctcgctgcggggcgagtttgtacacgacgatgtgtgggcgatcgtgaacaaccccgacgtgcggcccgggacaccgctgcgctgggccatcttcgctaacgacttctggggcaagggcctggcggacagcaccagccacaagtcctatcggccactgtgcgtgctgtccttcaggtgagcctgtgcgtcctggggtctagacgcctctccttggagaagggatggtacggcggggacacttctgacaggtccctcggtacctcctctaggttgttctcccctttctctcagttctacccctggtcttttagtcatcagccagatcctcctggatttatcttgtgttctggctgttcagtctggtcctctaggttctacgctttgcatctctgccctgttccgttctccaatctctgccccaggtcctctgggctctatgcttggcgctcctgattctatcttaagtgttctccagggtctgtcccaggccctcacaactctagtattctgtcagcgcagccccagattttctctgaacgaggttctctccgctctgccccgagatctcgttgctctggctgggttctctcgggtcggactctgatcctattgctccaggcttagtcctgaatccacctggctctacctctggtcattacccgggacagcttaaggttctcaaggctttgctcaggttctgaagcactacatcgttttcttctggctctgttttgggtactctccgcgctactcggggagatctctgctctgccctatatcttcccagctaaacctaggttctcccgcgcttcctggctgcggagttgggaccgagttctgcctgctatgtcccccggggcttcaaggatggcagacttctcgctggagcttttcctacccgcgattagcgggttccagagggtggcgatgctccaagttgtcagcttctccagggaggttgtactgctgggcagatgaggaataaagggaccggaccaggtggcctacgatgctcctgaagctgctatgctgtgggtgttccaggtaggagctagggagaggtgtcaggcaccctactctga

SEQ ID NO: 32046 - DNA, 1617 bp, Mus musculus
gtctctggcttcagaagcatccttgcttccttcaaccaccctgtgctcagaggcttctttcaaggcttggaatttaggctctggtttttcacaagacatctgtggttatcctaagaactgttaagttccgttttccatcacttttcccctcttgaatgggatgatgtttctttcaggatcataagtgtattgataatattgataacctgctaagttcagactttacccacctctcggcagccagcagcagggacttgttggtcactaggcttagcagaaagactgaaggtcttatgaatcatgtgcttaaatgatactacaggaattgtgggcatccaaatatgaaagcacaccgaagttctaagcagaaggtgatttctgggtgggggcttggtcagtagttaccattccaaccatgttggacagggcccaaaacattttatatgttttctttttttctttctcctttcagccctcccttctttctttgtgagatagagtctgtctctgtatgcaacccaggttggcctcaagattgcagtcctgactcagcctcctggccactgttaacacacccagatgctgggttttgttatgtagttctggctggactggaactcactctgtggcctaggctgacctcagacttgtggcagcccgtgctcagcttctaaggggttggaattacagccacgacaaatggtagatatttttttatttagtaacaagacacaacagatctaatttaaccatctgcttttcacagtctgaaatctctccagcctgatttagcttattagtctttgttattgctcggttgtcttttttataaattcttcaagggttggtctctcggtcagctgggtgaataggtgactgatgatgtcagtattgcagatggctcttcctgaactgttcaagagcagaatatgaaccactgtgctttcatctggcaaaatgaaaacatgttatcaggattggacatatttctggatgtgatacagattttgtttgtgtgaaatacctgcagcttaaatttccatcagcaactggcaggattttctaggtgattcctgaattacaaatcttgtatttttttttttttaatttaggttatttaatttttttgtcagaagtagctataaaaaagccatatgtttcagagagaaattaccctgtattttgccatctctcatttttcagggcaccaaagctgcatgccccccagcagttagaagggcaagattgcattgaaggggtttcagacctctgaagtagtcagttttctcccatgtcttctatggtttaattgtaacataggtagtatgccttcacactggatcccgggggcatgggttttggagatgttattttgtggtgaattgtcatctgcagtattaaagggaagacatattcctgcacatcaccataccttgtttttaaagccagagtcattgtatgatttttattaccagaagtgctaaccggaatgtgatctggttaccttggaaatgcaggaacttttatgaatgtactgtaaaataaaatgtgggctaattcccagaaactgaactctgtctgctctatgggatgttttctggaatgtggaggtgataa

SEQ ID NO: 32047 - DNA, 1159 bp, Mus musculus
ttcatttacattttctggaaatatttaaacttttatttttttaaactacaggaacccatagattagaaagttacttttggaaacttacaatctttttgttcacttattttatgtgtataaatgttttacctgcatgtatgtatgtgcaccaagtatgtgtctggttcttgcaaaggccagaagatgatttcagatctcctagaactgaagctaatagatagttttgagcctccatgtgggtgctaggaattaaacttgggtctcctggaagagcaataattgctttaaactgctaagcaatgtctgtagtcttcacatttttattattcttattataaattattattttctttataataatatagttatttttctagtctctgcctttatgttcatctttgctatcctgcttttttggtagtaaatgcatgcccatttttgggtatagggttagtacctgggtgtaatgtatgacttcctgatctgccagggttaattttttgtgtgtgtgttttggtttatcgagacacacacacacacacacacacactgtgtagctttggccatcctggaacttgttctatagaccaagctgaacttgaattcagagatccatttgcttctgctttctacacccacaaggaggcttacaactatctgtaatgggatctgctgcccccttctgctgtgtctgaagagagtgtcagggtactcataaaataagtcttttttttttttttttttttttttggtttttcgagacagggtttctctgtgtagccctggctgtcctggaactcactttgtagaccagactggcctcgaactcagaaatccacctgcctctgcctcctgagtgctgggattaaaggcgtgcgccaccacacccggctaaataaaataaatcttttaaaaaaagaaaaagttgtgtgctgccaccaccacctggccaaagttaagcaataagagggatcctatttgttaagcattttattaaataaacgtgtaaaagagctaggctttgtagcacagtcctgtaatcccagactgggagatgtagggggagaatcaagaatttgaggtcatcttcagttatatggtgagtttcaggacctcctgaacatgtgacagcctcaaaacaataaaattgagctgattg

SEQ ID NO: 32048 - DNA, 1104 bp, Mus musculus
cactccagcaaaagaaaataaactcaaggatgattatagccgccctcccccccaagtctgatgtctctctccctctctcaaggataagatcaaaattgatttcagaaagacacattgaggtgttcatatttatatcagactgaagaaaagttcatcaaataaacttccccctcttggaagggttctgtcatgtccttagtgatttaggaagtagccatgcttgcttggtccaattacttgtgtgttggatccaagatgtattttaaacaaatattggcatagatagtaaggagtttctgttgtcagtcaaatgaggatataaaacatagaaaaaaaaatcttatgctacacttgagcctcatataaagatagcctgtgttttgttgttgttgttgttggttttgtttttaattactatttctgcatttaaattatacactgttttcctttgtattattaacaatgtatgtcagaactggagttttctcccctcccccatctgaacataatataaaatctgaaaagtattgtgacaagcactttaacatatcagacaaactgacatgggttttcaggttttggagtacatttaaatatgacttttcatgctttgttctttacaataaaactgtggggttgatactttgttgttttgtttcactattggtggctcttactaaaaatttcataaaacaagagacttaaaaaccagagatagccggggcatggtggcgcacacatttaatcccagcactcgggaggcagaggcaggtggatttctgagttcaaggccagcctggtctacaaagtgagttccaggacagccagggctatacagagaaaccctgtctcaaaaaaaaaaaaaaaaaaaaaacagagataaggggcctggagagatggctcagaggttaagagcactgactgctcatccagaggtcctgaattcaattcccagcaaccacatggtggctcacaaccatgtgtaatgggatttgataccttcttctggagtgtctaaagacagtgacagcgtactcacatacataaaataaatacataaatctaacaaatacaaaaaaccaaacaagccgggcggtggtggcg

SEQ ID NO: 32049 - DNA, 1966 bp, Mus musculus
ataacagaagctgagagaaagaatgaagcctttctgggtgtttcagggaaatgtaaagcaattgtcccagagaagttaaaagccactgtggcagactgaggagtgaatttgactcaagagacaatttaggaactcctgaaacctttctagtttgatagcttatttatttttttgttaagcaaatgttagcaactacataaatctttatcttttggtgagtaagtttcggaactctaattaggcaccgataccttgttagtagcaaaattgcctcggcagagctccaggttttattccctgttgtagctgaaaacccaagccatggcctctcaggatccgtgtgcaatctcagggccctgggctcttgccagcagtgctgttttcctgtttactggaggaagggactaatagatcaagtacctcatgccctttatcagaaactctgaagaaaagggttgctgaggatacatttacacacccatggaaagaaagggcttagaacatgtctctagatgacctgtgtaacccagtggtttgtttacttagaataagggtgtttatagtagaatgagagtattctagagaccaatctacttactataggaaacatccacaaattaagatacagtccatcccagggttttattgctgtcttttcccatggggccatcctgatgctgagcgcttggtggacttttaagtcagtgttccacagttgagtcccaacagcaagtacagcctcttcattttataggtgaaaataggacacttcaaatcaaagactttgtattcttgccctctcccccttgacaacacaagggttagaatttatgctttttaccacacccgagagcatgaaaccaacctcggagacattcttactcaggatcatttcttctgttgaatcttcagtcaactgtacagataggaagctatgtttctgtgatgcagaataataaggactgaagcttgccttgccgcgttagattgttttgttgttgtttgtgaaacaggatctcactgtatatccctggctggccctggaacttcatttgtagaccaggctcacctggagagatctacctcctaagtgagggattcatgtgagagccctgcctaccaaactgttcttaatctcttaggcattacatctgtggttaaaaaatgggagcagagttgcattccagcttaagtttaaaactgttacttaaagtagtaccaaaaaaacaaaaaattacctataaagttttttgttccacatgatgtcctttggatgagctaatggctagccttatgccttgctcagacagctgggcctcgtgggagctgcttaactgacccatagcccattcctttgaatttcccactggcgatagatcttagccgtacaggataaatttaatatgtagaaacactgtaaagaccttagggtgtgataaaaaagaaaaatgtttccactgaatttggggttacccattgcaaatgataaagaagtaaggcttcttatgtgacctataacaaactgaatcaatatgggaaatgcatcacaatggtaacattgctcaaaacagatgcatataatcgtacaagctgacttctgtaaggaccatacaacaggcatccttcgtgctgtgctatttaaaaacaaacagacaaaaaacttagtacaaagctttagaatcaccgcatagaaaatgaaaatcaaaactttatttgcgtgtgtgcaaataaatttaaagcaaatacctgggaccaagattaatatcctacgtagtaactaaagttaaattggcaaggagaggtagctaagcagttaagagcactggctgctcttgcagaagacccaggttcattgccagcacccacatggtacctcacacccacctattactacagttccagaggatcggatgaactcttctaaccaccttgggcacccagcatagtgaacatacattcgtgtagg

SEQ ID NO: 32050 - DNA, 1146 bp, Mus musculus
agggaaggaaacctgtcttctgtccagggcaccatatggtttctggctggcttctttccttgcagggaacctccaaataatgataaagagagtcttcccatttcacccctcaaatccagagtactggcacttcatgataggaacctgccatatcattgcaccagataacttgttctgttgtcccagtgaagagtgttttttttctttgtttttgtttttgttttgttttgttttgttttgtttttctatttcagttgagaaaaaacagagaaaattagacacttggcttgggttgtagtttgcagatagtgcagtgtagttcgctgggagttgagtctcaggatctcttgaattcttttccagtgtatcacaagccttgggcttggccagtttgtccagtggcaaactccatgaaatctctgaaaaaggtagcttgcttgaagtgtttcctgcagacttacagttgaacatcccatagtattttgatttatgtttcaccaggatgtagacactattaattatttttgcagaacccaatgctggacagatccaagaaggaattggagaagctgtgaacaatattgtgaagcattttcacaaacctgagaaagaggtattttgggcaataaaactatatggtgggactttttatttccccttattagggtatttctatgtaacctggaacttactgtgttgaccagcctagcctcaaactcaagagatctacctgcctctgcctctgagtgctgggattaagggtgtgcaccaccactactgggctcatttgtaagcttcctattggctacaaaaatatcatctgttcagctaccctcagctctttaattctctagtgtggttgttatttggtggggggtgggggggtaagattactttattttatatgtttgagtgtttcccttgcttgtatgtctgtgtaccacatctgtgcctggtgcctggaaaggtagaagagggcattagatcccctggaactacgtctaaggtttgtgagccatagtgtgggtaccgggaacagaaacagatcctctgtaggaacagccaatgctctttaccactgtcatctctccagcccatctagtgtttttttaagcatagaaacaacagaatcccttgtcactgtgt

SEQ ID NO: 32051 - DNA, 1166 bp, Mus musculus
cttgagagttgggcatatcctactctctgactcattcggtcaaatctttgattagtcactttctctgcccctcaactagctatcactttcaaacatgactgattccatctataaactaaccttacttttctttcttttttttaaaaaaagatttatttattattatacataagtacgttgtagctgtcttcagacaccagaagagggtgtcagatctcattacgggtggttgtgagccaccgtgtggttgctgggatttgaactcaggaccttggaagaacagttgagccatctcgccagcccctaaccttacttttcattgtttgggactaaaggtatgcactaaagaaatgactgcattccagccacaccacaactactgtgatctagggagtacctgtattccagctgaatcacataaacttagaaagcctttggatgtgatcccttgccagagcagccatattgttgaactaaaattcctctacataaccagttatagctttaatctgtaatacctcctcactgccaagatttgtgttgaaagcctagtccatccccagtgaattcgtgttcataagtggatcttaagtgttgggattcagacctggaaccaagtggctgaaatgcatattttacataacaaagtgaacctgacctccaggttctcccacctgttacagggcacacaattggcatacccagccctctgtcatgaactgtccagctgacgtgctgggcttccccacccatagaagatcttccctatataacccagatattttggtctccctctctctccctccctctctcctgcattttctctccctgcttgtacactctttctctcattctcttccccatggcaacttccctggtcttgttccttgggaccagtgaacccacccttatccctggtcccttgctctctgcttcctggtcaccataatgtgagaagccatttctgctgcatactgtggttgccttaatatctcaccccacctcaacacaaagcaatggaaccagcagaccatggattggagcctctgaaacggagctagatcacttctcttttaagctgatttcctcagttattttgatatagtatcagaaagataacacttgagttccttatttatctttccagagatattttattaatactg

SEQ ID NO: 32052 - DNA, 1149 bp, Mus musculus
gtgctgtgcagtgtgtaaatctctctttaccttggatggattggtacagtacttttgtatctctgggacctactcttttgttcagtaccttgaaattcatatgaactttataatctgtaaagtttttatagaataaatattcatctgtgaaaatttggtaaataacattaatattttttaaatatctatttatttattatatgtaagtacactgtagctgtcttagacactccagaagaggcatctgatttcgttacggatggttgtgaaccaccatgtggttgctgggatttgaactcaggacctttggaagagtagtcggcactcttaacccctgagccatctcacagcccctacattaatatttcttaacacattaaaaaaatttaaaaagagctgggtgttgtggcacacgcctttaatcccagcacttgggaggcagaggcaggcagatttctgagtttaagacctgcctggtctacaaagtgagttccaggacagccatggctacacagagaaaccctgtctcgaaaaaccaaaacaaaaaataaataaataaataaaaaagaaaaggcaaatcaattatttgattcagctacaaatcagaggtgggaatgacaagactgagttagccacaaccaggctgactgcatctggcttcatatatatctctagtttttcttttgattggggcggaagttactccctagcacaggctatttttgaagtagcaacaatcttcctgtctcagccttccattcacatagtgttttttcatagaaaataataatgcaccagtattttcatataactgtatatattccttaatagtgcattaaaaaaagctgttaagtaggtgtttcctacaagattggtggcaatatgggagctgaatctacaaggaaatttctgcataatcctattaaaatcttgactaccactgaaggaaaatgagattttgtaacttgtgattcatgtaaaaaaagttgtctatgtctaaatcccatggcttggggccgagaacaaagcagaacaggcccaggcatgcatgccagggcagggctgttgttaagacattcctaagaacagcttgaccgtaaagatgaaaaggaatgcaagggcacaagcagggctatcttgtctgagtca

SEQ ID NO: 32053 - DNA, 1181 bp, Mus musculus
tggcccttgacgtttcactccagaagcccttgtagaaatatagttttagcagtcaaaatgaccagaccaagtctaaagctgcgaaaacaagattagcagttctcggagaaataactataacaaataataacagttctcctgtcccgcctcgcactaaattccaagaaaaaccacaaattgctctgaccttgctgccagaattcccccgcgacattggtagctgaccaatgagtttaaaaatattctgctgatttgctgacccatcataatatgattgtaaggcctgggggtcttacaccctcaggtgattctcatataaattctaggtgcaaggctgagcttttttctcccctcagactgtagaaggcacacctgcccggcactaggaccgcggccctggtgcaagcgctcgggggcggagtggggacccagctggacccgccccaacgaaggctgccaccaaacctctgcgcgctctgcgcttggcagaggcctcgtcccttgctattggcgtgtaagcacccgccgggcggcaggtctgcttcggatcgggcttttgttcggccccctgggctcggggctgggttttcgccacctctgtcccggcggaggggcgccgcccgggtcctcgctgtaccgcggggtcgctgcgcgccgggcgggcgcggtctgaggttgttggcccgagaagcaggcgggcttgttgcagctaagcgtcccttccggtttcggaaggagaagcagagctttgttttgtttttcggtttctttctgtctcggtcttccgctccttggcccccctgcgacccagcggaattgccttgcgctccgccttcgagcgcccaggcctgtgtgagcgccgcggcccgcagcatcttggaatctgtttgcatttgtggtacttaagagtgccttcctagaaaaatggaaaaacaggtaaagtgggtgagctggcttgcatttcagtaggccaactacagaacttgcgtggggatttaaattgtctgctgggtgtgttacagttaaggggaatcttaagtttgtttcttgttaccattcagatatactaaggtcttagttattgctccactcagcccccatcaggttctcttttatcagtccactaaaattactaaagaagtatttttgctttggtattaaagggcagtagtggacttgga

SEQ ID NO: 32054 - DNA, 1180 bp, Mus musculus
ggttaaggatatagaaggccagagatactatagatggactaaatcatacttttagaattccttgaattgttagcatttgtaattttgcagagttttagtggattttttttttttgggtgcttttattgtaaattagaaatactggttttcactttaatcactttagtgtactgtttgtacaaacttcattttgtaatgtgaaagcttgttaagcagtctggcaagtcaaaaaatatatatgtacaggaaaagtttaatatcttgtggtaggagttaaggcagcatgtgcaagggccactgaatggcactggcaggaggaattcaggatttgtcccagggcagacagcaggaaagtgctgtacctagacaaggaatgaaaacaaaatccctcacaatgtgaggtaatacgatggtgtgttaactaattctttcctactgtcagccttcctggggactcaggacccagcttcaaagtatagctctttggccaatggagtcctttgaacgaaaggagaaaagggacctctaatgtcagtctctctccactcttctcatcctcctgtctctaaactccttttcatgaagccaaccacagatgtggaaaggctattctgccctctaccctctgcttctttgtaagaattggctataagggttcctctgacctgtgtaggattgccagcctcactcacagaggttcttgccccaaacccagaggaaagtaccacaaggagaccaagaaaaagcagacagacaagtgtggctgaattttccatatgtccactcactactacctttttatctcatcatttttttaaagattttttaaagatttatttattatatgtaagtacactgtagctgtcttcagacactccagaagagggtgtcatatctcattacggatggttgtgagccacgatgtggttgctgggatttgaactcaggaccttcagaaaagtagtcagtgctcttaactgttgagccatctctccaggcccttatctcatcattttttaagttaaattagtttaccctatgtagatgggtgttttgtccacatgcaccgtgtgaggccagaaaagtacattggatctcttgggactggagtaacagatggtttctggaaattgaacttgggtactctagaagaccacctagttcttaactgctgagctat

SEQ ID NO: 32055 - DNA, 1268 bp, Mus musculus
tcagcattggacaattctctgaggtgaaaataaatatcaagcagccttacagtgaatctgttagaccttctggggatggtgttcaggcacttgttcaaaataatcaagaaaaaagaaaatatacctacaatcctaatacaaatcaagtaatagatacaaatgccacaaaagaaaagctggtgagggatattaaatctctagtagaaatcaaaaagaagttttcagaacttgcaagaaaaattaaaattaataaaagtcttttgatggcagctggttgtagtaaaacagctaatacttcttatactgaaccaattcagcattctgaattttcagcaaaagaaatgtctgctaaaaatggcaatgactgttccatggaattgctagcaacatgtctttctctttggaaaaaccaaccttcaaaaaccacagaagaaaatgttccaaaacctttagaagaaaaacagtgtaacacatcaagaatcagtacaaccgtagtgggcagtgccaatcccacaaatgaagttcatgttaagagtttgtgttctggtgttggaaattctcagaaaatgatgagctcatcacaaacagtattgccagttctcataccgagctgtgagtcttccggtgtagctgtaggaaaaggaacagagcttcagattgctgtggtgtcgcctttagttctttcagatactaataccttacctggaaaagactcagtgcctgaagttttacctgaaacactgtatccagttgttaaggaaggtagtgtttgtagcttacaaacccaaccaacagaaactgttgctttaccttttgatgttataggagctgtagcaagtaataacatatcagcagagattcctctgcctgttgataaggaaaagcagcacaaaccaatacagggtgatccagacatagctgatagcagcttaggaaaacactctcccctgggcactgaagttctgcctaagcctatggatagcaccattgtgagtggacctatgttacaaatcgaaagtatctgttctcttgcagaaggggatgtatcttacaattcccagatagctgagatattcaactctgtacaaactgagccccagaaaccttcacctaatcaggtaattgatagtcaacaagaacaagtatatgataccactgaaaataaagactttagcttacagaaagataagtgtgtacagtgtacagatgttcctcatgaggtccctgagcagccagagcctctgcagcctgaagagccagcatctagt

SEQ ID NO: 32056 - DNA, 1152 bp, Mus musculus
gagagcagccctgcaatagtggaatcactatttttgaaattaatcctgtttctaataactcaaaaactcctctgacccaagcaactgaggaaggccatttttctgcagtgcatggtgaaaagaccaaagcatctaaaacaaaagacaacagggagggacaggaattagcctgtcatttttcagctaaatgttacaaaaaagataaaaaaggtaattttaaaataaggcatgatacctcactgaaaatggagcaaaaactaaaaaatatttcatctaaatgtgacataccaaacccctcaaaatgcaataagatagcagcccctgaaatacttcacgtaacaacttctaactctgctaaaaatatgccattttctaaacaagcctctcaggaaagcctacagaagaaacacacgtcccaagacttgggtccagtaaaagcacctatagaactttcgtcaaacacagatccgtgcaggagtaatacctcttcagtacagtcagtatcaccagaaaagaaaaaactaaaattcaaagcaggtggctccaggttgaaatattttgaaaaaagaaagacggatcacgttattattccagatgtagaaataaaaaagaagaaatatgaaaagcaagaacagaacaaaaatgctggagacacactcaaattgtgcagtattcttacagagtcaaatgaaagagccagtgttcaagaaaagacagttccaagtcctgagtcctcagacccaaagggtagctcctctaagagtactagagttataacagtgcaggaatatttacaacggcagaaagacaaacaaataactgggaataatgcttccagaaacatctgtgtagaaactgtgctatgtgactcggggcacacgaagaccagtaagcattctgcagcagtaagctggggaaagttagttgaggggcagagtatcagtgcagagactgcaaaagaactggaacataattctagcagccatggtaaagacttcaagatccatcactctgaggcgtctagaacacacagtgtgtcaaataataataaaggaaagtttgatgggaagcagcctgataaaatgtttaaaaataagaccagtatgaataatgagtccaaccagatgcctctccaggtaaaagaacaaagga

SEQ ID NO: 32057 - DNA, 1401 bp, Mus musculus
tttgccgtgaaactcagactggccttgagttgaagattctccttccccaaccttgaaaatgctgagattataggcatgcactgccatttcagctatctggctttgttttctgttcccatacagatactgtacattttgtctcacttctgattgttgtatatttgttgtactgaacattaagtatcatttttattttctcagatagtgctgactcaagactttctaagagaagcctcagtgcagatgaatttgaaatactacaaaacccagtaaaagaatcaaatatcatgttccggacctacaaaaagatgtaccttgagaagagaagcagaagcctcgggagtagtccagttaaatagtcccaggaagtcatggtttttgtttttaccaagagaacacccctagtcttttcttttcaggctcccttgcagaaaatacctcaggacagtcacatcgggatttctcagccaaggagttcctgtatagcttttcactgatactatgtgactgaaatgttggattagctgctggtgagcaggcaaaaagaaagattgcatttgtctgggaattacaaagtgtatgctaatgatgcagtgatctgcattgttgaactgtgtttactgggttttttgttttgttttctttttttttttttttttttgagacagggtttctctgtagcccttgctgtcctggaactcactctgtagtccaagctggccttgaactcagagatccacctgcctctgcctcccgagtgctgggattaaaggcctgcaccaccacgcctggttcacgtttactgttttaagtcttgctggcacagtggtgcatacctgtgaccctaacatttgactcgtggacacaagaggatcaagaattcagggtcattctcaacagaatagtgagtctggtgaagtcagcttaggctacatgggagcctctctctaaaagcaaaacaacagcaaccaaaaaaggggaatgagggtggcttatacaaaccttactttgaaatgctgtcatcctgaggtaacttggttgtttgactggggctgtaaatagattcttgtttctaagcacattagcaaaatttatttttcagaaagtgcccattgtgaatgtcaaagtatattccaagtattttgtacctcattgtaaaggttttttcagaagtcttgttttatacttttgttaaagtgaatggagtttttggaagatgtcttaacattacttttcatacttgaaataaacatttattttttaaagaactacagtttaagtcttcatggttctgtaagggcctgtgattcctgaaaaatgataccctagattcaaactatgcaacaataaagagcatttattctgcagagaaccagcatggaagggtctaccacacatcgg

SEQ ID NO: 32058 - DNA, 1140 bp, Mus musculus
tggtcccccatgttcatgctcagccggcctgtgtaacaaaatgtgaggatctgctggaatgactgtggctgcacagcggccggcagttctaccacagcactgcggctgctgttgaagaggtcccggaagtaagagctactcgcggccagcgcagcacggtgggctttgaaggcatggcccgtcaccaccactgacacgtcacagtatagtcccttgtagccgctgctcattgaggcactcaaggatgctgttgccgaagtttggaatctccatctgcaaggtctgcgccatggcagcagctgcgctgtggccgcgctccagggcctcccggcgggctccacaacagcagctggggcccagcctgggcccagggcgcgcctccctgtgcctgggcctcggcctcagcctccgcctctgcggcctccgcagcctccacctcagcagcagtggtagccgcggcggccattcattgtggctattgctgatttttgagttcccgacatatgtacaaatcctctctccgataaatagagtgcaaatattgcctctaattctgaatgctgttgtttcactctgtcgattaattttgctgtacagatacttcttaatttaatataatgctagttttttgttttgtctttgttattcgtgtctctgaggtcttaattttaaaaagtattttctatactattgtctgaggtgtttctgctgtgatttctattggattgtagtttcattgcttacatataagatttttttatttattgttttgttttttgagataaagtctcactatgtagccttggaaggccttgaactcacagagatccacctgtctctaaaattcaagtttttggatcaaaggcatataccaccacacctagtgtcatataagtttttgatttacttagagttgattcttgtagggtaagatatagttcctttcttctacatatgtatatacagttttcccagcaccatttatcaaatggctatccattattcaactttatttattgaaaaatcatttgactgtagacatttaggtttccttgtggaattgccatctgtcctattacttatgtgtctgtttttatgcgagtactctaatagggccttacaactttagtaggcctatgc

SEQ ID NO: 32059 - DNA, 2351 bp, Mus musculus
gaagagcagaacttgataggcatagaatacagcttccacacagccccctcagcgaaggtcctccagtacctgcccaggacccttccatggatgtcacactcccctcctgtcacatacatacccccaccaccttagtcacgagctactgtctgtccctctccagaacctgcaggggtgctgcatgttcccagcctctctgcctccctgtcatcccacaccttttccccaaagcaagctgggctgggtcaagagaagacaggcatcaggtggaatctgtgaccttcctcaacactcacggggagccctggttccccttccttttaggcatttcccagcaccaggcccggctaggggacgggcaggactcaagaagagcctgcccctcactgtggctgcttgggactccacgggcccaggggtcttctggacccctcccaccatcccccagtgcttccatgtctccaaatgcgccttcctgtccctctcgtctgttcctgcaccttgggcctggggtaggtggggccaagagggactgtctactttacaaactgaggaaacaagcccaaaaggcatagagaaactctagaactgaccctctgtgacagcctccatcacgtcccttttagtcccaccctgctctgcctctttgggccccctcagcccaagaggtcattccaagagagcagtgctcctatgggcagttgagggtctcaggacaggtttccagtctggcagaatttgtgggtgtgcgtgcgtgcgtgcgtgcgtgcgtgcgtgcgtgcgtgcgtgcgtgcgtgtgtgtgtgtgtgtgtgtgtgtgtgtgtgcgcgcgtgcgtgcgtgcatgcatagagtgtttgcttttaaaaacatgaagatcaagaggcagcaagaccagggtcggaaccagggagcaggctgggagactgctgcccttctctcatccgaccctgggcagggctcccagcccccaccccgtgtacataacttttgtttgtttgtttgtttttttggtttttttgttttgttttgttttactttttattctttttgtgtatataatttttttaaactttttttagagaatgaaatattgaagtattgaaagacccacaacgtgaggactcccccatgttctgactcaggagaggcaacaccccaaaatcacccacaagaaacgggtcttgttgcaaattgcaagaggatttttattcaagagcgctctcgggcccacggtcatacaccacgcaggggtagaggaccgtggtgcgccgagtagttagattagagggtatttaaaggaagaaaccacaacttaaggaggtgggaagggcgttgttggaaaataccaaaaataccagttaagagtcacaaggaagtgcaaagttacaagagtcacaaggaatacctagtaagtgttaactctcaagacagcttctaagagcccctaacaatagcacatttgcattgcaggttctgggtgactttctttgaatgagcactctttaaacccaggaagcgggtgggtggaggaatgtcactatctgttttatgattagcatacctttacaaaggccacattcccaagcctgggcctataggcctagaattctgttttaactttgttatactttcagtataagatttccttttatttttcaaatcaatgggaatgtgtctgaggttccctgagtccctgggctgtggaaggcaggatgcagggaagactgaatgtgtgtgtgtggactgtgggggcatgtttccacaggggcccagtcccagtgccccaggactcccgtggttccaaccagtttcctctcccccgggactacagttttagggtgttcacaggtcccagttagctgagcccactcctgggggatgaggcagggcagggtccgcatctattgttactggtttgcggagcatttctctggccgcactcctttccactctagctctccaggagcagtcttttgggtgtcttgaatttgacatgtgagcacagggtttctgttactcccctccattaatgtcctttcacatctcactggttctgctctagccctgacctccccccctctccccaactctgcattctggctgccttttcagaggcagggggttgcaggattggagaaggtgggatggagccttttgagtcagatctggagacctgtctccaggccagcagcaccctctaatctgccatgatccctcttaacatctgatggtgtgagggaggtctgacttggcccccagtaccttagtcctgggtggccaagtggaggggagtagacatccctagctaaagcacaagcaccttagtcataccccctccctccgccctcgc

SEQ ID NO: 32060 - DNA, 2299 bp, Mus musculus
ctcaggtgtctggtgtgcactgggatttataggccgtgtttacaggttccagccctgcctgtgcttcctgcactgagtatctttgtgaatatctacctgatgatgcaaatgacttctgggacctggtttcgctttggaatctggatggtgatcggtgagtagcttgctggggaagagattctttggtaactgagtccagcagtcttctaattgcttgtctttgaaaggttctgaggccatgtggagaattccccagtgggaacctgggcaaaagggtgatcaattgcacctcactgtctattcccttttaggatttgctatctactttggatatgggatacagcacagcttggaagagaagaatgaccaacagccaacagcctcaagctcccagactctccaggaactccaggaacatactcccagtgttgacttaccttaactggagaaacgggatgcttccaggaccccatgggcatcagtttccttcccttcccttccctttccctttcctccctctttcccttcccccttttcctttcctccctctttcccttccttttattctctctctctctctctctctctctctctctctctctctctctctctctctgtgtgtgtgtgtgtgtggggcgggttgggaaggcagtactgggaattgaacttagagtcttgtgcgtctgaggcaaatgctccatcactgacctaatctcttgtaggtatctttaggtcaaggaaaagtttgaatatttgtgggctgtagatgggacttcttttcttactttctttttttttcttcttctctttttgggacttatatcattgtaattttgtgagcaaattccttaaccttttttttttttttggtgtgtgtattgaaattggatccatgattttgcatatgctaggcaagtagtactctaccactgagccacatccctagtccctttagttatttaactgacagcaaaatttaggtatttacatattatagaatggttaaaaaaactgattaatatatgtttctttttatgtttgggcagttagtcttctatggctaaggtcagacttgaacttgatcttctgaacattattatttatggagagagagaaaacacatgtgtcacagtgtttgtggagttcaaaggacaactttataggttccttctccctttccacttttcatggattgaactcaggtatttaggcttttgtggcaacagctttacccactgaggcatcttgttggcccctgtatcccctcccccacccataaacagtatcataactgagaactatcatgaactcatgacccttctgtcaccagttctccaagtgttggtattataagtgtggactgtgcttgttgttgttttttgttctgtttttcaagacacagggtttcttgatgtagttctggctatccctgtaacttactacagtaagttagatcaagctggccttgaacacagagatctcccccatgagtgcttagattaaaggcatgtgccacctctggcctatcttcatgctcagttactgtggtgctaaacattatgccagggttttaagcacatttggacaaccaatttaccaactgagctacaccccccaaccctatgtttatgttttgtgatgaaaacattaaatttttttaaacattttacagatctatagtgcattgttcatctgtggcaacatgtatatgaacttggaggatgtatattatgttaagtgaaataaatgaggtttgaacaaatatgactttatttttctgtgtgtgtatgtgggtacatctgtgctatgtgtgcatgtggacaccagagaacagcttgtgggagtcagttctgtcttgccatgtgggcttcaggcttgaactcaggtcatcagacttagtagcaagtgccttgactagctgagccatcttgccatctttttttttttcccccaaaacacagtttcattatttaaactaggttggtctccagctcaggcaaccttcctgtattgacctcttgagtgctgattgtagtgcatgccaccacacccagctagatggcctaatgctcaattcctataagattcagagacatgctgggtatgatggctgatacctgaaacatatttctggtagaaggatcacaagtttgaggtcagctcagctttcatggtgatgcagggagggaatatcaaacaagcaaaaaaaaacaagtatgggctggagagatggctccgttattaaacttgctacagtacctgggtttgatgcccagcattctcgttgatgcccagcatt

SEQ ID NO: 32061 - DNA, 1203 bp, Mus musculus
tcccttcttgtgtatctgggttgatttaactcttagttccaccacttttgtcctggtattgcaggtatgtgccaccacagccatgttagggttcttactgccttctttccattccctttcccgcaggaatcctcgccctgggagcacgagagtctgccctggtcaccagggttttcacaggagtgaatcttttggtgctgtgtttcgtctccctctctggcctcattaatggcaagctacacaactggcagcttacagaggatgactacaaactggctctgttagaatccaacaacactgacaggtcaggagtcccaaacaacacagctagctcagggcaggaaggggtgcagagagtaggggtctggttactgggccccaaactgtgccacaactgtggaagttgtgtataattatgtaaaaattatttttaaatttgagacttgtttctctttttttttccttttctttcccctttttctttctgtctttgtttctttcttttttcttttagttttttggagacagggtttctttgtgtatgtagccttccttggctgtcctgtagactaggctgagatctgcctgcctcagcctcctaagtgctggcattaaaggcttgtgccctgccccacccccataagcatttttggttctttcaagacaaggtctccatatatagctttaaaagtcctggatcttgctgtgtagagcaggctggccttgaactcaaagatccaccagcctctgcctcccaactaccaggagtaaaggtgtgcaccactatgcctggcaggtttgtttgttttaaaaatttatttatttattttatatatgtgagtacaatgtagctgtcttcagacaccagaagtgggcatcagatctcattacagatggctgtgagccaccatgtggttgttgggattgaactcaggacctctggaagagcagccagtgctctttttttttttttttaaagattttatttatttatttattatatgtaagtacactgtcgctgtcttcagacactccagaagagggagtcagatttcgttatggatggttgtgagccaccatgtggttgctgggatttgaactctggaccttcggaagagctgtcgggtgctcttacccactgagccatctcaccagcccgcagccagtgctcttaactgctgagccatctctcgagcctcattt

SEQ ID NO: 32062 - DNA, 1178 bp, Mus musculus
acctccggaagagcagtgggcgctcttagccactgagccatctcaccagccccctggctcagtcttaatacctttaatccaagagttttctgcttgaacattttaaactggattagagtcagcccgttgacaggaagtgaacataggattttaaagaaaaaaccatagagtttacgagggagtcagaagggctgatagagagacataccggaagtagaagggagggacctgagtttgaaggaggtgttttggagatgggcttgagggaggggattcattctgggacgaggtctgagaaggaaagtgagctgggtgctttctctgcctctctgagctagcaggctttcaccccagcatctggctctagagagtcttcattggtaaaatacaacggttgagattttgttaaaaacaacgcccaagtgcttgaattaaaggcataaaccaccacaccctgtcaggtgattattcaagatttctcatcttgttttccagcagagtttggatccctccaccaggcactaaagatgttatggcagaacctccatcagtttggccagaagttggttcgccggcggcccctggcggcaaacgaacagtctgagtcttccttgtctcgatgtctgaccactttggacctggtgtccttgggtgtgggcagtaccctgggtgcaggcgtgtatgtcctggccggggaggtggccagagagaaagctggaccgtccatcatcatctgcttcttaattgctgccctgtcttcagtgatgtcaggactctgttatgcggagtttggggccagggtaccatgctcgggttccgcatatctctacagctatgtcacagtgggccagctgttggctttcatcactggctggaacttaatactcaactatgtcattggtgaggagatgggggcagggttttatataagtaggccaggttggtcttgaactctctatgttaactgagaatgacctgaattttgcctctacctcctaaaaatgggatcacgggactccttgtttcatttttatgaatacagggtctcatgtagctcaggctgtccttgaccttgctatatatataacagaagaaggcctcaaatccctgatatacatgcttctacttcaccacactcagcctgccaggaattctttttcttttttcctttcctttcc

SEQ ID NO: 32063 - DNA, 1297 bp, Mus musculus
aggtcatcacggccatcttcattctactttttaaaaactagagccccttttttaaaaggcaggctagccgcgaactcagccttcctcgctcgcccccacggtttggctgggtttactaatcccgaggcagaggcaggcccatctgaggttggtctggtctccaaagaagacatttagaactaatgtgtgtggaaaaagagttgggcttttttttctgacttggtctacataatttcaagggaggaacgagcctatgtggggaaagtgagtagtctgggcgcgagtgaagtttggggaccagaaaccaaagctaggagttactgagggcaggtctagggagtctatgcagtacatttcattaactacgtggtttcattgtagaaattttgagtttcactataccttgagttagaccgatgtactaactcttccttgatttcatccaggtttccttcaggttggagtgaattttaagttctccacgttctttcctcctggtaaatgttttaacgtctggaccgcctcatcttgcggtactcaaactatgggggcacttttttttttctttaaaaagtgccgcctagttttaagccccgccggttgagaaaacggctatctggcacatttaccagccctggtgccacgtgttccgggttaactgcagcgtggtgagtacggattcgaagaaaggaatgagactgagtatagcgaaaggctagggatgggcatcctgcccagtagacggtaactgaggtggtcgttgtagggtacctgggggctccatgtgcgtcctgtcgctgcttggagctgttacacctatgtagcggccatcaaagtggaggccctctcttgagcctgaatgagaaagtgcttccactttgtgtgccactgcatggggaaaacatcatagctttgcatctgacgcatcggtttacaggagcggacaacctgtgtgggggtttaggcttggagtttaatgggtcctatcctaaagagggcggttcagttgggtgccacgagacgcggatggatgtaaggcagtcgtgagtccaggtgcattgtagattgttcttaagcttgacctccagcctgtgatactcaaactgggggctcttttggattttcatcggaagaaaagtgccgccaggttttgagtgtcaccggttgagaactcaaaacggctaagaactaagaattaagttttagtgggtcatgttttcactggggttgcatttctgggcaggtgggtgtcacatgtgggtttgagtccgaacacttgggcgcatgcggtactaaa

SEQ ID NO: 32064 - DNA, 1297 bp, Mus musculus; identical to SEQ ID NO: 32063

SEQ ID NO: 32065 - DNA, 1297 bp, Mus musculus; identical to SEQ ID NO: 32063

SEQ ID NO: 32066 - DNA, 1297 bp, Mus musculus; identical to SEQ ID NO: 32063

SEQ ID NO: 32067 - DNA, 1358 bp, Mus musculus
tttcaatttttttcctttttctccaaacagggtttctctgtagccctggctgtcctggagctaactcacttgtagaccagcctggcctcagctccatccacctgggattaaaagatcctatatatcttgcttgactactgtagttgctatatcttgcttgactactgtagttggactgatggttgtgagtcttgatatggttggattgaatttttaggacctgctggctgtagctgactttaacctggctcctagcacaaacaagcttggtggacagccgggtagataatacccataataccttttggctttacaatagcccaggctcatgagggctgggattacaggtgttacattgtgtgccctaagcataatcttcatggattctctttgtttttcaggtgttccagttgagttgaatgtaatcctgcctagcctggggtacttacttgccttcaacctgcctggctggctggtctggctaagaactgactataaagtttcaggtttattaccacagcaggtccctgtggaaatgcttcaatctgtggtactcaaactgtgtgacattttgttctttgtaagaagtgccgcagagtttgtagtgttgccgattgagaaactgcagttggcctaagtgttgcatcatttgggtgtcatctgtgggtatgattcagtctgtaatggggcaaaagtaaaagctgaggtgcacggaacctcacgggaagtgacccagatttgacaggtactgtattacatatagctgcatttatccttttggcattgaataatccttaatcttcagttcagttgtaggcatgtttggatctagcgaaattccatatagccatactcaaaatggaggccctatctaagcttttaagtggaaagtgcttcccttttgtgtgttgccatgtggagaaagcatcggaacttcaatcaaccagagactccttgcttgctcatcttggtgagactcaaatgtggggcacacttctggactgtacatagaaagtgctactacttttgagtctctcctgtgggcaccattcacaggtcggctgctttcatgcatgtgtagtgtgtatctgaatccagatgaaggtttcctggaactgggacatgtgggtgctattgaatgaaccaaggtgctatgggagcaaccagtgccctcagcctccaaacatgaataataaagtcttgttctcttgattttgctgctttctcagtttttgttttaaaacacccgccatggttcctagggataaaaaaagcttgcaagcatgcaagcacccttttaatcactggggttgagactaaaggtaatcctgggctatacagaaaaaccctgtctgaaa

SEQ ID NO: 32068 - DNA, 1358 bp, Mus musculus; identical to SEQ ID NO: 32067

SEQ ID NO: 32069 - DNA, 1358 bp, Mus musculus; identical to SEQ ID NO: 32067

SEQ ID NO: 32070 - DNA, 1358 bp, Mus musculus; identical to SEQ ID NO: 32067

SEQ ID NO: 32071 - DNA, 1885 bp, Mus musculus
cacagtttgcctcgttcattttttttctatctctatagtctttcctgtgggttttatcacctgcttattttcttgggagccctaagaaatcttgctttctttccctcacccctcaaaggtgctggccccacacatcccacactcctttacagttacccacactcttttgcagttctttactccaagggtctctttaggggcctcattgccaaagcatgcctgcctgcctgcctgccttagctgtgccttagtctgtgtgtgtgtgtgtgtgtgtgtgtgtgtgtgtgtgtgtgtgtgtgtgtgttaaggggattgggaagcaggccatataatgtacctctcctttaaattcaaaacaaagcaaacaaaatcctggaggtcagcaattcccggtggccagaagtcagcattatgcagtctctgcctctacttgtcactcaacgttgcaccaaattggctctagattttttttaccaggcttactgaaagcccaccacctagaggatagataccctagatgaagcaatggatgggcaccttttcctaaacgattctctgtgctatttaaacaaacccaacaaaaatatccacatggtatctctctctgtgtctctgtccctccccccacccccagggtttctctgtgtagccttggctgtcctgaatttgctctgtagacgaggctgccctctaactcaagatatctgcctgcttatgcctccctggtgctgggcttaagggtgtgtgccatcactgccaggccacccatatggtcttaagacaactctgaagtatttctgagcgtcagtaatggctgctcgcttatctcagtgttaaaaataacaaggtctgctttagcaggaatgagaagagaaggagcctttgccggccttaaaggcattaagatcattaagctcatcttttccttttctgaacacaaacaaagcaatcaactaaaaagccctttttttttttttaatagctttagagattttcttaatgtggcccattctggtctcaaacataattgtgtaggtgaggcttccattgaacccttgtctttctggctccaccttctgggtgctgagagtacagatataccaccataccctcgttgtgtagccccgttaaagagagaaggtccttagacatcttttcttgggctacagggtaggtttgggagtaacaggattggaatggcttgtgtgtgctgtacatgaacccgggtcctctcatgtgctgcttgcttcttgctgctgctttctgcttctttgacattactaggtatatatggataaataaatgtataaatatatatatatatattttaattttctggagctttgggttcctgtagctcctgctgtcagtcaccctttcccacccctcacatccataatgttctttttttaaaaaacaaaaacaaaaaaaaccctcaatataatgataacaggaagactcatgctttctttctctccgggtgggtggggaggaatgaaggactccaagagagaggtgagactcagattcttcagtttgatgacagaaggggcgtaggactaagacaaccttggcctcatcagaaaacagtggcagagcctgggtctccccccccccaaagttatgtatttattttaattttatgtacattgttgatttgccagcatgcatgtctgtgagggtattgggtcccctggaacgggagttacagacagttgtgagctgccatgtgggtacagggaattgaacccaggtcctgtagaggagaaccactgaactatctctccagcctccccgaatccccacccctttaagctggtctcatgtagacaaggctggcctcaaactcaatatgtagccaagtcctacctcctccagtgctggg

SEQ ID NO: 32072 - DNA, 1140 bp, Mus musculus
tcccatgctgtgagccccaaattaaatactttcttttatgagttgccttggtcatggtgtcttatacaatattagaaatcctagccaagatgagcagtattagttagccttgactgtcaatttgactcagcttacagtcatcagaaataagaggcctcaattgaggaattttctaggtcagattggtttgtggccatgtctgtgaggggttgtcctaattattaatcaatgtagaaaggctcatctcactttggatgacactactactcatgcaggtggtctggaactgcataaaaaaacccagctaagcagaaggcagagtgagcaagaaagcaagccataatttagagtttctttttttcttttaaagacttattttatgtgtatgagtattttatttgtatatgtatgtatatgtgtgtaccacattcatgctaggtacccagggaggcgagaagaggatgctgaagctcctacaactgcatttatggatggttgtgagttacatgtgggtgctgggaattgaacccaggtcctctagaacagcagccaatgctctgaaccactaggctatctctccagcccttctccatggtttctacctttagttcgtgccctgactcccttgatggtggattgtaacttatgtgatgagataaaccctttcctcctccaggctgcttttggtcagaatgtttttatcatggcaacaaaaaacaaagcagaatagacagaatgtatatacagaacataggttaaaaaaaaacacaccccactcatttcaactctcatcaaaccctacattttaagttcaaggattaaaactgcaaagaatggacagctgcccactggccaatgtccaagtggatggaagaaagtcagatctggttggtccttttggtgaggaaagatgctccttacaaagagcgtgggttatcttctctcagaatgttataccaagagcagtctcatccggctgggaatatctgctgtttgtgttgtttattgcagttttcctggctgaagcctggtgcagttagagggggtcacttaacagacccaggtacaacaacagactttccctatgccactgactgttgggttgttagggggagtttctgaccaccagattaacggagc

SEQ ID NO: 32073 - DNA, 1200 bp, Mus musculus
ccctaacaatagcacatttacatagctgtttccatgaaaggtcagggtgggtcagggtgactttctttgaaggaacattccctgaatccaggaagcaggtgagtggaggaatgtcgctttctgttttatgattagcatgccttggagcattgagtcacaaaggtcacattctcaagcctgggcctaaaggcctagaattttttgtttgtttgtttttatgttacactttttcattacataataatgtatattatatatgcgtgttgtatatatgtcatatatgtataataatatatttttctataaatactgtatgtataattatattggattttcaagatacggtttcttggtgaagccctgcctgtcctggaacttgctctttaggcacctcaaactcagagttccgcctactgctgcctcctaagtgctgagtctaaagctgtgaaccatcacccatcaccacaaggctgtataaatatattcatatataaatctgtgtgtgtgtgtgtgtgtgtgtgtgtatgtatgtatctgggttccaaggatataactgtgattgccagatttatgtagcatgcgcgcatgcacacacacaccacaacacacctgtgaaggtcagaggacaactttcaggaataggttctctccttccaccacatatgatccaagtcagatcatcagactggcagcaggtgcctttgctaggtgagccgtctctctagccctgctgtaagttagcagatggaagaattcttctgtagaatctttagaatcttctaagtaatacgaaagatcttgtccttgagagtctagaaaagaacacccagcctagacatcttaatttcagagtctaggagccgtgtgatgcccctcttctggccaccacgggcactgcatgcctgaaatgcaagcatagactgacttgcaagatagatggtaagagagtggacttacaaaaaaaaaaaaaaaacgaaaaaagagagagagagagagaggacttacagcatcatacaccatgaggcgtctattatttttttacatcccttcatttaaatggttcccagggagcaggacgatatgtcatatacaactctaagatctactttcttccagggtcctttgacaaactcaccttgaatatctggcccagctctgtggttcccaccagaggcaatgtgactctgctatgtatagcta

SEQ ID NO: 32074 - DNA, 1160 bp, Mus musculus
gacatctgtgtaggagagtccttaatgcattgaaatgttctttgtccacgcttttttttttcctttccttttcttttcttttcttttttcttttcttttgagatagggtttctctgtgtagccctggctgtcctgtaactcacttagtagaccaggctggccttgaactcagaaatccacctgcctctgcctcccaagtgctgggattgaaggggtgcaccaccaccgcccagtttgtccacacttttaagttaccctaacatgctctctccagatttctgttcatctcccagttcctttctctctgttggagagatctccctcacttccctgtgtctttgcgtctgttgaatctctggccctcactttcctttttccctggaatacagacacaaaccagctgttttctccaggactctggagagctgctgctctcagtggcgcatccttctgttttgcagtgcctgtgagagatgacgggaacatgcctgatgtgcccagccaccctcaggatcctctgggtccaagcttggactggctgaagaacctgtgaatgcctctgctgatggaagaggccccttccctgttgctctccaataaaaatgtgaaaactaataaccccacaatcttttctttcgtgggtttcttttgttgttgtgagacaaggaagtctcatatgtagtgtaggcagacctggaattcagtgtgtagtcagggtagcctccaaccctggaacctggatatgatcagaggtgggagcaataaacggtgacctagacaagtgtacatagggaatctgtttattggggagagggttagtcaaagggtgggctggccagggtagggtagggtagcaatttgtctggctctcgggaaacccaacttgaatccaaggcctcatctgcttcaaagccaaagtcttcctcaaccttaatctgaaaagatacggaacaagatgcgagggatatggagacccaggagacatactacccccaagcacactcaccaatcagcctatgggcactggtttcccaggttagacacttcccacaatcaatcactgacgaccatccctcagctgactttctcttcaagcactagcctggttttccaactcctctatcctacctgatagcaacccagtgttgccagtctgccca

SEQ ID NO: 32075 - DNA, 1171 bp, Mus musculus
gggcccgttcagcttccgtggagccgtcggcagccgctgccgggcctttccttgatccctgaatcccctactcggtcgtctagaacaatcccgggcccacttcctctatcaacaacccaaccctacttccggctttcgcgccctcttatcgcgatagcgcccgggctcggggcgcgaggaaagaggaaaaaaaaaaaaaaaaaaggcggcgggcgggcgctcgcctctctctcccccctcctcgcctgtcgcgatacgctccgcagcggcggcgccagctcctgcggtgagcgtcaggttcgactgggccggacccctttccctcttccctcagctccatcggccgacttcttgctccgcgaccctgctgcctgtcgcgacacggcctcagctcccgccgggcccaagccgcgcgctcgggcccagcttcggctcgggcgggcggggaccctctcctctctctgtcctcccgcgtccggactcccgcgtggcagagcgccggccccgggtgcgaggtgcccgtcctcctccgcgtctggctgggcttggagcggtgggcgcgctgcgggccgcggaggggtctttctgctctgggcgcggggcccactcctgcagtcatgccttccccgggagctccattcgggagcgttgcctcagtgcacccgaaagctccagcttgttggtgtcttgatagggggaagcctctttggaagagatggatcttgtggaggaaaaagtccccaagacccgagggtgcagttaacgttgtgagttggagcctaagccaaagtttccacctagtccttacagctctagcagtgaagtctcctagaggtccctttccaccaatcttctttttaaggaagcatggggtttgtgagtgtgtgtgtgtgtgtgtgtgtgtgtgtgtgtgtgttttgttttaacactccctccccaaaccttggattcaggactgtaccgtattgctcacttcctggcttcacatcttttgcatctttgaggtggggtatcagtggactctagctttggggatgcaggctccactacgatgcacggtctgcctcggtgggtgaagcttcctaagtggttaggtattgctgtgtgtggtgaggaccgcttagcttttctttctagatctgggtcggtggaatgcgagctcccatgcttt

SEQ ID NO: 32076 - DNA, 1114 bp, Mus musculus
cctgataaacggacagccagtttccttcccatggactctacctttatcactatcattaccgttgcgctgagataggatgtctatttccggcagaggtcagaatggtgggaggcctgggtaagacttgctgacaggtaagccaggcagaggccaagttgtagggtagcgcaggtattacaggtttctagggatctttagagccaaaagggtttgaggagagagaaatggatccttgagatgtcagaaacctcagatttgtcctcactgggacagaggatgggcaaacttctcactggcccatgttaggagggctggagcagaggcacccttggggtgccctagtgatgggggactgaggacaggttctgtgggggcaggagggctggccaggtgctctgcagcccctgagcctggccctgggctcgccagcagaagcaggaccggattgagggcttgaagcggcatatcgagaagcaccgctaccatgttcgtatgctggagaccatcctgcgaatgctggacaatgactccatcctggttgatgccatccgcaagatcaaggatgatgtggagtactacgttgactcatcccaggaccccgactttgaagagaacgaattcctctatgacgacctggacctcgaggacattcgtgaggccctgggctgaccttcatggcacagagggtgagggcaggaggcatggctgtaccagctaagcatgctgctcccctacccccacagcacaggcgctggtcgccacctccccccccagccacagccacatggaggacgagatcttcaaccagtctagcagtacacccacctcaacaacctccagctctcccatcccacccagcccagcaaactgcactacggtaagtgtccaaggttattaataagagggtggtcatggaggagtcaaaagcctagtcttgccttagagagggcagctcaggaagtgagctctaggctttttgtgctctgaggaacggatataaaaaacctgggtttccactcagttttagggtgcacatgggtctttggtggtggtagtcaggaggagttggggtgtggaaagctgaggagctgagcagctgggtgtctcccttctg

SEQ ID NO: 32077 - DNA, 1149 bp, Mus musculus
tcagacatttgacctagctgctttcttggtgtatgcgctccaaccttgacatcagtcttcctatcctgccctgctttggtccttgacacgaatatcttaaggcattgagtccctcagaatctcagttacagtgaagtgtgtatctccagagtgctagatggtacatatgttgcattgtaggccacctgttggtccctactcctcagtgtcacttaataaccttaggccttacgtttgtacctgcagcccatgtggggcaaaggccaggcttggcccccttcttcactcttaagatcaccaagggaagggtggagtctgacagtgcaagcttgtaggacaattggcttggtacttccatgcccctgacaactacctcttgtccatctgcctggcccagatctcagtctccctcttcatccactcactgaccaccttcttccccggccagggcacctacatctactttgactacgagaagtggggccagcggaagaaggaaggcttcacctttgagtaccgctacctggaggaccgggacctccagtgacaccggcccccctctaccctctccctccctcgcatgctgatccccctgcccaggtgagggccctgccctggaagactgggggaggcccaaggccatgggacaccctcccccccaggaagcagggaagggatagggaggttttctcttcctctctgccctaccctgggggcctgggggcaagggctgccccctcctcccctccccagtgagggacattttttggtaaacctattttcattttggaaaatatttatgaataaatagttttatatgacggctggcagctgaggcctctcctatccccacaagagagttcagtgggcaggagttgggttctgctggcggggtcgccgggccagctggggattgaactgggagttgtatcgtcgcctccgttcatctgtctcttctgcttccacctggccttgctgggatacctggccttgtacccgggccagcagggcctctgctcgagctctctcggctgcttcccgctgaagacgctcagcacggagcttttctagggaaggtggcctgcagggaggaaagcaagaacagaaagtgagagatgccacctacctggtccttggactcactgcaag

SEQ ID NO: 32078 - DNA, 1646 bp, Mus musculus
ggctggcctcgaactcagaaatccgcctgcctctgcctcccgagtgctgggatcaaaggcgtgcgccaccacgcccagctcaacaatatgattattaagaagctgtctgagcatgctagggatgcagcttagtgctgcattattgcccggtttgtgcagggtcctgagttcagttcccagtgacaatcatagcctctttggctttcaggatgcaggaaggaagagtgggcctgaactcctaaatctgagggaggagggctgagccctgtactcctgggcttgaggaagggaggcatgagacagtgaggactgaagcttgaacttgtgtgtcctgactcaatatcttcctccaggagtgcctggaccatgctgttgagtgcctactggcatggcctccaccctggttactacctaagcttcatgaccatcccgctgtgcctggctgctgagggctatttggagtcagccttgcggagacacctgagccccgggggccagaaagcctgggactgggtccactggttcctgaagatgcgtgcctacgactacatgtgcatgggctttgtgctcctttccatggctgacacactccggtactgggcctccatctacttctgggtccactttctagccctggcttgcttggggctggggctggttttgggtgggggcagccccagcaagaggaagacaccatcccaggccaccagcagccaagcgaaggaaaagctccgggaagagtgagctctgctgcattggcctgccttccagttcaagcttttttgggaattccatgaaccaggctgtttgtttggggtttttgtttgtttgtttgtttgtttcctttacccagcaagaatcccttgtttggctaagagcctggagaggatcccctcttcccaaataattcctctgccttctatttaaagctaaggtatccttctcttgggctctctcagcatcttgaccttttcagaccttcctctgctaacatcagggtattactatccactcttgaacctattatctctgcaacaatcttcagatgttcaaaaagccacacttcccaaaaatgcccttgcagggaccagtggtcatctggcatcttagacagactcccagtgggtccccagtatgggggcaggaacttcagggccaggttctgggagaggggagggatagccttcttgttttcctctttgtttttatcatcacaccagtgtttcagagaccatggtcttacacatgctgaaggagaagctaaaatgtgagaagccccaggggagcttgctcttacagcagcttctgcctgagccatttctgggctccccatacaacctaccacccagtgtcatccttggcctgtgacaggccagaatgtataaagctttcccaataaagtgttacacatgcatttgtttgtgagtataactgtgggcaacaaaccaaagacactgacccagaatgccagtgtgcatttgtgtgtgtattgggggggtggggtgggggggtctggctgccatgaagtttggccgctcaggaggctgtaaggacttcaattcccaggagacctttataggaaatgtaccgcagtcacccgggtcacctagtggccaggtgcagacctgtagcaggcccctccctcc

SEQ ID NO: 32079 - DNA, 3333 bp, Mus musculus
gatggtgtaaggtaacggagccattcgaatcttcatgaacatgctgagtaagagggtggggcgaaggtggctggaagttacaacacggttgtggaacaatcccattttcaagttttctaaggcggatttctctgagagccgagttggtgtcgccgtgtccctagcggggttttgctgcacatgcgccacaagattattttttaaaacgacactttactgcgcaggcgcagccggcctagcgaggtcaacatgccggtcgccagaagctgggtttgtcgcaaaacctatgtgaccccacggagacccttcgagaagtcgcgtctcgaccaggagctaaagttgattggtgagtggccaaagtagaatttcgaattgcggatccgggaagagttaggtagccatgatgtctgtctcccacgtgctcgttctggagcatcctgtgtggcgccagaggattgcagtttagttttgtgttctctagtcgccatgcacatgtagtaacccatggctcttgccccgcggtctcctcccaaccacgtgcaggagagtatggactccggaacaaacgtgaggtttggagggtcaagtttaccctggccaagatccgtaaggcggcccgggagctgttgacgctagacgagaaggatccccggcgtctgtttgaaggtgtgtatgagcctattttcgaaggagtggtggttgctgagtgttttagggcgtgggagatgtgactgaacaagttgggctagtggggattgagacagggtcttggtgtagattggcctggaactcaaatgtaagtcagtcttgccataaactgccagaaattcagaagtgctgggtatgtgtcacaaggattcttattggttattttatttacatttcaaatgttatttctcttcccagtttcctctctgcgacacccccccacccgccccccaatcacaccacaaggattctttttgagtttctagaatctagttctgtctgcattggacaaatggaggccaaagacaatgggagttgcactaatgctttttctgtcttaatactggatgttttatttagtttcatgtggtgtaagaggagtaatgattatttttccatccgggggacgtatttttgcatttgcatctgggtagcgtttatacaatgttaatccaggttgagcctatattttaacatatttatattccatacttagggtttcttataggtgactgggcctacatacacagttcatttaactcctgggagagtagtctgaggaataaatgtgtgctgtttgtgtatatattgttggcctgatggtactgtgtagctcagattgcctttgaactgttagccctagcttttcatgttgtgaaaatgaaaattgtttttaaagttgagcattagagctcttaatcttaggcttaaaggctggatgaaaaactgtaagcctgcgtgatgcctgttggtgaaagggtggcacagtggccatgtcagggtctcaagcctagggctctgggaagaaaagttatcaggcaccagagctccctacaaaaatgagtgaaagctgtagtcctctactcagagactggggaagtctgaggtcgggcctcattggctgctgctccccctgtcacaggcaatgctctcctgcggcggcttgttcgcattggggtgctggacgagggcaagatgaagctggattacatcctgggcctgaagattgaggatttcttggagaggcggctgcagacccaggtctttaagctgggcctggccaaatctattcaccatgcccgtgtgctcatccgccaacgtcacattaggtgagttgcagctgggcctgtaaatctttatttccctacttgtgccgttggtttcgttagctaagttgccattctatctcctgtgcagcctttggagctgacagatgtgagcttacccttgagggttcagaatcgtgccctgcaaacagcttatgggggactggggacagccttgtttccccatagcccagcgcaagggtcactgcggctcaagccgtacaccttgtgaaggtgtctgccaggcactcaagcagctggacaggtaacagctcttggtgccaccccccctggagggagattggagtcaatgttgaggtgacaaagctgtctgtggaggtacaatctaggccttcattgctatatttctacttgttaatttgccagttgagaatgcacctgtctgaagtgactggggtaaatgaaattgcatgctcgttaacccttctgtaaatgagcaccaatcatgacagctatacagagtgaagtctcagatttctttctcaccagctttcgtttatgggcagagatgtactcttgtctgaggtggtttgagaccacatggcattacaatgtggacaggaagcaaatcaaagcattagtatgggcactcttgttttccttccaagttactgagtctgaggtcaggagtgcctgtgagcctgcttgagtcaaagggcaggaccaaatggttcagcctcactttgtccccttattctgttcttcctgtccagggtccgcaagcaggtggtgaacatcccatccttcattgttcgcctggactctcagaagcacatcgacttctccctccgttctccttatggcggcggccgtccaggccgagtgaagaggaagaatgccaagaaaggccagggcggggctggagctggtgatgatgaggaagaggattaattaatacttggctgaactggaggattgtctagttttccagctgaaaaataaaaaagaattgatacttggtttattggtgtgcctctgtagtgagtgcaactgctccactacacataggctgtgctactgtccaactaacctattttggtaaatgttcccaagaagggagacatgttatctgcactgtgatacagtggaaagcaagccatttggagccagtctctagtgagattgctttgaatacttctagggtggctcttgtaagtcatctgcctcaagatgtggttttgctgagcaggagataagctagtgagatgtttgcctagggctgcttgagaacttccctatctaaagctttgtgttgtcctgggcaggagcgaagctggcttcctcattctctatttcccttgccgagaagcttgagtcagacaggaagatttgcagatacgcggtttgaactgagaaatgagagcaagagcaactgaaggacagctgcttgctacttctacatttcagtccttgagaaatcaagtcagctttttaagatttatcataaattagtacactgtagttgaccagaagagggtgtcagatctccttaagggtg

SEQ ID NO: 32080 - DNA, 1159 bp, Mus musculus
ccaggcaggaaaagatgaggcactcaataagttatcaagtaaaaacaaacatggcagagtcaaaagggaaatttattgtctggggaacaatatgtatgtagttctcatttgtttaaaaaacaaatagcatacatggcaaagaaaaacgtggttaatacataaacataattcaaaaagcttctattatctaacaaaaaagacctcaatttaataataagtaactgagaaaaacaaaaaccccaaaacaaatggataaaattgtcttttttgtctttgttgttgttgttttggagacagggtttctctgtgaaacagccctgggctgtcctggaactctctttgtagaccaggctggccttgaactcacagagaagagcctgcctcagcctctgcctccctagtgaggagattaacggcgtgtgacggcgtgtatcaccacacccaactaaagtgttcaaattctaatgattagcaaacacaatgtgctactttcccctttcgagtacctatttgttgtgggatttagagtggagtgtgggctggtgctggtctggaggcccagggaacaggttctctaaatatgctgcccagagactgtgaatcaccagctatgtgaaaataataataaacaaaacaaataaacaaacataaatatgcttacatgtgagaggataaaaactgcatctcttatcctggtaatcctttgagggaccagcttccagaaagaaataaacaagcaacccctggctcagttaaacgctggagacaaaactaatctgccacagtgggactcttcccaaagaccagcagctctgtaggggagatggcagagcagggtcctcaagtgactacagaagcaccaggggtatccctggttcttgcacaatgctggtttggattcctatgggtcctagtcctggcacctcagtgttaatgtaagcaagttatttgactcactgaacctctttttttggtttttcaagacagggtttctctgtgtagccctggctgtcctggaactcactctgtagacaaggctggcctcgaactcagaaacccacctgcctcttcctcccaagtgctgggattaaaggcgtgggccaccactgcccagtttttttttttttttttttgttgttgttgttgttgttttggtttg

SEQ ID NO: 32081 - DNA, 1179 bp, Mus musculus
cctccagcacggattcacgctcccgctcctcatccaggtctcccacgagacactttcggagaaggtgtgcaggcttgggctggaagggcgctgggggggaactgcgtggagcctgacccttgtgcttcaggcctgacttctctttcctgtgcagtgactcccattcagactctgacagctcctactcagggaatgagtgccaccctgtaggccgcaggaacccaccccccaagggtcggggtggtcgaggggcccacatggatcgaggtcggggcagggcgcagcgtggaaagaggtgaggtgcttagggtgtgatttcttcctaggcatgggtgggtggtattgggtctcacaggtgggggagatggccttcagagtggctaaagacattgactttcttttttaccctttctccccagacatgacctagctcccaccaaacgtagccgcaagaagatggcagcactggagtgcgaggacccagagcgtgagcttaagaagcaaaagagggcagcccgcttccaacatgggcactcacgtcgcctgcgccttgaacctttggtgctacagatgagtaacctggagagcagtggagctgaccctgactggcaggagctgcagattgtgggcacctgtcctgacattacaaagcactatctgcggctcacctgcgccccagacccgtcaactgtgcgacctgtggctgtaagtcccaggcattgtgtgtctgcccccagaatgtgttgggcataacataagatcgggcacatggaacatgttgggtgaaggaagtggtagctctggctgagaaaaatcctagcatgcaggcccttcacatctggggcatagcctggtcacaatctcccttatgaccagcaaagttaagggagacttatgtgtggggccctagagccagggagacttggagcactcacacctgctgtgtgttggtttgattttgtttgttcatagtggtgagtcactgatactggctttggtgctgctctggttgagtggggcacagtggctttggcctgtcagctgtctggccactcagctttgattctcttccctgaaggttttgaagaagtctctgtgcatggtcaagtcccactggaaggagaagcaggactatgcctttgcctgtgagcagatgaagtccattcggcaggacctgac

SEQ ID NO: 32082 - DNA, 1468 bp, Mus musculus
agcattgctccttgttcttgggccctcccttgtctgtttgcctcatcattttctcctcttgtctccatagcttccgccctgcgctgcccgtctcctacctgcaggccgagttggccttcgagggcgaggccgcctgccgggccttcctagagcccttgggcctgtcctacacgggcccggacaactccagcgtggactgccgcctcagcctggcgcagctgccagccttctaagcacccatcgagcacgggcgggagcagggctgtggcccagcgccgccttttcacattttttgagccatggacatgggttgtaaaaatttgtggggagtaggctccaggaagagccagcatccctgcccccgtttcccaccggggacctgtacagagatttttttctacatttttattttttgtctcagaggggataattgggagtgtatagtggagcagggtggggcggggctacaggttctgtgtgcacctgtcacctccactaacgctgtctcagtgttttctctctctctctcgagctcgtagtccagcgcctgactctgcgtcggcccatcccacgctggggccagcagaaagaagacaggctgtccaggccgcacccgctgcagtggggcaccagccggccacacccattgcctcggctgcctcttcatagactcttgctgcccagccgttggggcctcagtgtttggggtgagggaagccacttaaagactatgccccaccttcagctcctcaccccagaaactccagccagcaccaccgacacaaccagaccagcgccacaccgcactgaggactccaaggccttcgcgggaccatgccggccgggctgcctcgtcttactcaagttgtattaagttgtctccgtgtcccttcctccctctgccccaatgtttcttctgattttttttttttctttccctcctgcctcttcccttcccactccctggttcaacacaggtaaaatggttaccctcccttctttcctcccctctgccttcatggatcaccaactcacgtcatgtttccttctcttttctctgtgtgtgtgtttatttaagttacttttcttccttctccccttttctttttacccctcccccttctgccatgtaactggaggatgtgctatgaggttgcaaacagctggactgtcaggctgctttttcccagatgcctccctgcctccctccctccctctcccctcccttccttcattctccttgagcattgagtacagtacattttggaagcttgaaaccaaaattaaagagagagagcgagaacctgtttctgcttggcctgttttatccgaaatatgaaacctcggtcatttcagggaaatttctaccaagggaagatagctatgccctgctctacccatgcggcaaagccagagtttacttaggggctgccttcctagctcctggttcagggtgtactcaggctta

SEQ ID NO: 32083 - DNA, 1179 bp, Mus musculus
attttgagacctgaggaaagtgagggtctgttagttcgacaacttgctcttgaaaacgccaattcagcatgtagggctgccctgagaggtaaaaccaagagtttagatataaatggtatgatcaagctttgtaatgaggtagatgtgttttctcaacaagtttctaagtctattaacctggccattgggactgctctaactccagctccaagattggtgccgagccccattggcccaagttagaagtagacatctgtgtcctcacattgggtgcagatgcctcctggggcacccctgattattatatgcctcaattaacagcagttaacacaggtgaatttgggccccctcctcaaaagacgttttttctcatcatcggccgagtgtccagacttttacaaggcctaatggtgactcctatagtggttaacaccgactaccatggggagataaaaatcttagtctccgccatgcagggaccacttacccttagggctggagagcgcatagcccaaaccttaccactcccactattcggccattgcccttatttgaaagaggagcaaggaccatcctctctgggatcctcggaagtctactgggcacagaaaataaccgattcacggcccatgctgactttgtttctagaggacaaacagtttcaagggctcctggataccagggcagatgcgacagtaatttcctcaacacattggcctgcagcctggcccttacagcccacgaagggatggtgtaatccactgatcataaaatttactgctaagaggagaaacttagaggcttgagaaagttctcgccctctcacctggggcctaagattgtatcaagataactatgacaatggcctgacctttaaggttccgcttctaacaatcataaagcatccataggacttccaggtacccgcccccctgttcctgccccagggtgtgctacgaccctgtttcagcccactctccctgcggggaggcccccctcttccactgatttactgtggtctatattaaatgcttctgctttagccttgttgtataagacacaaagagataatgcgtcagaatctgaagattgttggatgtgcttttctgcttccccgcccttttatgagggcatagccttatttgaaaattttaccctgctttcagatgctaggcagct

SEQ ID NO: 32084 - DNA, 1127 bp, Mus musculus
ttttttttttttttacagagagggtctcactttgtaaccctggccttcctggaacttgctatgtagactaggctggccttgaactcacagagatctgccatgcctggaattaaaggcatgtattactatgcctgtcccaggtacctgtgcaggcctacctgtccaaggatggcaccatccacagtgggcgtctacctcctacatcagctagcaatcaagaaaatgctccacagacaatccctcaggacagtctggtctaagcagctcttcacatgagggtctctctctgtcttttacgaatgtcaggttgacaaccaaatgaaccagacagctcttgattgcaaactgcaaagggtcactgctcccttaaggatggtgtgggtctgaagctctcgccagactcagaaagggcagccgtggacaccttgtgtgctggacagtggctgtgatccagtggaaaccctggcagaccctgtcttggttagccccgaagtgctcaggacagagtgggatgaaaagctgctagctgctgccacagaaaaccagcgtgacctaggatcaggatctctccaattcctgtgtaattttaactgtagactcttaagcttgttgtttgattacagtaacatgttaggggtagtggcacatatcggtaactccagcacttaagagggagaggcaggaggatcaagagttcaaggccatcctctgccagcttgggctatacaagatcctgttaaagcaaagcaaaacagtgaaatctctaaacagctgattcatagatttaaaataaaaatgtttatttagagtgtgagtgtatatgtacatgtatgtgcacatgcccttgtatgtgcattcatgatggaggtcagaggacaacctgtgggaatctggtccctccttgtgagttcctgaggatccaactcagttaggcttggtagcgagggccttcacctctgacccatagtggcagctctgagtcataggttttagtttatccttctatatggactatgtggttcaggctaaacttgaactcccagtctccttgtcttgagcctctggggtccagagattacaggtcggccacaccctgtgtttacaatcaatgttaacattcaaataaa

SEQ ID NO: 32085 - DNA, 1207 bp, Mus musculus
ttcctataggaggccgcttttggattcatctctccttttggaggaatttgtggggtgttgcctgggacgggccatttaggtagagagaactgcagacacaaaggcctggaggtaggttccctgggacttcagggcagcttccagcctccaaggctgggttttgggttccctgagggtggagcaggggatttttatttttgactgttctgtggttgattgtagggcccttcttctggctgctgttcaagagtccccagctggcggcccagcccagcacatatctggccgtggcagaagaactggagaatgtttcggggaagtactttgatggactcagagagaaggctccatctcctgaggctgaagatgaggaagtagcccgcagactttggacggaaagtgcccgtttggtgggcttggccatggctcatggatcccctgggagaggacatgccattcccagataaccttcagagacccagatggagctgtgttaccaagactgctgctggccatgctctcatcatcctctaggggcagtattggtactattagaatctcaagactgtggatgttggctgccatgtcctcatcatcctttagggacagtgttgcactgttagaactcaagtctgtggatgctggctgctatgccctcatcatcctctaggtggcaatgttagttctagcatttatcgttagctggctacattgagttggaccacaggtaggcactggctcaggggatggcaggtccatgtactctgttggttactggggagatggtccatcaggtgcctcctttaggaatctaaaaggggaggctgataggggagacagtcactctggttatgggcagtgtccaaagacagtggacaccaaagctgctgtggtggactgattggtctactgttaaagagcaggcatagctatagatttttgtgggcccttatatactcctgcctcctctctgacttggctgttgttctagtttgctttctgttgctgtgataaacaccatgaccaaaatcaacctggggagaaaaagggcttatttaactcacaggttatagtttatcatggaagaggcaagccagggcaggaactcaggacagtaacttgaagcagataccaatggaggtgtgctcacaggcatatgtcaggtaccttgcttttatttttattattattattattatcttttttt

SEQ ID NO: 32086 - DNA, 1392 bp, Mus musculus
agtggagtaaggaagtagctcctgaccctaggtctcttctgctctcaccagcggcaggaacgctttgctgagaggcccgccctccttgaactggagagatttgtgagttgggctactggggtgggcccactgtgtcccagacttaccctgccccttgtccttacccgctctgaacctgccccatgccttgcaggagcgcagggctctggagcgcaaggcagcagagctggaagaggagctgaaggtaactggggcttgtgatggctgtagccagagcccagcctacccagcgccacccagctgactccaccctgtatcctaggccctctctgatctccgggctgacaaccagcggctcaaggatgagaatgcagcattgatccgagtcatcagcaaactatccaagtgactctggaggagttcccgcaccatatttatactgctgcttctgacacacgcaccctttccccccgcgtgaacatgagtgacagggctctgggggaaattgctgagaagccataacctctcgggacctcagaaccgggaggaaagcacagagtccccaggaaccaagggggactctctgagatcaggatagagatgggaggctgagccaagtagggagacgttgctgagagtggacaggcaccagagatgggaccaagaaggaagcaaggaccaagagacacaaagatcagtatccagaagcagagtggttgccccaggatcccacctcacgtgtgatgctacccagcactcctcctcctccccagcagggatgcaggaatgtgccaagagtcccactggcctctgccaggtgggcctgtagataggtccatgtgcaatagggagggatgtcttctatttttgctgcctcctccctacccattgtctggggagggggagaaggtatttttgagacaaagcacaggcaccataaataaagtgacattgccactcagtgactttgtctcctgattgtgggctcaggctgactgagcccatttggatagggtacagttgagggtagggggttggagtatgttcacaggtctgggagggcaccttgctaaagtgagcagctggagcaaagggtcccagacgatgtgggagggattagaaggaagcccttggtgctgtgatatggggctggggcacccagatttgccctcagttcctctgaaaggagtggagtaggtgtctgatattgaaaatgtgggatggatcacatagaaaactccggaagtgtagcttctctggggaaggaataagtgatggcaagttcctccagtcctccatggcctcatggattggaacagcaggagccagtcttgagatgcactgcacctccatcccatagtcaggagccgctgcctacactagcagctgggc

SEQ ID NO: 32087 - DNA, 1154 bp, Mus musculus
ttctcagtcagtacctcatgttgatcaaggagagcttcaattcatcagtctttaagctctgatttctctcctttgtgtccctctgggattcacagtgagagccgccatgccctatctccctcccctgtaatttcttctttcttttttagttgagataaggtcttgctgaaaaatcctgactagcctggtacttgatatatagttgtcctgcctcagcctcttagtgatgggattgcagtgatgacgaatcttgtgattttgtgataacctctttgtgtaggtttgtatttacactcatctgttcactaaatttgttgtcattatttttagctatattaaaagtcttactgttactctcattaaaagtagaggtaaatatttacttaatgtctgttaggtgctggcctcttgggctgatctcacactgcccatcctcgtagccttactggcatttcaggtatgaaccatagccatagccaccatagctaatgacagacatgtgatggactgggtcattctattctgatggctgtcctgtccactgaaagctcaccaggtgctagcacaccactgactcagttgttggacattgccacaagtgtttcgggtgtagcagtatccagttgaaaaccttggcttctagactagtgagatggctcagtaggtaaaagtgcttgccacataagggcctggtgacttgcattcatcctggcgccatggtggaaggaaaagaccaatccgtgactattgtcctctgatcttcctccgtgctgtggcacttatgctcacatcacacacagtgcacacacacagtaacagtaaataaaactttaagtttataagaagaaatccttggccttgggaagatataaacagcatgtaataggcaaagaaactgctaggtgaggaagtgctgatggattagggtgcatgactgggtaacatgctgcaggctcctacgatatgaaccaggagaggaacacagctagtactgatgtgggcaatagcatgtaggaatttagcaagaagcccaacatgccctgggatggaagcaggggtatcttgggaaatgagagggaggaagtctcagcccagacaggacctagtgctttgcagtctatcaggcatctatcaggcatctctgtctccccatg

SEQ ID NO: 32088 - DNA, 1136 bp, Mus musculus
cagatagggaaggaggagactgactcatctaatagcttggatgaaccttacaggctcaactgaagtaagctagccacacagagacaagtgtgcagttctcatttacatgagatactgagaataattacactagtagagctcccaaattcatggaggcagagcatcaagtgtggtgtccaggtgctgataacactaggagtagaactggctgtggtgcctttaatcctgtcacatctctgtagtcccagctctcaggaggcagaggcaggcggatctttgagtttgaggccagccttatctgcatggtgagttccaggacagcaagtgctacacagagagaccctgactcaataagctaaacaaacaaggggttgggggagttggctagatgtctcagtgggtagaagtgcttgctgtcaagcttgacaactgagtttgatcccggggacccacatggtggaagcagagaactgacctgtgattcccacacatatacccaaataaatgaatgtaataaaaatgtggtaggatagagttaccgttagagtgactgtttaatgtgtgtagaaatttagttcttcctatgcctgtaagtacatgtatgtgtgcacctatgtttggaggccagaggtcaaagtgaccctcagccgtactctttgagttttgagacagggttgctcagtagcttagagcttgtttggctcccgtctgccttcccgtgctgggattgcaagtggcccactgtgcctggcattttacgttgtccatctgcctccccgtgctgggattgcaagtggcccaccgtgcctggtgttttacattggtgctgggattgagctcaggctctcatgctcgtgtggtgcatgttttacaaactgagccacctttccaagcccagtgtgtcagtctttggagatggatctcaaatggcagcagctgctttggcgggcgtcacgtcaggtatgttctctcattgaggtgcttagcaaggcttctagcagtgtagtctgctgcgcaactggaacacagtagccccacctcagtgagccgcttctctgtgatgctctggcacatgcattcatgtcagacgcagagcccgcctgtcactatgcaggaggacttgtcaccctgtgacc

SEQ ID NO: 32089 - DNA, 1417 bp, Mus musculus
aggaaagagagagagagagcgagagagagagagaagtatattatatattatatatatatatatatatatatatatatatatatatatatatatatatatatatatatatatacatatacatatatatgttgagggaggagtaagaaagaaagccaggacaataactgggccagcagctctgaagcacaccttccccgtctgtcccagtaggggctggcgctggggttggaggccgctggcctgtgctctggtgcagatgctcttacccagcttcactcaggaccaccttggggtgtaacagagggtgtcatccggcccctggccctggggaacatccctagaggcccagaatgggggttgctgggtaccccatgccctgagggttccagcactgctgccaagtggccttgtcccagctccccctgccccccccaaggctggtgtgagtgtgcaagtatgtgtgcagagcttgtgtttcatactgcagatataaataaaggaagatagcagaacattcctgctgtgggactgtgagttctgggactcagagttgggtgaacttgctcttcatagcctagagagctacattctcttaggaccacacttgtgagagtgtgtgtgggtgtaggggatggggaatacttagacatcaggcagaacatcaggagttagcactctggggcgctctcatcctgatatgtgtacctccgtggccctgttccaaaatgcagatcagttagggctgtgctgactcagctctatcctctaacaggcctgctaaaaggagcaagaggtccctggactttggagctgagcgtcctgccattacggggataggaggcaccaggcatgtggtggtggcagaggcagaggcaggtggatctgtgtgagttcaagcccagccatgtctacaaactgagttccaggacagccagggctgggcagagaaaccctgtctcaaaaacaaaggtgtgggggctggtgagatggctcagtgggtaagagcacccgactgctcttccaaaggtcaggagttcaaatcccagcaaccacatggtggctcacaaccattcgtaacgagatctgactccctcttctggagtgtctgaggacagcgacagtgtacttacatataataaataaataaatctaaaaaaccaaaaacaaaaaaccaaaggtgtgggagagattaggagacaggaagctcccttgagaatggacatacaatgaagcatccctaagggggatggttgaggaacctagtagtttcttggcatccagtaggtccctatcttgttcatgggaaggctgcagaacatgagtgtacagtggtgtggtcgtccttccttccagggaatgtttgaatgacttcaggcacaatgcaggatttatttaaccagtgtttgtggcaggaccc

SEQ ID NO: 32090 - DNA, 1124 bp, Mus musculus
tcagctttgtatagataagtctttttctttgtttcttttcttttttttttttttttttttttctttttctgtctgatagtgtgatcaaattatttcatgttaaaacttttgctaagataaacaccactttatatatgactggagctttaagcttctgcctcataacttgattgaaaaccagttatgtgtgttaattttatatttgtatagtgtgcatgcagataaatgtatataccctaggtttgcagtaagatggaagcacacagtcagcatctagagctaggagcagtactgagccctctgtgcccccacatggctgctgtccctcctgccatgagctgcatctttacatgaatcagttttgtatctttccccactctttatacagtataaggaacccaatatagagtgggtcctgtgtctgaaattcatgtcactaaaatgttttgaggcagggattacaggtgtgtgccacaacccctggcttagacagcctgtaggagtccgttctctcctccacaatttgggtaccagaggttgaattcaggtggtcagacttggcggcaagtgactaactgctgagccatcttgctggtgcacacacacacacacttaagttgggatagattcattgtacaaaatggtagattttgtaaaacgacattttaatgtttgttattatccccttcttattctttcttccctcttgccaactaactgcccttttaaattttttttaaactattgctttttttccccttaacatgttatcctgcagatgatataatttcatactttatggctgaataaaactcagactttttgtgtatagatcccattttgtctagtgctctgtcgatggacactgaggctgatgctgtaacaggttgtaaataatgctgtaataatcatgcttgtgcttgtgtctttgcccccccccccctttttttgtctttgctttattttcattagagtcttcatatatgcccaggtgtgatagagctgccttatagagtatagcatatctagcattagttttttttttaaagaaatccctctgtctcttcctgtttttttcctcaaggtttttgtcgtgttgttttgttgagacatactatcgtgta

SEQ ID NO: 32091 - DNA, 1236 bp, Mus musculus
tatttttcttatgtatttccgcccctcctcccatccttaaggaaagtcaaatgagcaccaacacctattttaaatagagagcaacacttagtgttagaatgaaatggagatgtctgggcgtaacagtgatccttaagtgcaggatagagagccctctggggaaccagttattggtgcaggtcctaacagagtcaggaaaattaaccctgaaaggacgacagtcttgcttgtggagggatcctgcatgccccagctctctctcagtcactgggttcctgtttgcccatcttccctcaggtcccagccgtcggttcaaacgtgtggtagagaccatccaggcacagttgctgagtactcacgaccagccctccgtgcaggccttggcaggtaggtgacagatgtgtggtgggcacacatccagggtgaccagtgcaatctcaggtgtctctctgcttctcttaagctgactcacttcttggacttttggccagtgtcttgctgaggtctcccctgcactgttgggaatagatttcccccaagaggctggagtccaagaaaggagtttctcagctacctgaaagccctaaaacaacagtggcccccacgttggaagcaatggtgccacagagctctggagccagatctgccctgtgggagagtgatcagtcatcccagtgtgcctggaactaggggctaaagccaggggagataggacagattggtggccctctctgcaggacccaaatgctactggcattgaaaagcacagttctcaaatggcatccagggagcagagcagaggccaggcctcagggaactgtttataattcattcaggtttccataagagaataacataaactaaccagaggttagttcagatagaggtagactgtttgcctagcaatgagaaaggtctggattcagtccctaggagaaaaaaagaaatgcaataaacttgaacggggtgggtgtttggatttggtttggtttgtttaagacaggtttttttgtgtgaaaccttggctgtcctggaactttctctgtagaccagacactggctttgaactcacagagatctgcttgcctctccctcccaagtgctgggattacagaggtgtgtcaccaccttacaagtgaactgggtggctttttaagcaataggagagtgagtatggaaatgcgtacatgctgtagtccaagcattcaggaagctgaggcagggaggttgctatcc

SEQ ID NO: 32092 - DNA, 1121 bp, Mus musculus
agccagcctggtctacagagtgagttccaggacagccaaggctacatggaggatccctgtctcaaaaacacaagcaaatacatacatacatacatacatacatacatacatacatacgatagtattatctattttatgtatatgcacttttgcctgcatgtatgtctgtgcactgtgtacatgcttggtgtatgtggaggccagaagaaggcatcatatctcgagttacagggggttgtgatctgagaatggaatactgtcctctggaagagcagccagggctcctagccatggaacccaggaaattgtgttcagagactggaaggccaaggtcaaggcagcaagagagattttgtgtctgccaacagatcatttcctcattcttagagggcctcggtgtctctaacatggtggaacagcaagggagtaatttgtattttggtttttttcccagacttggtctcatatatctcagtctggccttaagcttggaatgtagttaacagatgactttgaactcctagtccgcctacctctgtcccagctgctaggattacaggcgtgtactaccagtctggctttcactgaggtcttttataatttcagggcactaatcccagaggccctatggatttaggtgtgatggtttcagcctgtgaattatgggggacacaacatttaacctgtagtagaagtgtctgccatagcagtcagagctacaaagatgacaattctatgtgactaaaaggttggcttaggcaagcaggctccattgtaggatgcaagagaggaacatgccaggtgcacaaggctggtgagatcagcctagcattcctctctgtctctgtcccttgtagaagggatcaggcaaagagaatctagcaatgaatatagcagccaccggaggacactagtggcttgactctggacagagctagtcttgactttgggttcatcacgtatgattgccattagtaagtgacctcagagatggtccctgaaacaatacagatttttcagcctgctgtccgggaggtgaggcacccagggtgacttcaggatgtcttcctgagagctgtcctctcttgctctgcagttcctacctttatctgtggccactt

SEQ ID NO: 32093 - DNA, 2755 bp, Mus musculus
agagaaaccctgtctcggaaaaaaaaaaaaaaaaaagaatgaggagtctatagggtagcctcgggatgagtgatcctaaatgctgggctggaggacaggggaatctggctgccaagtggacacaagccttgggagaatgggaaatagccacagaggcagaaaggcaaagagcagtggctcttgaaggactctgctggggacacagcttggcacttgtccacaagtcagaggaagaaggcaaggagtgccagtgcatcccgcctggaggtcaggttagctcactggctgacagggaggggtagacacagaaggcaagctcttaaggggctctgtggagagcaggctgcagccagagtagctaacaataaatggtggggtaactcattacagaacccttggacctgggtgcctggccaggttgtggagctggacagctcctgccctgcgctccaggctagggtgctgaagggggcatggcctcagtttgtgccctcagatgggaatactgcctgtgtgaaggtgctacgggacattgagccaggggatgaagtgacttgcttctatggtgagggcttcttcggcgagaagaatgagcactgtgaatgctatacctgtgagaggtaggcacggaccttgtgggcagggtgtggcagcctgccctgggacgtcaagggttgctgggctgcagtgcatcctcaggattcactctaaagtgtgtctggcccagcacatgcctttgcccttttctgttcctgcaggaaaggcgagggagctttcagacttcagcccagggagcctgagctgcgaccaaagcccctagacaagtatgagctccgagagacaaagaggcgtctgcagcagggcttggtcagcagccagcagagcctgatgagccggtgggcctgctcccacctgtccccactgcgccctgacccattctgtggtgagcgtgcctgttctctagcctttgggtcactttttctgacctgtccagaggaagagctgcacaggtcctgttgacaggctttcactttttctgtctcctccgacctctacagctgcctgccagccctcatgcctgctgcctgccagcccccacatggattacttgcccctttggctccagcgggcgcctcaaccccagcccatagtacctcccaggaagcgccaccgccgccgccgccccaggatccgccaggcttcattgcctcctgtcctccgcactgcctgtgtccccctgcaccgatggggaggctgtggtccccactgccagctacgtgctgaggccatggtgaccctacacctgcgcccccagactcgctggaccccacaacaggactggtactgggcccggcgctatgggctaccttctgtggggcgtgtggaacttacccgcctagccccagccctgccagctgctcctgcccctgctgggaacccaggtcctgtccccactcctgatttcatccctaagcaggcccttgcctttgctccgttctgcccacctaagcgcctccggctagtggtcagtcatggttctattgatctggacatcaatagtggtgagccatgatgggctgcttacagggagcggaatggagtgcagagtctatcttggagccctccagaagggaaggagagctgacccaggtctgatcctggtagtgtgttgtttgggacatccctagagagctgatccttgttctatgattgctgacccctgagccagccccaacccagcagggagccctggccatttgctgtacccatccctgcccccacctcaggactataggagtcaacctcctccctcagcctctccctcccagggagcaaagccataagggaggggggcactccatggcgactctctagaaggccaggcctcagggggtggaattgacttgggggtttgccttcccctgagctgctcccacagtggggagtgagttggctctcagctctacagttgatggaggtaggggcggtcagatgaggtgggtggtacccaggggcacatccttggctctgccccacgggtctcagggaggccaggtgtgacctcatctttttcacggtgctatccctggtgctactggggtgtcggggaggcttcctctccttcccacatcggaatgggggatgatgggggattggaagaacttgaactttttattaaaatattgtaagtccttaggaggttttttttttttttttgaatgtttttatgggatgtcagttggagggtgagatctcagcttgactgggaagatgaggtggtatgcctgcgagactgacaactatcctgatatgccttaagaagggagagggcagtggattctggggactgctggactaagataaagccctgtaactgcacaaacggtgcttataggacatgaccaaatgcattctctgctctggggaactgaggagataaccaagaactgatgaccgggtgcaaagtaacttgcctgaggccatacagggacttgtcacttctcaaccagatctagagcagggcctggtgtggtggcacccctttaatcccaatacttaaagaggcagaagcagatagatctgtgtgagttcaaggctagcctgatctacacagggagttccaggccagccaaggctacacagtgggtggacttattcaggagcagtttgagaggaggggatataaatggggccaagcagtttagccctgctgaagggtggagggaacctcttgtaacccagttgtcctcaacct

SEQ ID NO: 32094 - DNA, 1281 bp, Mus musculus
agacaagggcgcaaaaccgtttttttttttcaaaatatgtattagtgcccaccatgcgctaagtgcagactgaacagatcagggtgatgcgatgggaacatagctctaggaactctctctgcttttggatcctcacgaaaaccgagtcaccgagttccgaaaacttcctaccccaccccggcgcctcatcacggtacgcaccgcgagaactcgccgggaccttcagacgaagagctccgaaggttcccgagtcaaaaagactcggaggcggaacccaaggcccagaggaagctgggtagccgagttcaggcgcgccacgggaggaagcggaaatgcgttgccattttaaaggtgtcgtcccgcctctcgtgtctctctttccgtctccggccgccatagggagaggaggtgagtgtgaggcctctgtccgtcccgcgtggccgccatctcgctcccacggcctcggtctcctgcctgggctttctctccttgtacccaagcaccattcgctgccctcattccccaccggaagtggggcctcagcgtcccttcccccttctaagtctccgcggtgttagctcggcctgcctcctttgctcaccctttcctcggccgtgtaaagctcttgctcgctttttcccaacggtgctgccgcttacccagccgcctgtccacggcctgcttctttctgacatctttcacaccccccccccccccggcttctccccagccgccgccatgtccgcgcatctgcagtggatggtcgtccggaactgctccagtttcttgatcaagaggaataagcagacgtacagcacggtgagtcgggcccgcgtgtgaggggcactgtggctcttttgcgtatcggagcctccgggccttaacttaacatcgtgtacacctattccccaggagccaaataatctgaaagcccgaaactccttccgctacaacgggctaattcaccgcaagaccgtcggagtggagccggccgccgatggcaaaggggtcgtggtagttatgaaacgcagatccggtgagcctttgcacacgatagcgctccctttttccagggtccagaactgcccttcctctgacttcccggctgtgtaaggtgatctttaaattaagaagtgtagagagaaacttaagtacagtttctctatgtagacctcaatgtcctggaactctacatcaggttggtctagaactcagagatccacctgcctctgcttcctgagtgcttggattaagtgcatgcgctatgtccctcctgtatct

SEQ ID NO: 32095 - DNA, 1203 bp, Mus musculus
ccttcacaccttccttctctatcaagtcctcccttcgtaaaaacttctgtatcccctcctccgtccccgccgatcctttcttttctcctgctgagcccctctctcgtcgctccctttgtcctcccctcccaccgctgcaattcggctccgggatccgcagcctggcgtcccggtgtgcaccatgccggccctgctgctgctcgggaccgtcgcgctgctagcctccgcagcgggcccggcgggggcgcgcccatccaacgacacaagctcagtggccccgggcccgctgcccgcgctactcgcgcacctgcggcgcttgaccggggctctggcgggcggcgggagcgcggcaggtaccagcgccaacgccaccaagaccagccccgcgagtggcacgggcgcagcggcacgggcgcctcctccggccgagctctgccatggctactacgatgtcatgggccagtacgacgccaccttcaactgcagcaccggctcctaccgcttctgttgtggcacctgccactaccgtttctgctgcgagcaccgccacatgcgcctggcgcaggcctcctgctccaactacgacacgccacgctgggccaccacgcccccgccgctggctggaggcgccgggggcgctgggggtgcgggtgggggaccagggccgggccaggcagggtggctggaagggggccgggccgggggcgctgggggacgtgggggagagggcccagggggcagcacagcctacgtggtgtgcggagtcatcagtttcgccctggcggtgggcgtcggtgccaaagtggccttcagcaaggcgtcacgtgcacccagggcgcaccgggagatcaacgtgcccaggtaagtgtgaattgggattggagggacaggagggagcctggaacctggcactggggaacagacaatccgatggaggcggtttcttggtactgggaagtggagcaactgattaagtggcagggcttactctgtgagaggtcaaccggcttggggatgtggtctgggcaataagggtggcttggtgggggacagggcctgcgcctcagaatacgaacctgttggggcgtggccacacggatggctgaggtccaagttagttgtgggaagtaactaaagcccagtgacagaagcgacaaaaggacctggctgtagaaaagaattggtatagagagttcattcatt

SEQ ID NO: 32096 - DNA, 1173 bp, Mus musculus
tcatttacacttccaatgctataccaaaagtcccccatacccacccacccccgaccaaggcaaatcttataaaaaaccaacatttaattggggctggcttacaggttcataggttaagtccattaccttcaaggtgggagaatggcagtatccaggcaggcatggtgcaggcagaactgagagttctacatcttcattcaaaggctgctagtggaagactgacttccaggcaactagggtgaggatcttatacccacacccacagtgacacacccattccaaccaggtcacacctattccaacaaggccacaccttcagatggtgccactccctggtccaaggatatacaaaccatcacattccactccctggtccccatagacttgttcaaaaacatgagtctatgggggccatacttaaacatagcataatgcaaaatgcatttagtccaactttcaaagtcctcatagtctatagcagtcgcaacaatgttaaaattccaaagttcaaggtctcttctgagattcattcaacttaattaactgtaatccccaaagcaaggcaggaagccagctgggcaaactccaaactctgcatctccatggctgatgtcaaagcagtcttcagatctctactcctttttcacctttgttgactgcagcaaactgctttctcctgggctggttccactccctgttagcagctttcctcagcatgtatcccatggctctggcatctttaacatctttgagtctccacagcaatttcaatgttacagcttcttgtttcagtgtctgggattccacttgatcttttgggctcctcctaagggctggcatcacttctccagctctgccctctgtagcactctaagctcaggttgatccattccattacggctgctgttcttggtgatcatcccatggtactaacattgccaatacactggggtgtaccactccaactaggcttcaccaatagcctctcataggctctcttcagggtgccaagcctcaaatctttgcatgaccccttcagtcctgggccatcaactacagctgaggcttcaccttctccaatggcctcccctggtctctcacagtgctaagcctcagcttctctccatgatcccttcattcctgcacaagcagtaccacctgagtgattctttt

SEQ ID NO: 32097 - DNA, 2269 bp, Mus musculus
atgcaggagatatgcaggggttagtctcaaagtggagagcgatggccctggttctgggagcagagctctggattgtggttcacagtgggagcctgggcttggtttattttacacatttatagggttctgggcatggaatcctggcttcttgcgtgttagccaggcactctaccaactgcgcaatattcttacatctgtcaggagcagggaggttggctgggcctgagatgggtttggcctgtgttgattgggtttcaaagggctccccagctgtccaggactccctgaggatcacaggcataaggtgcctcccaactgtctacccaaccacagcctagagctgcaggctccaagctgcccccttgggctttctggggagggagcagaagattggagaaccttggagcctgtattggggttggctgtccctggtctcctgggcccagagcatgagagatgacatcggatgccacctgggggttaccagcagggagagtctggcagaagctgtcaggagtcaccaagggacgtggtgtaggagtgagcagaatgtcatcaaagagatcaagggttgaggtgtctagggcaactgggctcaggctggggctgccgtggggcgcttccatgggggcctctgcacacgccacccccaggaagggggacggaggcggcggaggtggccttcggaacggtggtctctgagcaggcgctttttgagacaggatggtcagagccaggtgctgggtggcggcttcaatcttggcaaactccctggagagggaggggaggagcgagggagatagggagggagcgagggagggaggagaggaggagagattcagttgttttcagttgtatgcctacaaagacccctcttctgagtgccgccctcccggctctcccttccccaccctgtgcttcatccggagatgagtctcttcttttcaggcccattcccccaacccccattacccgttattttcctggcccccgccttcatttccttgagtctgacaggttaatagtcttccctgggaagttctgattgctgtagggttgtgcaccgcacaaggaagttcctttagcccaatcctgggcacatcttgacagtgaagatttatcataaccctattccagtatatgaaaatttaatgtctcggggaaagagagcctttccaatcaataatcgcaaacgggagccgtgggccagcggtgcaccgccatattgataagcgagctttcttcaattctgcccacccccacctgtctcttgccagaagctccgatactctcctcgcactcccgccaccctagtggtcacgtggatggatttcacaaacagctggggctgaattgtgtttctccgaattctcttatttctaaaaattaatttttgttattatcttaacttttttacatttacttattttgtgtgtgtgtgtgtgtgtgtgtgtgtgtgtgtatgctccctctacctcctccctccccctctctccacaccacacgtgacagctttatgtgagtttctggtttgtttttttttgttttgttttgttttgttttgtttttttaatgtctatgtatttgtgtgagtgtatctggatgactgtggaggccagaggagggatatagacagttgtgagccaccgggcatgtgtgctgagaactgatctctgattcgttggaagagcagcaagttatttttaactactgagctatctcttcagccctgttcctggtattttactcagtaagtcaggcttggttgcaagtcccttcacttgctgagccatctagctgtcccatagctgctaatctgtatatatgtatatttctgtgggagtgagcgtgggtcgagaccaggaaacttgaaaaggcacaaggtgggagcaatgaagctccaagggcggaagacgcagatgcagggggtagtagaacgcctgtgatgcagcgggggaagaggaagactatgggcggaaggcaagtgagggtagcgaagggggaaagggggggacgggggggggagacaaggtgggtgggatctatgtgtgtagattgggttgatcccacccaccttgggttgatccgagaatttctggacctgccagcggttaaataatggcacagacacttattaatatctacaagaacttaggcctttagcttgggctacctcccagctagctcatctaattgaatcttagccaccacccgcgtggctagttctttaaatctctcagtcatccgattacccgctggcaaatctctt

SEQ ID NO: 32098 - DNA, 1146 bp, Mus musculus
ggtccaagaacataattgttggggaatttctctctgaaacctacagagactattcactttgagacccctggaatgtggcatgttcaaatcaactggcctccaagactgggtacatagtaatgaaaaacgggtctccactaacatctctctgaagataacatgtaggcacccccatgattttaaccaccctgtgagccagcattccagatccttcatctagagaatgggggtggggcaatatcttagactcctccaggaacccctcaaatgacacctgccagccactggtgaccccagaaaatgagtataaccgaaatctgccttccgccaattttgcttcctgtactgaaagaagatcagggtagatgccccccaccttcagttaacccactctcagattaggtctcccttactgcagaatggtctgaccctactgatcttcccccatcctgaacactagattagactggccctttaggttggactaacccagatgcacatactcctatccacttggaatgggctggtgtctggaatggttgtggcctaatcccactctccttagagtaatagggcagacattcccttatgctgtagagcacagtcctttgaccacgatttcccaatcctgtgacctggtggaggtggtagacattgaggctttccctaccccttgacttgtagtactttggtctttccatcactacaacttgactctttgttccaatgtcccaaggggatatgggaacttggccaggggtttctctcctgtgagcctcaacctgacccctgacccctctccccaatgtctctgggactccaataaacctcattcagtcattactgtcttgttttttgatcctggatttcagggaggtggggctctctccctcttggacttagattatgtcccctagggcctagagagatggctcagcagttaaaatgaatactctcctttcagaggaccagagttcagttcttggcacccacaccaggctgttcataaccacctgtaactcaagctccagtatttgcatgttgcctccatgagcttatatgtacaaagccacatacatatacacatttcttttgaatcttcaaaaacagactagagttactaaatgaatacaggtccttgaggga

SEQ ID NO: 32099 - DNA, 1158 bp, Mus musculus
gtttggtctcatctgtttgactttgcgtgttagcatggatgtgtgcttgccagtatgtgtattggacatctgaggacaacttttggtagtcagctctcgccttcctgcttgctgaggggtacactgggctaattggtcctaagcatttcttctgtcgctgcctgccatcttgcggtggaggtgttaggattgcatgtgtgcaccagtatattcttccccactttaaatgtgcaccactatataatgtgcaccactatattcttccccactttaaatgtgcaccactatattcttccccactttaaatgcacattcaggggcttgaactcaacctgctaggcttattgaacaaatgcttaccctctgggctgtcttcctagctcctcatttattagtcagcaagtacttatcaatatagacatctacagcaataaatttccctttgagcactgctttagctgtgtctcttctgtgttggtatgttgtgttttcattttcttatttattttttacttatttatgagactgagtcctctatagctcaggctggccttgaacttctctgtgtagctgaggctactcttgaactcctggtcttcctactgcttctctcgtaagtgctgggattacaagcctgtgccaccacaccctgctgtgttttcattttcattcatgcaaaacattctctagtttccctcatggtctcttcatagatctcctggaggagagggagcaagctagatgttgcttaagctcaacatgtcaacaaatatttgtcaagtacccacaccttttccacatatgcactgtggtaggtgctggggcataatggcaaacagaacaggctactttagtcctggccgccttagtaaacacgtggcaaaagcatgttggtggcactaactgtggtaaaagtaactggattataggctacatggatataggcaagaggacagaaacctaaatgggactcagggaggtatcgttgacttctggggaatgatgtcccagggcagacagggaatccacagagtttgttgttttatgaggtagagtctcatgtatcccaacctagcctcaaactcactatgtagatgaagctagccttgaatcctgcctcgggttcccaaatggtagggttatagatgtgcatcacca

SEQ ID NO: 32100 - DNA, 1126 bp, Mus musculus
gatgtagtataaggatgcagggagtgccatggaaggggcagggacaaaggtaccgattttgcttgcttccattagcacctttccaatgtgtttccacttctcatcaggtccccattacaactcttaaagacatttattctctccactggacagatgagaacactgaagctcagagagatctggtaaattcctcaaagtccccatagcctgcagtagagcaattggcttgatagccaggagagaaccccaacctgtaaggaagctataccctcacccccaaacggagggagtacaggttagaattacagaaaaattaggggtgctctctgggatctagtgggaggtgtgagagttactagtcaacagattctgccagacatggtgatgcacatctataaccctaccatttgggaacccgaggcaggattcaaggctagcttcatctacatagtgagtttgaggctaggttgggatacatgagactctacctcataaaacaacaaactctgtggattccctgtctgccctgggacatcattccccagaagtcaacgatacctccctgagtcccatttaggtttctgtcctcttgcctatatccatgtagcctataatccagttacttttaccacagttagtgccaccaacatgcttttgccacgtgtttactaaggcggccaggactaaagtagcctgttctgtttgccattatgccccagcacctaccacagtgcatatgtggaaaaggtgtgggtacttgacaaatatttgttgacatgttgagcttaagcaacatctagcttgctccctctcctccaggagatctatgaagagaccatgagggaaactagagaatgttttgcatgaatgaaaatgaaaacacagcagggtgtggtggcacaggcttgtaatcccagcacttacgagagaagcagtaggaagaccaggagttcaagagtagcctcagctacacagagaagttcaaggccagcctgagctatagaggactcagtctcataaataagtaaaaaataaataagaaaatgaaaacacaacataccaacacagaagagacacagctaaagcagtgctcaaagggaaatttattgctgtagatgtctatatt

SEQ ID NO: 32101 - DNA, 1168 bp, Mus musculus
cttggatggggggtggggtgggcaggggacagacgcggcttgtacagagcagagaacaataaatggtatcaacagggccgctggggtctgtccttgctgttcctagggggttccactgactggctggacacatcacctcacatcactctcttttcacctaggttgagtgaggatttgccatgtcccaggcattagcctgagtgaaacagggaagtcgccctctcaggaactgatttgagaccccgagactcccttccatgatgctctcagccaccatggaaacaccggaagccttctgtctgccaagccctgacctgggcgctagggagactgatgaattgatcggacatgacattcacactccagtaggctgggagagcatacctgaggaacttaacacagtctgcagacttactggagacggtctcatgtagtctaggctagctatggacttgctttgtaggtacagataggcttgattttcccccatttttgagacatggtctctctatgtaacccttggctctcctggaattctctgtggactaggctggttttgaatttacagaaatccacctgcctctctgcctctctggtgctgagattaaaggtgtgcaccaccatagctggctaatcttgaactttttttaaaatctagattttttaaaacatgtaaagagattcggtatatgggtgttttgcctgcgtgtatgtttgtgcaccgcttggtgcctggtgcccatggaagccagaagaggtcattgcatcctcaatctagagccacaggtgggtgtgagctacaggtgggtgttgggaatcacacaacaatcatctggaagtaactgctgagctattacttcagccccagattttatctgtcctctcagtttgacacatatctgtatctgtatgcgcgcgcgcacacacacacacacacacacacacacacacacacaaactttggttgtacacacaacctccactatgctcttatccctctcccaatcctgctgagccctttcttgccaacaagccagtcttactttcctgtcttttattttcttggtgacccattaagtttagtgagggttgcatgtataaacatgcgttggaaggcttatttacctgagcaggggcagctaaccagtagctctaccactgaggacta

SEQ ID NO: 32102 - DNA, 1142 bp, Mus musculus
cccttgtaccctgagcacccaaaggcggggaacggtgcccacggtcgacacccccatgccggttgcccattctgggacccttcgccacggtcgccccctcccacttgtgggacaaagggtgggggcgcatccccacgcgtgacctcccacgcactgcgcacgcgcccagctcccacttcggggaggggctttactcgcccacgcgagtgcgggaggaatgggcggctgggacaggggaacgcttgcaggatggaccccctaccccaagaatggaagttaggggtggttgtttctccatttatggcattgggttcggagatgggccatgatgaagggctttctcattcaggccaggtctccctgtggtgttgaccccacgaggaaccaaagaatttaagggccgagccccttcacaaccaagattcctctcgctgagccccctcgctctgggtacatactttggaagcctctgactctgtccagaagtatgggtcctttcctccctcagactggtgatccttccttactccggagggacaggtattccacctctccagggactgccgacttttggtgacctgcttctgtccagtgcccccaagggctcagttgctgggtctgcaggaagcctcctcgatatgaatgacagaaacaaccgttggcggacaagtgaggcacctggggaccctttcttttcccatccttggtctgacattctggttccctctgtccatgggacagcaatggttgggggtggtctataaggttcaggccacttctggggtgacctctgctgacctctctgcagtgaaggacgaagagacctttgagatctccattccctttgaagaggcaccccacttagactcacaaatcttataccgtctgagtccgtctcggagaaatgttgagggtgagctgagaaagggcattggagggactggagtcaggtggggtactgcctcaccctggggcatgacctccgtccctgctgttcttagagcctccagagggcgcctccccaaccctggccctgatgagcagtgttaaggcccagctgcacatggcactggagaggaactcgtggttgcagaagcgcattgaggacctggaggaggagagggacttcttgcggtgtcagc

SEQ ID NO: 32103 - DNA, 1184 bp, Mus musculus
ggatgttaaagctaagttcctgcttttgtgtagatctctgactgcaaagccagttccttgtagttctcgagtgtccctgctgatgttggcaacagggcctgagacctggcctagaagggccagttgttggagttgtgtacataagacaactacattatagcgttttgagcaagtgaagtttccttttcttaactgtccagcatcattatgtgggagaaggttcttgtcttgctggaagaaagcttgaccactttgtcaccttgcttgcctatgggtatttgtctctgacccagcctcactctatctcaactttagcccccttctcagttccttaagtctactgggagtttgtgtcctaggcccttggtattgtcacttcatctctggggttctttgtttttgagacttagcagcagggaagacatttgggatttgtaagtggcccctcttcgtggtgtggagccagagctgcctggttctgtgcttgtctcaatattccacagttcttgcctctgtctagctcttgattgttttattttattctttgcatgtatgcatgcaaattcttttctgttagtagttgaacccagactctgtactgaatgttttttgcttggtattcattccagaatacagcctggtacctaacttacttgcattacaatttcagtctgggcttcactgcttttttttctttccccgagacagggtttctctatgtagccctggctgtcctggaactcactttgtagaccaggctggcctcgaactcagaaatcggcctgcctctgcctcccaagtgcgccaccacgctgggctttttttttttttttttgcttttttagtattagtaaaggagttaaagatttcaaattttcctacttactgcaacagaaaaatacataatataaatgtgaggtgagtttaaaatctactttgaaaattttctcattgattttttttttttttttttttttcctactgccaatcttagaagtcaatacttttgggatacacctgtttcggttcttgagtatgtttgtttttgagataggatcttaatttaactcactagccaactctttttcttttcctgtgtcagcctgccacatgcctcatcactcctggttgtgttgctctgtatgggtgcgtgggttgatggttgagagatcggtggtactttg

SEQ ID NO: 32104 - DNA, 1154 bp, Mus musculus
agatccctccacatcactcttttctcctcccctcccgccctaccccttcttcccctgctcctccacccctccccgcccctgcactctacttgttctgcctctctgggcacccttcctgtccctttgcttgtctttctcttcctgcctgttgctctcctaccctttcctgccttgtttgcaatgggcatttcttccttgtgtcatcatgttttttgtttttgtttttttttcctcttgctgtcacatcctttcatcttttcttgaataacttttcctaactttttgggctccatggctcatccctcatgcctgtcctcctgtctggcccatttgctccctgtctcctgtcctttggtattgcttcttctctgttttctcattttcctcctgcattttttcctactattgacctctacacccctgacccatattccactgtccctttccctccccgttctcccttcccccattcctctccccttacccccaaacccctctgtgtctccctctctcacccttcccctcctctctccacctccctccccgcccttccctgtctcctattccctctgcaggaggctatgatggacttcttcaacgcccagatgcgcttgggagggttgactcaggcccctggcaacccagtcttggctgtgcagataaatcaagacaagaattttgcctttttggaggtgagttttccagtgataagggtaaggggtagtagggatggtctgtgctgcctactctgactgctttccctgcagctcattttccatttggctgctggagtagttctgtagtcctgtcctaccttatgccttcctatgctctacctcactgggaggactttgtggcttcttcctgctttgttggtttttgagactattctggcccagtccactctgcttaggctacattgatcttgcagagggctcgatgtttctccctatttggggcctaggttgaggcagtttactctcggtgtttatacgttacgtttgggcagttcgttagtttggaactgtctgtaaagacctagctcgactctggggtcatactcctaaaaaccgtggggtgttggcatgaccaaggctgcggaagaggtttttcagtgttcccttttcagactgcattgcccataagagtccact

SEQ ID NO: 32105 - DNA, 1190 bp, Mus musculus
acagagtggtggtcacaaaatactgtgaccctgattcttaccaccgtcgggacttctggtagaggtggctgggggagggtgggggcagggctggctggggactttccccccacctgtcccctcctcctttcccccctcttgaagaagatgggcagaggagtgacagccgaatgacagccggcagcaactggaatggcagcaattaaggggggtggggggtggggggctagggcaggaaggggactgggcaagtgcacacaggcccacacagacacatgcacccacacagacacagagggaacgggctgggatggggactgtgtgcacagcagggcgggtaggacctccacagccccttcccaaacagcctcttatcccttacacccctttcctcctctcttcccccatggtaggaacatagcgtgtttatattttatggccaaactattttgaattttgttgtctggccctcagtgccctgccctctccctttgcaggaccacagctcccgtcctttggcttctggtccttcctgttctccaccctggtttcttaagtagttggttcttctccttagtcttcctgactcaacccgtggtctctgtcccgctccccctctctgtggcagtttcatatttgctaatacgaatttgctcattaaacattttgttgtattttactttatggatcctcatctgtgtccagtgtgtccgcccgtctctttcggccgagggtgtggagggtggcacccagggaaggaggcaggcctgagggtcccgcgagggtagccacagtggaggcttcaaggcttggacctttacgcgtctccactgctgcgtagatgcggaagtgacgcaagggcataaggacgcgcagtcccgtgcgccggaaatggtgccggggtgggtttggtcgcggaagtggaggctgccgggcgaagtgcagagggcggggcacgtgagttcatttccgcttccggtccgctgccaccttcggttgcttcccgtccgctcggcggctcccctcccccgcccggctctctgcgcccctcccgggcgccggggcggcggggccgtcgctgtgcggccctccgtgcgtctgtgcgtgcgcacgtgcgcacttctgcttcccgcagctcggcgcgcgccccgcgacaccgaggccgagcgggggcagggggctgaccgtca

SEQ ID NO: 32106 - DNA, 1190 bp, Mus musculus; identical to SEQ ID NO: 32105

SEQ ID NO: 32107 - DNA, 1887 bp, Mus musculus
aatgaagtgctggttgtggcatagagatgcgtttccattggttcattcctagagggaaaaggtttgtcctccagcccttagatgtcatgacctgtcccagggctgtgggtgtctgcttggtttctgcgctgaagtgcttgctcatttgagactgcgagtgtcccgagtgtcccgtagacactcagagactgtacttctggagcactgtgggctctcctgagatcttgagtctatcattccctctgtcctccttctccacagtaagatcctcgcggtttttagtccaagctcagctcagcctgccccttcctgagacctcccaccgcctccccccacccccaccccccacccccacgtcctccctccctgctccccccaactcaggctgggcctgctactccatctgagcactgtcctggctttttcaggggagttggagttgctcgcaggagaggtgcctgctcgcagccctggggcattcgacatgagtggggttgggggatctctggctgagtctgtggggagtcccccacctgctgcaaccccaactcccacccccccaacacggaagactccggagtcattcctaggccctaatgcagcccttgtggatctggactcgctggtgagccgaccaggccccacaccaccaggatccaaggcttccaacccattccttccaagcggtgagtgtggcttgtgggactcctgtgtctttggtgtcttctgtggtccctacagggtagaagtttcatggagcaggcatgcttctccccacctgggtgtgtatccaagacttggacgctgggcagacaagcacttgctgactgctttttctctttgcaggagctccgcccacaggcccctctgtcaccaatcctttccagccagcaccccctgcaacgctcaccctgaaccagctccgtctcagtcctgtgcccccagttcctggagcgccacccacctacatctctcctcttggtggaggccctggcctgccccccatgatgcccccaggtcccccagcccccaacactaaccccttcctcctataatccagggtaggagggaggcctggttcagctggcttccccaatttctgctccctgggagatcagtattgtgagtgcatgtgaaatgggggggccctcccccacagtgcccttccccctcctggggcccactcacactacaccctcttcccaagtccccaccccacctccccttgagaaaaactggacatggggatggggaggggagccggccagaggaggacccttttctgtggcattagatgggggagggacagctggggttcccccacccattccacctccctctaaactcatgacaacccccaaatcagtgtttgagcctcctcgttcccttggcacccctggtgaatccttggtgatgattttggcaacttcgggaataaatggcaattctcatgggtgtggctcccttaaattctcatccacggttcagatgtcctgagaagcccctcttccagggcagactcaaggtttggccagagtcacttcttgacttcagctgagaatgaacctttctgaagctttgaattccctgattcagttcctggagctgggctggctgaggatggggaggacctgggctgtggtactgagtcctgcatcactgagtcctacacaggcatcactaattcatccagcttgctttggaagtcttgttagcctctgctggctaaacccagtggaccgccagatggcatctctaggccattgctatgtgtttttatcatgtgctagaccacctgtgattactatgtcagtgagtccttgagtggcctggtgggtaggtgctcctgtcagcttgcatatacagaggcatttgccaacagtgtcg

SEQ ID NO: 32108 - DNA, 1186 bp, Mus musculus
cattgaactggaagctcagacttccccctggtcattttgggcttttaatgcccttaagccaacaggctaaaaaaggaataacagtgttaggaggggtgatagatccagattaccatggggaaattggattatctcttcacaatggtgataagcaagattatgtctggagtgtaggagatcccttagggtgtctcttagtactaccatgtcctgtgattaaagtcaatgggaaactacaacaacctaatccaagcaggatgacaaaggacgcagacccatcaggaatgaaggtatgggtcaatcctccaggaaaagagccaagacctgctgaggtgctggctgaaggtgaaggaaatacagaatgggtagtagaggaaggtagttataaataccaattaaggccacgtaaccagttgcagaaacgaggattataaagtaatatgaatgcccattgtaaatttactaatgcgtttgcgattgtacgagggatagttatatcatgttaggcgtatttacaaccttgttattgtttcatgtgaacatgagatattatttgtgtcaagttgaaaaggggtggattgtagtggctattcctggttgtcaacctgacaatatttggaatgaactacaatccggaattggaaggctcaccagtgacccttatctggaggcttggagatccttatctggatcttggtttgaagatcttgagccacagtggctatggattccagaagattgaatctccgagtttaaggaacacacctttaatctgggctacacctttcatctgggattaaaggtgtggcggaacacacctttaatctgagctacaccttctgctggagacaatataaggacattggaagaagggagtctagcgcttgctccttcgcctacttgctgcgtgagactgagtaactgctagatccttggacttccattcacagctgcgactgaacaattgttgggaattgggctgccgactgtaagtcatcaataaattcctttactatatagagactatccatccgactgtaagtcatcaataaattcctttactatatagagactatccataagttctgtgactctagagaaccctgactaatacagatagttaaagcagagagaccctgagtctttcctcttaatgtcctatgacaagatacagaagggagtgcct

SEQ ID NO: 32109 - DNA, 1193 bp, Mus musculus
ctgcgccccctgcctgcgcgcgagaagccgcacgcgtgctgcgaatgcggcaagaccttctactggcgcgagcacctggtgcgccaccgcaagacacactctggcgcgcgacctttcgcctgctgggaatgtggcaagggcttcgggaggcgtgagcatgtgctccgtcaccagcgtatccatggccgggcggccgcggtagctcaagggacttcagcaccaggtccagagggtggtggtgcctttccgccctgggctctggggtagctggggttctaaacacctgctgcagggcgtcatccccttagagttctcccaaccccattgcctcttcccttttgggccccatatccactcctcccttccttctggagttctcagctttcacccacccctgcgaaagacccttctctccttccctcattccatccccttttcatggaggagagacttgccccaggacacccttcaagtgagaaagggggctcagggaaggagcagtgcccccactcctcccttccaaggatcttgatcttgaaccccaggacagagtcggggccaatggagagaagaggcctggacccggatctggttctctccatagcctaaaggaatgaggtggggagaggtacccgagaaagcttgtcacagatggcaggtcaccagcacctgagagagtaataaagtgactgactcagtgtgtacaggagtctgactctccggtgttgtgggagctgagcatctgaggcacaggggacttggggactcctcacacatcgcaggaagaaagactagactcggaaggtctggcagcagatcactcccatcctggttgtcctggctgtatatagcttcaggtaggtggaccgcccccgaaatccccttttctgagcaatagttcccgtttcgtaagtcatggtgcttgtaatgtcgcccacaaccattactaagttaataatattgctaggtgcctccggtccactcctaataaccaagtgccagccagcaggtctgaaagcacctcagttcttcacagtgaccgtccaggaatctagacctaacttctcttcaggatgcgcttctttgggtataaagtctgcccagtctgctgtggagcagactctgggacagtccttagcctggccctgctggctcttctgggtaccagctttgagctcctgggctctgcttcc

SEQ ID NO: 32110 - DNA, 1190 bp, Mus musculus
gatgtttaatagtagatgttacagatttattgcttaaagaagggactctgaggagcccaccagctctcaggggggttgggtttttatttgggtttagattgtcccatttggtgagtcttctatcctgtttttttattgctatgaagttacctatctgttccttctatagcagggactgggtttctgtctatgtccacaaagtgcagagatacctgattggttgactggctggggtcagagcatatatcctgatctcctttcaagtgtaagaagtgcagaatgagccacctcgtgcaaggggaaatgggaatacacggcagagaaaggcaaactgctggggacaaaaagccacaaagaaattgaaatgtattctatattgttgggaataaaaatccatttaaaaaacccaaccaaactgggctcattatggccccctccctcccgacatcctaaatggccttggcctcaatagtgaaggcgccatagcctcacgtcccccacacttggctgggaacttccattcactgcagatttatttcttttttcttttttttttttttctgttttgactgttgtgtgttgacatcatttgtttttgctttgttttgtttgtttgtctcttccctcagggttgatgggcagactgtccccagatggtaagtgtgaatctctgttctcagctcacaaggagtgacacagctacagaatgccttatgctttgtttatttggttctaaatttaaaataaaaaaaaattatgctgggtggtggcaagcccctttaaccccagcactcaggaggcagaggcaggcggatttctgagttcgaggccagcctggtctacagagagagttccagaacagccagggctacacagagaaaccctgtttccaaaaagaaagttatagtgagcaggcacatgcgccaaggcatgcatgtggaagtcagatgataccttgcacaagctggttccctctctccactgtgtaggtcttaggaatagaactcagatcttcagacttgctagaaggcaccttcacatgctgacccatattgctggcccaggtgtgtgtgagtgtgtgtgtgtacgtgtgtgagtgtgtatatgagtgtgtgagtatgtgtgagtgtgtgcgcgtgtgtgtgtgctggtgtgtgcatgagtgtgtgtgtgtgtgtgtgtgtgtgtgt

SEQ ID NO: 32111 - DNA, 1148 bp, Mus musculus
tttgcaagttacacagaggaaaactagaagtagtttgggggaactctgttcagatagggttgtacactggaggataggggatgaagggacaataatgcagacagaatcccaaacgggtcacaacaattctattgatttacttggttcagtccattgcaaagtccctgattgtacagtatgaatatattggatgtttctgatcggctgagccaaattctgcttttctctagtctagtgcggcttgaattttccttaattgaaatgccctagccgggcatggtggtgcacgcctttaatcctagcactcgggaggcagaggcaggcggatttctgagttcgaggccagcctggtctacaaagtgagttccaggacagccaaggctatacagagaaaccctgtctcaaacaaacaaacaaacaaacaacccccaccaccaccacccccaaaaaagaaatgccctaagctgagtgtgtttaaaatttcagacattttcaggatttcgaacattgctgactcttgtcagttgactcttaccccgcacccaatctgatctggacaatatccaaatccagacctggatgtgctgtctcaggctggtaatcccagcacttgggagatagatggaggtggtggtggtggtggtggtggtagtttggctggatttgaacctacagaaagagttgcaggatagccttggtctgtggagtgagagggccctgtctcaagaagtaaaaccaaatggaggctggagaggtgattcagtggttacaaacactttctgctttcctagaagacctgagttaggtgccacccacttaagacagtttacgattgcctgtggcttcgtgtggctttcaagggcatacacacatgcttacacaggcatatacacgtaaataaagtgaaataaactaaaaaacaatgaaaacaaggctaagggaaactattcaagcatcaccttggcactcgaaaaatcttgtaatggagccattttggattagggatgttcaacctgtgcaggtaggcaagggtgaactcaagctagagtccactcatactcacagataaggcaagggtgagctcaagctagagtccactcacactcacagataaggcaagggtgagacattaggagacggttggctgt

SEQ ID NO: 32112 - DNA, 1203 bp, Mus musculus
ccactttagaaatcaactggagattcctcagaaaattggaaatagatctacctgaagacccagctataccactcctgggcatacaaccacaaaatgtcccaccatgccacaatggcacgtgctccactgtgttcatagcggctttatttgttatagccagaagctagaaacaacccagatgtcccataacagatgaatggatatggaaaatgtggttcatttacacaacagaatactattcaactattaagaatgagaacatcttgagttttccaggtaaatggatggaactagaaaatatcctgagtgaggtaactcagaatcaaaaggatatgcatggaatatactcactaataagtggatattagccaaaaaagtacaggcttaatcctcagaactcaagaaggttaagtcaacgtgcccaagtgaggatgcttcaatctcacttgagagggagaagaaagcagactggcaggcaggcagagagaggagggagggagggagggagggagggagggagggagggagagagagagagagagagagagagagagagagagagagagagagagagagagagagagagagagagagaactgggtgggagaggggaacaagaggggcaggggaaaaggtgaacatgatcaggtattggatgggggaaccaggagtgaagccccaagggccagcagagtgaacctcaggattcattctaggctaccctctagaatgtaccagagatctggtaggtgagagaatctcaagactccaagagatggaccttagatgaaaggcacaacagtgatgaggggaacttgtagaatccacctcaggtagaaagacagggcatcaagtgtaggatggggttgccatctgtgatggtttgtatattctagtcccatggaatggcactattagaaggtgtggctctgttggagtaggtgtggccttgttggagtaggtgtgtcactgtgggtgtgggctttaagaccctcatcctagtcaatattctgctagcagccttcagactaagacgtagaactctcagcttgtcctgcaccatgcctcctggatgttgccatgctcctgaacctctgaaactgtaagctagctccagttaaatgtataagaagagttcttggtcatggtgtcagtgcacagcaacaaaaaccctaactaacaccatcccacagtcaaaagctg

SEQ ID NO: 32113 - DNA, 1391 bp, Mus musculus
aaattataattaatcatctatagtccaaacagttcccaggtccctgtggtctccatggcaacttggtggagtcagtctggctttcaagcccagagatggagaggttttttttctctgtggaatagagtgaaatgagaagtgacccaccttgactttaggcaatatgaggcatttgactctccagtttgtccagtgtaaaacaaacctgggcagggcaatggtggtgtttctccgtggttatcctaccacagtccaggcagtcttttgtagctgtgcccaaaaccttctgagaccttgggatggagggggtggtggttactgtcgggctttgggagattctgcctatcatgagcttaagtattgatatctattaacagacctctgacaagttggagaactgtgtctactggtcatatctgagttagacaacttatgtttgttaaattatttgagactgtatatagtaaatatatcacactataatttagtggcaatagcaaaaatcatttaccaagacagaataggaatgaacatcttaattgttaacaattaagtaactttgacaggttgcatagtatagaaaaacatattttgcattagtagagaaactcttggattagagttggtgtggaccagaatgtaaagaaataagaaagattatagtggtggcttgagaccatggtgacagaaagtgagtgtgtccaggcaggttcaggcctgtgacacgaactggtgggcgagcaggcagtgggatgggccagtcgacggagcaagagacaggagcacctgcatgtgcaattgaggctcgggcgtgggaagcattcgcagcctgaagaacacagatcgcaaggagccacaatagtggtggctagtggtggcgacagagtcaagagatcagggctgtgcacaaggaggcaccaggcctgctgtggtcatgggcaaagcaggcaccatggtggcaggaccaagggagggcagtgtgagtaagcaagtagggcaggacttcctcctagcagccagacatcccgacccagtgctttcagagacctcggtgggtgggggagggaagcacctaaagtagcggtctgtatcctagtaactccactcaaggctgagtaaagaaggcaagggcggcactgtgctgaggctggagaggaaaatgtgccggcagcaatcccatgcagggacagtttgtgcatgtggtggcaggggaacgtagcacagcatcctgtcccagacagggcgcaggaagcacaagagggcagggcaaaagttgctttctcgcagctgcagcagagctcgagcagccacaaggggtggtggtagccttggtgggcagaatgtgggagcagagtcctggacagagagagagagtgaaagagagaacaggg

SEQ ID NO: 32114 - DNA, 1234 bp, Mus musculus
gcgccgcccagaagctctgcgactctctcgcccgtcccagaaacagctggcactctgtattccacacggtcacccgtgcagcctgccctccgcggagtcccggagccaagaaggctcccgccggcgcctgtgccacaaacctctcaggccaggcagaccccgtgctctcaccaggaaggtggccggctgtcagaaaattaaatttaaggttggtaaacatggtggtactgttgttacaggtgctgttaactactgttgttacaggtgctactgttacaagtggtatctataatacctgcaaccttcagatgaggaggcctcttggaggcattcacctgtgtttctgtaaggaaggcagaggaaagggctggggatagtggagatggaatagaattgtaggggtatatcagtctataggggagatcaatcagtaggggagcgtctatactgtctgaaaagacgttaaagggcctattaacttcttttgggggtgaaatagtacatagttctttatattgggggcagtgattggggcagctctttgatttggacaacgggtaggtaaattggttctttctcacaatagttgggtacatgctgtgagatctgtagtagggtgatttttaggacgttgatctgtgggacaatggaccttgccaggaagcttggttaggtagagcgggtctgaatccctggaaacccgggtacacacttaagatggcaggaggcttcctgctccctgccagattcccagcctggaacatgtgccacacttcccacataaggaaatgtgtcctatggtcatgtaggcccagaacagagttctccatgctaacgaggtacctagagaccctgagggcttagccaataagctccccttcccaaaaattcctccatgcaaaaggtatttaatcctctggtccactctgaaaagttggtacacatccattttccacagtgaacaaccagtaaacagtttggaaccaaggaccgtctcttttattgagaactgtcatggggaacatggagaaggcctttacctacagagccgcagcttaactctcccacagaaggcctctctgcggttccagacacctgcccctaccttagcaaatgagctaagccagagctccagtttccttggtctcaggcttgtcgccatcctcagcctgcgggccaccaatggtcccagccttatcgtggcctgtggacccctgatccttcattccagggt

SEQ ID NO: 32115 - DNA, 1443 bp, Mus musculus
cattacccaccctggagggtaccaggcaccaacaatctctttaggcatagaatgtttatctttagtaaagctgtcccctttgaattattcctgataggtcatggtgagaactactcaccgactgattcctaaatctttagaataattagtggaaatattgaaaactgaattaggagaaaagccacaagaaaaactactttgggtagctataatcgggtactatatcccaaatgaagtctctttccttggcttctttgcatagaacttgagcagcagagccagttgttcatattcaaaatgagtatcattatacaggtgtgacacatacactttaagaaaccaaacatcacgaggtccaaagctacctctatgggtattggcccctggaggcaacagagaatcagccacaaatgtatgttcctttcataggaaacaatcttggattacttctcccaccaaaatccaaatcagctaggaagaagtgaaactttcataagtgaaattagttttggttctctgggtgtggaactcattacagccccctcatccccatcacttcagaattgcttgtagtcaccttaatgggagcaaaatcccatgtagctgtatgaaacttaggagggtctggcaaatagggccagaaaggtatggcagaatccaccatagtgacagggagcgtgagcaaaaataaatacctcaactgttaacagagaaagtatgccatcaaaagatattctgtggtgttaatggaagattattatatgtcaccaaagccgtggtcccttacttcagctgtccgcaggtaggtatctgtcccatctgtgtggagtctgtgactggaatatactcatgctcaggtctagcaaggtgcaattgttaaggtgactgagccaggaaatgacctgtaaattgagctaatgctgctgattggggcaccatgttactccttgagggatgatgctgtttgtgattgctccttctcttgggagctaggtagagtggatgatttggcatgccagatgagtccatctggaacccagatgggattctgcatctttaggaaaaataaaagcatagcctggtctggacgtcaaaaggacattcaggcctttctgttgtggtgtcagcaaatccttctacattaccaaagggtttatgtctggttttaaaaaccacactaactctggctaggctcggccccacagctagctaacgctttccagagagtgccacctattgctcctgctgactttgttaagctactgaacaactgtccctcctgagaacacctggaactactgctcatgtcccactgatgaccaccctggcagctggttctgccgaccgccaataaaccatccttccactgtgtcctttttcctacccccttttagccccgaaagaaaagaaaacactcgaaacttttatattttaaaactgacc

SEQ ID NO: 32116 - DNA, 1118 bp, Mus musculus
tagccagcgccatcttataatggctattgcttgtggcacggctctccacacgggatcatttcaatcttctcttgtacctgttgaggcatgttttgtgactgattatatggtcagtttcagagcaggtaccatgaggtgctgagaagaaggtatatccttttgtcttaggataaaatgttctatagctatctgttcaatccatttctttcctaacttctgtaagtttcattgtgtctttgtttagttttgtttccatgatccatccattgttgaaagtagagttttgaagtctcccactattattgtgtgcagtacaaggtgtgcttgaggctttagtaaagtttcttttatgaatgtggatgcccttgaatttggagcataggtgttcagaatttagagttcatcttggtagattttacctttgatgcatatgaagtgtccctctcatcttttttgataactttagtttgaaagtcgattttattcgatattggaacagctattccagcttgtttcttgggaccatttgattggaaaattgttttccagccttttactctgagttagtgtctgtttttgtccctgaggttggtttcctgtatgcagcaaaatattgggttctgtttatgtatcctgtctgttagtcttatgtctttttattggggaattgagtccagtgatattaagagatattaaggaaaagttattgttccttactgttatatttattattagagttggaattctgctcttgtggctatctttttaggtttgttgaaagattactttcttgctttttctacgatgttgtttccctccttgtgttggtgtttacccgttattatcctttgaaatgctggattcgtggaaagatactgtgtgaatttggttttgtcatggaatactttggtttctccatctatggtaattgagcgttttgctgggtatagtagcctgggttggcatttgtgttctcttagggtctgtatgacatctacccaggatcttctggctttcatagtctctggcaagaagttggtgtaattctgataggtctgcatttatatgttacttgacctttttcccttatggcttttattctttctttgtgttgtgcg

SEQ ID NO: 32117 - DNA, 1174 bp, Mus musculus
ggtatgctaccctttttattagttcctgatcgcgaccattggtcagggttatatctttgttcttcatattttgctgcctcctcctctaattcagcctcctcactggggtctagatcttcggaccctgaactatcaatctctaaggcctccaagtcatggataggataaaaattagtataaggctttttcttagtagagggctcagtttcactgcccttctttctttctccccttccttctgaatcccagggagggccctttttcttagacatgtctttcttttttcgagctcccattatcttgctctgttcggtttctgacatactgtcctgaacctcttctagtgttccctgtccctccacaatggcgggtcggcaggtttcatcctctagacagttttttatctgcttccaaattgccttggtgcccaggcgtaagtctccctcttcatgctacggtcaagatcccttcctagcttattccatgaggatacagttagagaccccgaacaggcataccagggagcaacgtgatccacctccttaacaaagttctgcagtgtacgggaggcgacctgcaggtcgcgttgctttagcactgcctgtaacacggtgatcactgactgtgaggagcctatgatagagtgagtgcctgcggctgatctatgcctgacttatggtattccttaagcaaagcgaaaataaacacggtgctccgctcccttatctaggagcttacaagatacctcggtgctgacgcttatctacgtcggactgaccacacctcaaatttcagcaccagcctcgatggacagaataagaagcaataagaaacagaatgagggccagggcaaccaagactagagcttctaccaccccttcctagggtgcatccagattaagaccaaaatcaaaagggataagaggttcacgatcagacatacctctccgaacttaccttttccctgcagttctgaatccaccccatctccgggggttctcctcaatgccagcaatgttgatcccgggtttccagcaccagatgacccgtgctaccatcttgccagcaagtacacacgcaggacactcggatccttcttcagtaaagctttaatacatctcgagagatagatgatcagcttcaggagaggagacccagagagcagaaaaccctt

SEQ ID NO: 32118 - DNA, 1210 bp, Mus musculus
gtagcctgttcatatatcaactgttcaattaaaggcatagctgcttctgtatctccaaatattctccctgctgcctctgtcattctagccgcaaaatctgagaacgactcctgggcgccctgagtgatcttggtcaaatgcctacttgcctctcccttcttagagagtgccttccatgccttaacagcggcagctgagatctgggcgtacgctccccaatgataatctgtttggttagcagcatgctgtccctgacctgtaagcaattcaaacgtccatgtcctttggtccccttccatggtggcattggcccttgcctgcgtctggcaggagtcctgccacaaggctttccattcaagatacattcccatactgggggctgcagcttttactacagtctgccaatcaccaggagtcatagtgtgagtcgcaagcctttcaacttgtgctacagtgaaattagcgctgactccataattacggactgcttctgcaagctccttaatctgtatatactctactggaatgtgaacatgccctccctcagctctttcaaaaactggaaatgcctgttgcattttcctctgttcctcttttggaataaatgagtctgaatgatacctctgcacataaggcggaggtgcactagaaccctgaagttgcggatccaaagaccggacaacgatttgacatttgtctctagctgctttcatgttattctgagactgattaactcgtctttcatctgactggtatctttcttcctcatagcctgttgcttccttctctaagtctgtttcctcagaggagctaagctctttatccgattctgagctactgacagctagctgcttaaacttatctagtggcgggtagaggctcctttccttatgcgcctctccagctcgttctcccttcttctctccctttccatccctttttctaatctctcccaaggcattctttcctttatatctcttttcctcaggctcaaggcccgtggaaaggtctaaattcttcagtgaactttgtttcctctctacttttactctctctccacgctctgcctctgatagactttcttgaatttcgtccaaaactttctgccccgcttctaccatttgctgacaatcctcatctgttaagcacgatttcaccaatttccacaacggcatgatccctgctttaagtttgccgttctgctgttccc

SEQ ID NO: 32119 - DNA, 1199 bp, Mus musculus
agtttgcaagaccaaggggcctctcttcccagtgatgtccgactaggccatcttctgctacatatgcagctagagacacaagctctggggtactggttagttcatattgttgttccacccatagggttgcagaccccttcagctccttgggtcctttctctagctcctccattgggggtcctatattccatccaatggttgactgtgagcatccacttctgtatttgccaggcactggcatagcctcacaagagacagcaatatcagggtcccttcagcaaaatcttgctggcataggcaatggtgtctgcgtttggtggctgattaggatttctatccccagaggtgtctccctttgggttttctttattgtttctacttccatttttagatcttggatggttttgttcaattccatcacctgtttggttgtgttttcctgtaattctttaaggacttgtacctgtttagcagtattctcctgtatttccttaagtgagttattaatgtccttcttaaaatcctctaccatgagatatgattttaaatctgagtcttgcttttcaggtgtgttggggtatccagaacttgctgtggtgggcgtactgggttctgatgatagccagtggtcttggtttctattagtaagattgttacatttgccttttgccatctggtaatctctggtgttagatgttctagatgtctctggctggagcttgttcctcctgtgattctgttagcctctgtcagcagtcctgggagtccaactctctcctgagtctcagtggtcagagcactctctgcaggcaagctctcctcttgcagggaaggtgcacagaagtctgcagctcagatccacctcatgagtcctggggtcagagccctccctggaggccgactctcctctggcaaggaaggtgcccaggggtctgggtctcagctctgccttctggctggggatgaaggcccaaagggaccctgttcaagaagctctgttgcttctgccacccacgtgctctcctgcgtagactgatctcagtgatccctaaattccgggtgtgctagggtgtgccccctttgcactgaggatggcatgaagctggagccaccagaaggaatgccagcctctggttgggtggggttccttggtccctgttcctgctggcacaggaccctccggtgtacgcaggcgcaag

SEQ ID NO: 32120 - DNA, 1099 bp, Mus musculus
ggattttcagggttcagattagtgtattgcaataaagcctttgcaaggcgttataaaaatcaagatggcttttcctgtttgtcctggatatccacttggagtttttcaaaaatttactggttttaaggctgccctacagagaccgctgaggaggcagattatgaatctatctctggctaaaataccacctgtggaattataattccattgaggatcttggtgtactgcctcagatccgcttggatatgctctgtctgtttgatgattttcatctgcatgtgttcttgcctgctcccaaactcgcctttgatcttcaggaagtaaattgttagtaagcattatatgtgcatagtggaaagtcaagctttaagattcagtggtatactgaaactgtttaataaaggtggaggagttagaggtctgctttctgtttgagaaaattcactcagcaagacaggaacattcactgagaaaggaacatgtactctgacaaggtcatctaccccagcaacttacctaaaaggaaggactgatgctgggtcaggtgtcccagggggagaaggacttaggggtttgactgtggccttagagcacatgataggaggggtaaaggtcggtgccaaagcagggcgatcaatgtgacctgcagctggcacaggaggaggggaagggtctggataggttgagcagggaggctgtggggtaacctggtgaggagaaactgaggcatcagtttaggttttcagaagcatggaaataggtctgcggcagaaaggaggaggttcgttagctggatcgaggtttgtagtgtcatctgatggaggtttcatggctaagagaagttggtttggggaacaagaagaacacagggaggagttggagtgaagataggtaaacacttgggcatagggaacctcttttcatttaccagatcactggcagtaagtgtgaagatcccgtaaagtgattggatctaacatgctattaagtggccatttggagccactgtgtaatgggtgctgaatccagatcttattgcataggtgtattagctttgatgccctcaagttgggcattaacttcagagagttgagatttt

SEQ ID NO: 32121 - DNA, 2043 bp, Mus musculus
gcccaatcaaggtgaagttcctatgacagcttgacaagagtgacttttaaagagcggttggttctttctaccttacctgaagattgagggtggtacggaatatgaaaatgccaggggatgtctagggccttagacatattttgaaaaatttggggagtaaattcaggacgattttctgaccggagaaaggctgggacactaagtcaggaggaggagatcagagactgtgtgagcccttttgttgtggaaaatgcctctacccaccccaagaaggtgtccaccaagaccaggagttacttggcatgtttgacagtgggcatgtgggtaaagccaagttgccagtcagttcctggaagggaacttctagcctgatgggtaggaaaaggggtgccacaatactttgagttgaagtctgacatctgacagatttttcaagaagcagtgatatatttaacaaaacttaagtcttcaggagtaggctgtaggtggttcttgacaaaataagacaatgcttggctgttaggatgaaagagttggtgaagatatgagtttggtgaatgtcagacggtgaaggtggggatgtggattgcagtataaagatgtcctggagagggtgagaggcccctaagggctgcagctctagctgtctcatcgggcttggttgtttcccttggaaacaatagttttatctgtctggtgggatctgcagtggacagtcccaatagctgtagggagatgggaggcctttagcatggccataattttgttcgcattaattattgatcctcccttagtcataaataacacatgctccttccaggtagctgtgtggggcaggaagatatggaaagcatatttggaatctgtgtagatgttgagggattgtccctgtgccagatggaaggcacaggttagggctattagttcatcctgttgattggtggtatgagcaggaagggcttgtacctccacctcctctggctatagccagcttatctggccccttcatgtagaaaggagcttccatctgtatatgaggtttagatgccctgaggcagtgtgccttcctatgtgcaaaggatgtgcttatagttctcctaaaggttcagtgcaggagtgagatagggactggttagtgtttggtctcggaagaagattggaaatattaagaggtgggcatgattggaaggtgagcgtggagtcttctactagtgctacctgaagagaaaaaaaccctggagggaggtagagtctgtaaccctttgcaagttaggagctgtgacaggtatgagaagagaagacagttataggagacccaaagggtagatttttttttttttttacttttgaataaggagttcagtgtctgataaggtatgaatccagggtgctcattcctgaatagttagatctaggttatttgacaggtatactaaaggtgcaaaagagttgctgacttgggaatccaagggcaaatctctcttttttcagttatgtagagggaaaaaggacaagtcaggtcggggaaatgtaaagctggagccctaaggagagcctgtgggagtccttgaaatgtaacaggtttgagaagagattcgtgggtggggcctaacgctgcttcatacaaggagcaagaaaggagggaaaaggaaggaacccaggaaaaaaatctagttattcctaggaataataaaacctccctttgcagaaagaacagttagagactaaatgtaattctttctatctaaggtaataatcttgtgagttgggtaattgttagtcccaaataggtgacctgtggagtggacagttggagtttagaagatgagaccctgctgggcgtggtggtgcacgcctttaatcccagcgctcggcaggcagaggcaggcggatttctgaattccaggacagccagggctatacagagaaaccctgtctcgaaaaaccagaaagaaaagagagagagagagagagagagagagagagagagagagagagagagagagagagagagagagagagagagagagagagagagagaga

SEQ ID NO: 32122 - DNA, 1140 bp, Mus musculus
ccaacccctgtccccggcactgcagcctggtgactgaccaacccctgtccctggcactgcagcctggtgactgaccaacccctgtccccggcactgcagcctggtgactgaccaacccctgtccctggcactgcagcctggtgattgaccaacccctgtccccggcactgcatcctgatgaccaacccctgtccccggcactgcagcctggtgaccaacccctctccccggcactgcagcctggtgactgaccaacccctgtccctggcactgcagcctggtgactgaccaacccctgtccccggcactgcagcctggtgactgaccaacccctgtccccagcactgcagcctggtgacccaacccctatgtgggtctcccaaatgaactgaaaccaaaagcaaaagtgggtagctcactggggtgagcagaaagatgcaaagtatacagtaaagaagtccacacccttatccttgatataacataaaacactaataaggggccaacttactgaacaatccatcaaagagggcaaagcagtagtgccatgagaagaagagattagggcacagtccttgtggcaacaggcaaatgaatctcccaaaatggaggttcactagtagccaaaaaatgaggatgttagtataggctgtagactacattgggcagcagatgttgcttggcgccatgcatggcctgcctacctcccaactgtactcatccctaggggttggggatgaggtggcacagaatcaatggcttgcctctgggagcaggtgagaatgcagggcagcaagttcatctgcgaattctcggggagcaccctttatattctcctctctcgtcacattggtccccaacaagtgtgccctccaagtggcagttctccattggctgtcattatctgcatcaccaatctctaggctctcagcaggtttcagtttgtcccgcatgggaaattgcctctgcggctgtgcagcctcactccctgttactgacatttatgtggaagaggccattacttcttcagtgaggcctgctgctgttccttctacacttttgtaaatcaaccattcagtagctctctccctgtctctgtctgtctgtctgtctgtctgtctgtctgtctgtctgtctctc

SEQ ID NO: 32123 - DNA, 1064 bp, Mus musculus
tgcatctataactcctgctctcttttctaggttttttcatctccagggctgtatccctttgtgttttccttaatgtttctatttcaacttttagatcctggatggttttgttcaattccttcacctgtttgattgtgttttcctgtatttaagagatttatgtgtttcctgtttaagggcttctacttgtttaactgtgttcacatgtatttctttaaggaaattatttgtgttcttttaaaagttctctgtcatcttcatgagatgagaatttagatctgaatattgcttttcaggtgtgtttggggtatcaaaggcttgctattgtgtagggtactgatgttgccaagtagtattagtttttgttgcttatgttcttgcacttgcctttcaccatctggttatcttttgtgttaactggccttgctgtctctggctggagcttctcccacctctgagcctggttatgttgggcctccttgggtcagactgtctctgggtgtgtgtgtggggaaggtgggtgctagagcacagggtctgccccctggtgtagatgagaacctgaaggaaggtttgtctcccgccttaggggatcccagttaggtcaggtattggggcaggggttgaggactctcctgtgagcaggggtggtgtgtgggggggtgggggggtgtcagaactcctggggtcaagctgtcctctgggtgggggcagggtgctgggtgggtgttgaagcataggatctatgtttggacacaggtgtgaactggcctgtttccatgttttctatcttaaaagaatgccttgcaaacacaatattttcctgtatttctttaagggatttatttgtttcctcttaaagggcttttacctgttttcctgtgttgtcctttatttctttaaggaggttatttatatcctcctttaaagacctctatcatcttcatgagatcgtattttaaatcatctatttagctgtattaggctttccagggcctgatttggtagaactgaactctgatggtgccaaatcacattggttttggttgcttatgttcttgtgc

SEQ ID NO: 32124 - DNA, 1139 bp, Mus musculus
gaaagcaatagagactgaaacctggtttctctctaactaaagtttaggtgtgggtctctccaactactctcattacctatgtatttgaagaccactttaatacacaaagactctagtaagtgttattttatgtatctgaaggtgattgtgacttgcaaaggcttcatcatattccatgcattcataggggttctctccagtgtgaattctttcatccccttgcctgtgatatacaaatgctttaccatgttggacatactcagagagtttctctgcggtatgactttttttatgcctgtgtatatacgtgacacacatgcaaggtttagcccatttattatactaatgcatctttttatctgtatgaattaattttacagtgttttctaaatgtaatgaggaatcagatattataaggaatcagatattataaggttgtatcactttgtttatatctatggtgttctctttcattatgggttgctttacatcttttaacagtgcctgtgataagagagtttattacatggattgtttttgatttgcatttccctgatgactaaggatgttgaacatttctctaagtgcttttcagactcctctgttggaactcctgagttgagaattctgtttaactctgtactccgctttttaatagggttatttgtttctctggagtctaactttgtgagttctttgtttattttggattttagccctctactgaatgtagggttggtaaagatcttttcccaatctggagattacagttttgtctattgacagtgtcctttgccttacagaagcttttcaattttatgaagtcccatatgttgattgttgatcttagagcataagctattggtattctgctcaggaaaatttcccctgtgttcaaggctctttcccactttctcttctattagattaagtatatctggttttatgtggaggtccttgatccacttggacttgaggtttgtacaaggagataagaatggatcaatttgcattcttctatatgctaaccaccagttgagccagcaccatttgttgaaaataatgtcttttttccactggatggttttagcttctttgtcaaagattaagtgaccctaattgtgtgggttcatttctga

SEQ ID NO: 32125 - DNA, 1177 bp, Mus musculus
tgtgtgtgtgggggggggggggctcaagacactacatagtaaagaagttctcagacaatctatgcctgagaaccccatgtctgccctgctttccaggatataggagcataggattccagctcttaacctgaagggttaggagattatatcagttggaactgcaaggccaggttcagctcaaggaaactgtcaagtcagggtctggtctatctgttttccatttagttgaagtccaagattcacaaacccaatatgcacaatggaattgcctgttgttattatatagcatattgatacctccctgcagggcagagatagtaagtaggtagtgattcccaaggcccctgggtttatagtgacccagtttggtgatatacctaagtcttttccagtagtgggccatacataggtctgccaggtctgctgtaaaggttggggtggactgcccaaggggcagctctgttttccttccagtttgagcacttgagagatgccataaacaggactggagcccataagggtttgattgtgtcagagcaccccagggaaaaacaactagtagaatagagttgaccttaaaaagccaaaaaggcttgatgatctgctgtcttacctttgctggatcctctggatggagtttgttccatggtctctggtctggatcatctgactgtccatctggaactggcttgatgtgtgaatgatgtctgatctgatcctgtcaaccttaacagcagttggtgtggtcaggatgacggtgtggcatcctttccaacatgggcccagagtctccttgtgatgccttcagaaaccagaccagatctcttgcttgtggccatgtggctttgcaggtggaagttggtagatgttctggaggatggggaaaacaatgtcttgggtggtctggagggcctgaagtgatttaacttatttatattcagacattaagaacttcagcctctggtttaggggaaagaatcagcaacctcccaaacataatttcacagggggtaaggccatgccataggtgtaggggatgttctgaatgtgcaacaatgcaaagggcaggctgactgtccagtcctcaccagtctcaagggttaatttaatttaggtctccttaagggccctttttatcctttctacctaccctgaactcaggtgatagtatgcacaa

SEQ ID NO: 32126 - DNA, 1396 bp, Mus musculus
tatactctttaataccttgtttattcttgttgctgtgcacagacttatatattacaactgtgtcaaaatgtgtattcaagatagctgttctagtatttcctgtgtaattacggtaaaatactttgaagtttccctatgttccttgtaatagtcgcctgataataaagtttagtatgtaatatcaccaccataagcatactatgtacccagtgaaaattggaaaataagtaaaattgaacagaaaactttgcccacactccccatacccaacaactgttaagatcttcatctgtgtccttcatttcatgtcattgcacaaatttgtgattaaaacagtgttaaatagatttgcataatgcctaaaacaaacagaaatgtgggaaacaattaaaaatagtgtttttttggggggggggttcatggttaaatgttttgtttaagatttcttgaataatcttcagtgtttgggtaacaaactttacgtatgtactctgcatcacaaatataaggcatactcaaagaaaactgggaaactgaagtgaagtcgagaaaaactgtatttccaacaaacttctggtaacgcctggatctgtgccccactggtgtgattgtgaggttttccatgacaagtgcgtagtgtcaacagcaggaagaaatgtggaaaggtgtggaatggcagggcagttgtggcggaattacagtgagctgtattttctcagtttctttgagggttctttgtcatagtgttctagcaggctgcccgtattgcttatatatgcagtacgtgaccattctagtagccttgaagatgtgcaaatgtagaagagaaactcacccatattgtcattacccaaagactgtgttaacatctccatttgttttctttgtcttgtttctgtgcacaggcttttggtttgttaatatggctgtagttggtctatcttgtaatagtgtcatcaataaaaataaagttaaaaataagataattctcagtctcttcctttgtcctgtttatgtgtttggggttggtaactttgcagggacttgtcactgttgataaaattatacatccaaaatgttagtggccccttagccatacaaatttttgatcttcaaatcatattcttaattaaaaaaataagcctttgtgtgtatgtacacgtgtgaatggatatttgtgtgtgagtacagacatagactctcatgtcccagtgtgtgtgtgaaggtcaaataacagcctcaggtgtcagccccaccttcccatcattcgagagaaggcccttttcagttcactatgtaccccccaggatagatgtcttgcaagttaagatttctataagagtgttaagattacagaagcatgcaacagctgcaggctttatgtgggctctgagat

SEQ ID NO: 32127 - DNA, 2318 bp, Mus musculus
ggtgcggagcaggcagacgacaagtacttcaaatgtgatgtgtgcgggcaactcttcaacgaccgcctctcccttgccagacaccagaattctcacactggttgagtaaccaggctgaagaaaagaagagcaaagccaaaccttcttcccagaaccagacccttaataaatcacaaagagagcctaaaccaacccataatgtctataagaaattcaccttcctgtatacataccggacttcacatcaaagactttcactctcatcacagactgaaaaaagaaaagacattgaacgcagggactctttcagttttagctgttccctatggaacatcagtgtatatttgggaaagctagagtgaacatctacatcttccatttcatctaagtaactagattgagggaaaacctagtgacaattccagaccacagaggttgccccagtcgactgtaaatgatacccctttcataccctatacataatgattcctgccatgtatataaatgagcaaatcagtgatacatatatttggatttagtgtgctatagaatttacagtttactctacagagctacctagcctggtactctgattttttccctgaggaggaagagagcaacaatttagcatatatttgtaagtattgtccatgcagaagcttttctgtgcatcatttgaaccccattagtatcctttccagtaatggagtgttctgtcccctacctcttagatagtcctgtgaaggtgtgggtgtgaaagatcgtgtgtctttgaatcctggctgtgtggaaacaggcattttagcttctacagccatttggtgtgcacccagaccccttgagactgattgtgtaaccctttacaatatatggatttgtctctgtgacccaaatcaacccatccctacatttatataccttacagtggttttcttgcaaaaaaaaaaaatgttacatttgaggtgttctttaaggtttgggtttttgttttctaaccaactcatcgtgtgtttgatagtgaattcatgaaacctgaagcttttccctgtaaatcttaatgtctttgcctttaaagagtgggtgacaaccatcgctagatcacagtagtgcctaatgaaaggttgggaaccacaggagaggctcttacattgtaaataaggaagcaaactgacaacctttcattagctgctgtgtgcttcctgccttaagtgacaagtggcagcgtcgcttgagtcacctgtgtggtgttgtattgtgcttgccacaagtcagtgtgctccctgggtgcccaggagctagaatccttagatctttgtgtctccagacttaattcccctgttctctatgtgtctgtcaaccccaagtctatcgcattttaagaaaagcaaacacacacacacacatacacacacacacacaaagctttctttatagttaatcctagcttacttaacatggactcaggttccccagcagccttaagtttttttgttaccatcgttctttctcatggagtctccttagtatttctgagctttccatttagtgtgccatctgtctccatgtcacctgatgtcacaaactgacttcccagcttgagattttctgcgtccgatacacggactgcgtgcgctcctttacttcccctcccctcatggctatagaaagacaattttttggccttcagttggctggggaaaaaaaaatttaaaaatttaaaaaattaaaaaaaataaagcggatctgtagccgaaagatcgcaagataagtacagatcatctgagaacgtgaacagagtttacctgctggagaaagcggtctgactctcagacttctagatctgtagatccggggctcatgagggagtgtgccagagcctcagtgaatgccaaagtcttcagaggttggagacctaaaggcaagaaatagaaatgagtgagccaaagaagggagttccaagatgacagcagatctaggaaggagaccagacagactaaagaagataccagcagcagggattggaaggtcagggtggtaaaaacaaattagaaagaagtgtcctggagagttggaagaaaggccttttggatggcttcgtgtaggtgaagaccagctgcatagagagagccccaggttggaactgacatccagagaaacagaggggcaatgattcactggtgaggctcccttgaaatggaagtcagtgtcatagccatctgggtaaatgtggggactcggtatcagtgacagacagtgtcacccccactagacccttttcagaaagtgactcatcaagaagtctgagttgagtgtccatt

SEQ ID NO: 32128 - DNA, 1160 bp, Mus musculus
aggacaatggatttgcactgtcttttgagagaggaagagaaggaggagaatcttatagttaacagaccttagaagagaggttggagccagaggcagggccttcatttcctttgcaattaagcatctaagtcctgggaaacatagctgtggccaaggcagacaggatccctgctctgagatgcttttgtcagtggcccatgtaaatattcatataaacactctgtatgtctgatgaatgttctgaacattctcaaagaaacagaacactaggaaaaattacagcatggagtctcaatgtggatcaaagaaaatgccttcagggcagcatttgacctctgagggttggggaggaatggtccaggcctgaggttggaggggatcccagcctttagtgtgagcataggcaaaggctttctacgtggaagccagacatctagcaaaccaaggaagagccagggagatggctgaggcacacagagctggattggtgatgtgaacttcacctagttttgttgctcacagtctcttccttgacagtgtgtcatgggttgctgacctaggaccttgtctgcctaatgcaaacatcgagctgctgttgatcccactgactcagaggagaaacaggggcactggatggtacaaattatactttgaggctgtgcaaaacagaaagttctcttgctatctctttaatcacatgcaaatccctaatggttccagtgcatagctcactgtgtgaaaacatgaactgtgccatgttggcatgactctcaggccacccctgccactcaaacttgtttacaactcatgtacacttaggtaccatagttgacggcaaacatagagccagcaactgctttaaggctacttaaatttactcatctttatacaaatgcaccattttgttttacagaagcaatgttgttcagactttatgcaaaagagacagacaaattaatattaaaactaatccatctgccactgctctcgggctctgtgtaccccagggatggtgacactttgcctcttacactgccaaagtcttaagtattttgctctctataccagtctccacactgtgagctctggtttcctgtattatcttagggacatctgggtaccctctggctctgttttttattgttagtagatgccaaggc

SEQ ID NO: 32129 - DNA, 1197 bp, Mus musculus
ttaagtaagcctgttatcttactatattgttcattatattatgctttttgtggttttggttttggttttggttttttgagatggggcttctctgtctgccttgactgtccgagaacttgcttcatagaccaggttggcctcaagagtttgagatctgcctgcctttgcctagtgagtattaaaggtgtgtgccaccacctactggcttactatctcttttgttacagcagaaagatcagactaatacagatgacttatttgcgttttgtttgttttgttttgtttttgaggcagatttttctcatgtagacaggctgtctttctcagcgtttctcaattgctgagattacagattagtgccaccctacctaatatgacatgtttcacttaaaatgtttgcctctattgtctgtatatatcaaacaagtattattttctttaaataaaaaagtcaatacagctaagtatagtgattatacgcctttgatcccagcactccggaggcagagacacttggatctcttgtgagtttaaggccagtctgatctacagactgagttccaggacagccagagttatatggtaagaccctctcttgaaaaaaaaaaaaaaaaactacatccttaaagttctgtctgacgtatgtacacacttgtcaaagtgtgtgtgtgtgtctgagctcagagaacacgttccaggagctggttctctctcctaccacatgagtcatcggaatcactctggtcctcagtttggcagcaggagctttgaacttacggagcaggcttgccaaccaagcattagtttctaatggagtgtttgatacggcacagaaaccgtttttagttggttggagcaatttcattccaaggtatggaccagatcctgcaagactgagggtctttatcgtgttttgccaaaacccccaagtatgctttgttgttctccctgaagggtatcctgtccccagcctggagctgctgcgccagcgggagcaagtgcaggagccatggacagtgagtggtcaagtccccctgcggaagcacctgcgtaggtaagagtctggaccaatggaaggaagggcttggaggtttggaccaggcatctcctggaaagcctcttttttttttctaaagatttatatttatttatatgtctgtgagtatatgccacacctgggtagtactgaccagagcg

SEQ ID NO: 32130 - DNA, 1246 bp, Mus musculus
cctagaggccttatgcctaatcatatttggcaaatggatataacccattatgcagaatttggaaaactaaaatatatacatgtttgcattgatacttgttcaggatttctttttgcttctctgcatacaggagaagcttcaaaaaacgtaattgaccattgcctacaagcatttaatgccatgggattgcctaaacttattaagacagacaatgggccatcttattccagtaaaaactttatttcattctgtaaagaattcggtattaaacataaaactggaattccttacaaccccatgggacaaggaatagttgaacgtgctcatcgcaccttaaagaattggctttttaaaacaaaagaggggcagctatatcccccaaggtcaccaaaggcccaccttgccttcaccttatttgtcctaaatttcttgcacaccgatatcaagggccagtctgcagcggatcgccactggcatccagttacttctaattcttatgcattggtaaaatggaaggaccccctgactaatgaatggaagggtccagatccagttctaatttggggtaggggctcagtttgtgttttttcacgagatgaagatggagcgcggtggctgccagagaggttaattcgtcagatgaacacagattctgactcttctggtaagtatcattctaaagactaaaattccttttgtgcttagaattcagctgagagcgaaagctcccaaagctgttttccagctactctctgagccagctcccgacaggaggccggagactagcctcagctttacaatttgcatttgaataaagtacctagacttcccggaaagaagttctgctttcctactttctcactgttgagattttgtctttcaagcaggtaaatcaacattctcgaagcggaccagcggatgtgcatccccgcccccctagagcacacaggtggctgctgttatctcctttccaaggacatttccagcacgtggctttcagtctgagttaaaaattaggtttaccaagagggctagaagagtagatatttctatattaataaagattggtttttattttgatagacaggcttagtcccttagctgacctctggcttttcacccttgctgttactgcaaggtgtccttaggctgtggaaaaaaacagggatgaggaggaacgacttccagctcctattttagccacaagtcgtggtgttactaatgacataattcttgcctaggtctt

SEQ ID NO: 32131 - DNA, 1199 bp, Mus musculus
ccctgacatggaggttacagattgaccctctgaggtttaagccccaataaactccttgttatcataagttgccttggtcatggtgtctcttcacagtaatagaaaagtaattaagccactatgtcaacttaactcatgttgctgagtgatgagcacagtagtcggagggaacatgaaactggctatcaatagaataggttcacagcctggtatactctgaggtagaaagctaagtgggaatgacttaagggtaccaggaatccctgacaaggaggattcatataaattcaactttctccattattcaggactgtttatcctttgaggatgtggctgtggacttctcctgggaggaatggacactgcttgatgactctcaaaggatgctgcaccagactttgatgtcagaaatatgaacactcatgtctttacttgtaagaccctgtcctgccatcatttcagagcatgtctaggctttcctttgttttttggtttttggtttttgtttttgtttttttttgtttttgtttttttggagggggggattgtgtttttttgtttttgtttgtttgtttgtttgtttgtttgttttttagagagagctgtatctttctcaaagctggcctgtgaatactaaatctttcccccacagtcttagagtataaaatacaggttaggaaccaagtcaagtttcacaacagctctgtttctctcaattgcagcaaaggcacacaggaatcaatttggggttaggaatttttggggtgtagtttgagacatcagtctatctttacaatcctagctgtgctggatgtgctatgtagacctggctgtcctctgacttgccaaggtcttcttgctctgtctattgagtattgtaattaatggacttcacaaacacatctggcctggtgtcaggagtcttgacactgacagctaccctgtgacctgatgacactctaaatatttgggatctttgtgactcaagtacttctggtgacatgccttatgtttgaatgtaactggaatttggcactggtaagttcattttattattttattttattttattttattttactttattttatatttttgcaaggcacccttaacagaattactctcactaggctttattcttatctactgtatggtgtacataacttaatacaaaactgtcattttttctatcatgtcct

SEQ ID NO: 32132 - DNA, 1215 bp, Mus musculus
ttaaattaaatggttaaactatgaaataatgcaagtggtaaataaatttgacctgaattttaactaaacttaaaaatttaaattatcccccagtcactgagcccgccgccgaggactcagctgcctccccctcgagccccctcgcttcccgacgctccgtcccccccccccgcccccgcccgccttctcccgcagccgccttccgcaggccgtttccaccgaggaaaaggaatcttatcgtatgtccgctatccagaacctccactctttcgacccctttgctgatgcaagtaagggtgatgacctgcttcctgctggcactgaggattatatccatataagaattcaacagagaaacggcaggaagacccttactactgtccaagggatcgctgatgattacgataaaaagaaactagtgaaggcgttgaaaaagaaatttgcctgcaatggtactgtaattgagcatccagaatatggagaagtaattcagctacagggtgaccagcgcgagaacatatgccagttcctgatagagactgggctggctaaggacgatcagctgaaggctcatgggatttaagagcttgtggctctctgaagcttaagtgaggatttccttgcaatgagtagaatttcccttctgtcccttgtcacaagtttaaaaccctcacagcttgtagaatgtaatcatttggggtccgcttttaacttggactagtgtaactccttcatgcaataaactgaaaagagccaaaaaaaaaattaaattatcttcagagaaacacattaaacattgaaacacagtccttatcgataaccagagtgtagtatctaaataccaatgcttaaaatgaggttacggagatcttcaggaaaataatgtgaaaaatagtactacatattatcaataccaattattgagtaacaatgcaagattattcaaatgcatttgattcatttgaaaagtacatataatggagagaaaatgttcaacccaaatcactgtgagaatcacagagaacatgtttattcttgtgagctgttctcaaaagacaatgtttattgtggactctacagaggagttgatgcctccagagtttagtcaccattgaaattagacttttaaggtgctattgacattatcctttgccttacagaagatttgcaattttatgaggtcccatttgtcaattcttgatcttagagcctagg

SEQ ID NO: 32133 - DNA, 1153 bp, Mus musculus
ctagaggaatgagctagtcaataatccagtgtccctgtgctagcaggttgaggttaggtgtctgcaatccacgtgctcgtgcataagaagaacatgtcttcccttacaggtccatgtttcaatgcaaggacaagaagccctcttttctgaaaacatgccattaaaagaagtcatcaagcttttgaaacaacagcaatctgcaacaaggccaacaccagataatgagcagatgccagtagacaccacacaagatagattattggccacaggttagttggtaacctagataaaagagtcatgttttgacggggtccattttgggtacattttcatagattgtcttctttccaaaggacaagaaaacagtgaaaatgaatgcaacacctcttgtaatgctactgaaggaaatgttggtgaaagatgtggtggaaatgaaatggactcccttcttattatccagaaagaacagcaccctgagcatgaagaggggaatgttgtttgtcgattccctcatggtgccagaagagcaagtcaaggcaactctagtcatcatgtagacttccggagtgctctgactcctgcggatgtccccatggaggaacaaccaaaggatttatccagagaaaacatctctgaggacaagaacaattgctataacacttccaggaatgcagctactcaagtatatagcagtgataatattcccaggaaaaaaacagactccctttccattaacaagagaatatatcatcctgagcctgaggtgggagatattccttatggagttcctcatgattctacaagagcaagtcaaggaacatctacatgcctgcaagagtcacttggggaatgtttttctgaaaaagaccctagggaggtaccagggttggagtctaggcaagaggagcctatctctgatcctgtccttcttggtaagaatcatgaggcaaacttaccatgtgaaagtcatcataagagattccgtagagatgccaaactatacaagtgtgaagaatgttctaggatgttcaaacatgccaggagcctttcatcccaccagagaactcacctgaataagaagagtgaattgctttgtttcacctgtcagaaaatgttcaaacgagtctctgaccgccgaacccatgagatcata

SEQ ID NO: 32134 - DNA, 1195 bp, Mus musculus
actgatggccagccttagccttgcctgatgagagagcaggggtcaccagaggaatccttactcagatttgttgccaggtaattttcttgcctgaaagctattgctgccatagctctgcttgtcaaggatgctgataagctcacgctgggacagcaaataactgtagtggcatcccacactcttgaaagcattatctaaaagccccctgatggatggatgacgaccaacgctcctgtggcacatcagagctttttgttgactgaatgagtgaccttccacctactgacctcaatctcaccacactactgcctgagacttcacctactcatcactgcgctgacattctggcagaagaaactggtacttaaaatgatctaaaggatctaaaggatcagatcagccttggcctgagagttcgagctggtacactgatgacagtagcctcgaggttaaaggtaagcagaaggcagggacagcaatacggtggtggacagaaaccaagtaatctaggccagcagcctccctaaagggacatcagcccaaaaagctaaacttgtgactttaatacaaagagggctgttgacatctgcagaaaaggacccaagatgctgtggctaaaggaaatcagatggcaaatctaaccgccaaacatgtggcccaaagagcaatgatcctggcagtcaaagagcctaaagattattatgatgtcagagaaaccagctttagatacacccctgaacactatcaagttatggacattgcttgacccacctgggggccaagaaattaaaaggtgtggttaggtcctttgactactatgttacaggactctctgacttggcaaaagaaatagtcaaaagctgcaaggcctgtgctatgacgaggtagaatttacagaaattaagccagctagatatggcaacaagtacttattagtgtttatagacaccttttcaagatggatagaagcttttcctaccaggactgagacgaccaatgtgatagccaagaagatcctaaaagaaatcttcccaaggtaatgaacctgctttgttacccagataaatcagggactggccaaaatattagagattggttagaagttacattgtgcatacaggctccaaagctcaggacaggtagaaaagataaataaaattctaaaagagactggtgcagacttggtgctccttcc

SEQ ID NO: 32135 - DNA, 1191 bp, Mus musculus
gtctagcctctgaagaatagaaagaagccaagtccaactaagcatccatcacatctgtcagtggtcccgcctcccttcttgtacaatccagaggaatatttttatcaactattttgtaaatgagagttttttagtagctctagaaacatttttaaaaggtgagggaatcccacctcatcccattttttttttaatgtatttttttttttaaagaggttaaatcatttgctggctgtttattttttggtacaaccagaaaatagcaggatacagaatcaggagaggctgtgaccatctcggggggtcaccataacattccgtagatggggctagttttatatcctatgatacaaagcatactaaatggcaatttggcatctcattcatgtatttgtgtctggaatattttcagttatatctggttccgtgtttctagtagaaccattttgtaagaaagccagtccttggcccttgccctgtcagaactgtgatgtctgtggtcatggcagtccattttcctaacagttgtgataatgtgctgtgaaagatggaaatcctgagtctgttctgtgtgtggcgtaacattgtgaattggtgggactgaggattacaggcattggttgttatgagaggtcttaggggaacttagcgagtcactggaacaagttcaaagaaaaacaatacgtagcttttcatttgtgtacatgaacacaatgtgacttcagagtttggttacgtgaacacagtatatggctcttttggggtatgtgtgataagaattggaaggtctgtactctgctccctgaccaataaaatctgttgtgaaagagtaaaaaacaaactcacacacacacacacacacacacacacacacacacacacacacaaaaaacaggcaaggaggaggtgtgcgtgaataccaatcagaatggttaacattaaaaactcaaatgatagcacatactgactaggatgtggaaaaggggaacacttctccatagctggtgggattgcaaacggctacacccactctggaaatcaacctggctgatcctcagaaaattggaaatagttctacctaaagacccaattatactgctcttagacatatacccaaaaagacccaattatactgctcttagacatatacccaaaagatgctccacaatatcacaaggacaagtgctccac

SEQ ID NO: 32136 - DNA, 1208 bp, Mus musculus
ttaccatgaagtaactcttataacctgattctatgtatttgaaacattatttaatagaataaaattctgtaaaaaaaaaaaacacctatttaaaacacctagtgataaagctacatgataaataaaggaggctattaaaaaatgactgatattttaaaacagctgtcttgtcaatctacaataggtaaaaggacatggccatatgcaagaaaagagatataaccttgttcatgcaatatttggagggaacttatcacagaaggataaaaacagactacaacaagattggaaattgctggtgagaatgaaggggaaatatattgcaaagcatatttctaaaaatatgaatacacataccttccatagcactgagtctttggagtaccttctaaagatgtcatgtatagaagagattgagtaagagatgaaaaatgtgcacaccaggatgaggatagtttgggtgtctgtgtcttcaggtgagtacttttagaaagggcatgtcatacactgtgtggcaagaggacattatagttcattaggtgcacagagcctaatgctggcgtgaaagtcacacacttacccagcaagctgagtctgctaggacggcatcttctggacctgggtgctcagcagcaagaactgtgctctaatgtctatgagccccacatagttggggtttgggggtgggtttctggtttaaatcaagtctgaggcagtgaccagtggtctcatgtctatggagtgtgacctgtgaatgctaagatctcttgaatttgagtattggttcttttttttatagagtgtaaaccaagttttatattctgtaatgcaaacaggtacctatctgtttctgaataaaactgtttacattcatcaagaataaaatgctgagcaccatggatatgcttgacttttcccttgtgtctgtagagggcactcaccatggagatacttgagcaggccatgagacccagagacaagccaccagagaagctgagtggaaacatatacagtgcggttgccacatttctggaagtaaaccatgaacagtactcaaaactcatcatgttagttttatttttgttgtaactggatcctaacagtcttgctggagtatgtttagaagcaggtacacaagccatctgactaagcaggatgtacttggtggctctgtgcttaagcattatctacctggagttgctggggct

SEQ ID NO: 32137 - DNA, 1200 bp, Mus musculus
aaagaactggaaaggggcagggccctcatcttaaaaacacactttggtctgatgttatattctgtaaaccatcagatgtgagggaagactccatttctgcagtattttaataccacttatactctggtcatttgacattgcacaaagtgttgagttgccttaaatgtgatctattggcgctttcttgagccctccttgcctcagttgcttccctgtttgttcacacataattcttgccatctattctggccttttcataggtacgtgataacaggtttacttcagaatccttaagagcaaaagctgtttcttagttcaagtcatgtcttcatatgtggagtggcttgcaaagatcacagaatatgccgacttcagactgggtttcagcccgttagtgagttgtgaggtccagtcagtggatggccactgagattacagaacagcgaagtggaataaaagtagatcagaatgcatcctgtagtaaaggcaaatactgttctgtgaaccttctcagcggagcgtctgagagctgctaccacatcaaatgtatttgttaaggggtacaaacatacaggttgaagaaacgatccgagctgagagaaccaaatgtggcctacataggtgatcttgtggttttgctttgaacttcagattacaacattgtttctattgcctgaacacaaatgtaattgccctgcagatacaaaaaggatgtctttttctgtcagtgtctgagtaggcagtttgtgtaacccccaaatcagaggcttaccataataaagtatttatttcttcattcatattatgcctcattgttttgtgattgtgcagctgcttccttgaatgttggtgatgggacattttcttccctacagtgagcgagtctgggaaccagacaccatcccggctgtagctttctttctatgggagtcttggaacatgtggggaagcctattctcttttacctgggagaagacacaaatcacttccattcataaagcctcagagcaatggctcagcttggggccacatatcagacatcctgcatgtcagatatctacattatgattcataactaccaaattacagttagaaagtagcaatgacaattgtatgattgggaggtcaccacaacatgaagagtattaaagggtcattaggaaggttgagaaccactgccttagaaagcggatcagatgg

SEQ ID NO: 32138 - DNA, 1174 bp, Mus musculus
gtggttgaaacacaggtttaaaacaataatgttaggaagttgaagatagggacagaggatgacacgatggagccaggtagagctcttacctgacagctataaggaaagcaggcagtttacctaccctcagagataaagagatcataagaaaatgctaagtgctagtgggtggtctaaggatcctcagtgcagatgctggggcaaaaaggaatgaatactgccattgtaggtggtaggggtgaggctgtccctgtagctaggttattctattctttcatttattcttcacataggtcctaaatgaccccagatagatgggtatgagattccatattggccattagacatacataggatgccctttaataaagacatacatttcataaaaggcatagtgaacaaatactgaagccagagctgctgggcctatagtgacctgtctataaataaccctgctctcttagggataaggtttcaatgtgggagacaagcagtatgcagatataaagtagtatgaaagaagtgtgaggacatgtcgggactatggaccttgagggaccacttcagagttcagccctgtaaaaaatgagaaaggtgcctgtagggtaagctggggttaggtagggagacagctgtcgtcatggacagattttattttgaattccttgattatttttagaaggaaaagccccaagccgttcctttgaatggtcctgcagaggacaatggtatatactggatttgggtgggttttggagtttattttatgtgtggtagtgttttgccttcatgtatgtgctacgtgcatgcctgatgccctcagaggtcaaaggaatcatcagatgccctggacccatagttatagaggtgagccaccatgtaggtgcaggaaattgaatctgggtactcttgccagagcaacaagtgtccttaactactgagccatctctccagctctgagatctagtaggtttttgtttttatatttaatttttttattaggtattcttttcatttacatttcaaatgctatcccctttcctagtttcttctctgaaagtccccccaccctgctccccaacccacccactcctgcttcctggccctggcattcccctctactggggcatataatctttgcaagacacgagctctagggggtactggttagttc

SEQ ID NO: 32139 - DNA, 1153 bp, Mus musculus
cactgttattagggaactcctgaagagaggactgaaaggtagtcaatgtaggaaaggcttcagggatgattcagcctataccaaacacgtagcgcatacactgaaataaagcaccgtcagcgaggaaggcattttcctagagacactcatttacctttacatcaggatactgaaactggaaagaacctgtgaagtcattcagtaggtaaccagacatcttgaacagtatcaccttattgtatgcaagcaaatgtttattatagagtcaaagcttggaagtgttatttgggagtgacacttttgtcagtttgtactttcctgtttccataaaggcgtagtggtgggacgtcttacacagtgctctacaaactaccacaggctgtagctagggttttctgtttgaatgcacttctgttttatggtcccgccagaacacagatgacgcatttagtgaggtgaaactggatataggacttgcttgtgattgaaatgaagttgaccctcttaagactaaaatactctccgtggtggaaagggctgcttctaagaaataggatccattgctttaggcgttgaacaagaaaatattgaattgtatttcagttatcacctgccttcactgttgttaattatttcagatactagtttgtgtagagttcaggtcctttgaagcaaaatccaaaggtttcattgccatcctaaaaatactcagatcattgtaaaagaaggcgtaaaagtagatttattgttactataattatggtcgtatttggttgtaggttagcagtggaagatagaattaagtggcttcttaggagactacaattgtgttctttttcctttttatttatacagttttatataataatttggtaacgtatataaaagtgaagctaaaaggaaacaaatttggagtctcttagatctttgccagtggatagaggccaaagatactgtcagacaacctacaaaggctagatcatggctacaggaagccataagcaactccaggtgtatactgacagatgcttctctggaatcagagcgtcccgaagcctagaatcatttcttttggaattttggatataaagattatggcattgtggagggagaggcgtaggagtctaaggatagggaagagaaagttaaagaa

SEQ ID NO: 32140 - DNA, 1424 bp, Mus musculus
gagagaccatttgagtgttcagagtgtgggaggaccttcaacgaccgctcagccatctctcagcacctgagaactcatactggagctaagccctaccactgtgagcgctgtgggaaagctttccgtcagagttcccaccttaccaggcatgagagaactcatactggtgagagaccatatgtgtgcatcaagtgtgggaaggcattcacacagagctcacaccttattgggcatcagaaaacacatgggataaaattcaagaagcagcccaaattgtagcctttgtgcctttcaaagcactatttttttttcagccttgagatgtactatgcagacactcagtatgacagataggctttgactaaggagagccccacaccttaaggacagctcaggacaccacctagcaggcagtgagtgaaaccatcagggagttcttaattgcttcatttatcctcaaaaggaaataaaatatctgaaaatgcatctaagtttaagaagtcaagtaccaaaaattgcactgatatttctatacaggataaaatgtgtaagtgaaaaaaaactaaaagtatatagctaaataagctattatatttgtgtggaacttttttttctgctgtgatagctattttttgttatcagtttgactacaactggaattaaactgatttaagctgaatatacctttgaggaatttttttcttaatctggattgcaccttctactggcaacctatataaaggacatggaagaaagaagcttgccctctttgcctgtttgctctcactagctagtctattctttcacttgcattagagcttacatacgggttctggcatctatcacctgagacatcctgcctcgtgaactgaacaactactggatttttggggattcttagaccttccactaataaacagccattgtcgtactagctggactatagcgtgtaagtcattcttgttaatatatgtgcatgtatatacatatgagaagagagattaattctaccagacacactacactagggtaccttgaataatatctgcttaataatcttgtttgtttgtttttgatttttgagacagggtttttctggataggagtggctgtcctacaactcactttgtaaaccaggctggcctcaaactcacaaatctgcctcctaagtgctgggattaaagatgtgagccacctggccattaacaaccttttatgttggtgatctcaaacagttctagcagattagtgtacaggtaggaggaaatcttcatgaatcatgggaggctcagaggtccagaagtctgtagtgaatccaggaacacatgagaatatcctctggccttacattaccatttttcctaaaagaccagttatgggagaagttcattactgttaagcaacaaaacactggcaataccagg

SEQ ID NO: 32141 - DNA, 1201 bp, Mus musculus
gaggccgaacctgaagcctgggcgtgaccgcttggatctcaccgtttctctgcgaaaaagggtgcctagggaaactcggcacgggccgagttagtcttcgcctcttgtttgcactgttttgacttcatactttgcacacacgggactccagggaaatcacttgggtcatataccataaacataaatctaggtttgcttagttttgtgatgactcttttgctcagtacacgttctaagtgcacaacggaaatctgatgggagctgatgagtatacggcttcatgaaccatcatactgtggtccatgtaccagctgattagcggggtgactgccgagttactttagaatcctgagtggttttcctgggtttggagagctgttcaaagctttctgggtctccccttcatgtcccagtttgccacaaagtgagagttcgtctgaagagtttggggtcagagtgactgctccagcatgtctaggcagtaacggtttcttgccattctcctgtccccaggatgactgagtgggaagcagccacaccagcggtggcagagacccctgacatcaagctctttgggaaatggagcactgatgacgtgcagatcaacgatatttctctgcaggtaaaaggaacttaatgattgttctttgtgatgatttttttaattgagaccaggtgtggatgagcttctagttcagaaaagggcataaaacaaccagtggatgtacaagacaggtagaagagcaataactggacagctacacccacgcctaatacaaactggcactaaaagatgttagagtgtggtttttatcccgtatttttctaatcgtgtgtctcttgagacagagtcagggtcttgctgtgtagcccttgctggctgcctggagctctttgagatcttgcctctgtctcccatgtgccactacacctgacttgatgtcccctttcgtttgtatattcagttagtgggtatcaattgaaaagatggctttagtcaactgaaccatgttggcacccttgtcaaaagcagttggtaagctgctatcagcctacagcaagaggaatttgagtatgagaccagttggtgctatgaatgttccctgctgccctcccctgaaaaatgtcagttggctatgggtactgttatggctaagttagtatgggagctatttgctttgccctcataacccattttgag

SEQ ID NO: 32142 - DNA, 2557 bp, Mus musculus
gtcttgaaaaaacaaacaaacaaaatatatccatagtaacatttttttaaaataatgtagttatttttatgtgtagtgatgttctgtctgtgaggttgtcaaatctgctgaagttacagacagttgtgagttgccgtgggggttcttggaatagaagttgagttctttggaagagcagtcaaaactctgagccatctctgcggccccccaagccccagacagggtttctctgtagtgttggttgtcctgtaactgtggaacaggctggccttaaactcacagaagtgctcctgcttctgcctcccaggtgctgagattaaaggtgtgtaccattaccgcctgactcaaagtgcagttacttaatacttgtaaaaactgaattctggtcccttgtttgcatattacaggaagtgttctctctccccttgcccctgaggcaagatctcactgtgcacccctggctgttctgaaattcactgtagaccaggctgatcttaaactgctagagatcctgtctcccaagtgttaggatgtagaagtgtgcacactgcgggcagcactttccccttttatgaatgggagtgtgacttaagcagtcactggtttggttttactttcttaaagctcatgttcacaacctgctggggacatgccatggcttgagtcagttctcagtctcctctaatctatctgaggctggtcccactactgactactccttcgtgcttctctctttaccacccaggattacattgctgtgaaggagaagtatgccaagtacctgccccacagtgccggacggtatgctgccaagcgcttccgcaaagcacaatgtcccatcgtggagcgccttactaactccatgatgatgcatggtcgtaacaacggcaagaagctcatgactgtgcgaattgtcaagcatgcctttgagatcatccacctgctcactggtgaggtaaggttttgtccttgattcataccaaagcttcatggtatacatgccaggttcattacctgggacaccgccaccttgtttagggttgaaaaggttgggggtggatatcaggctcacgcctcccttttctgccagaaccctctgcaggtcctggtgaatgctatcatcaacagtggcccccgagaagactcaacacgcattgggcgggccggtacagtgagacgacaggctgtggatgtgtccccactgcgtcgagtgaatcaggtgggtcagaggcttgtgaaggggtggggtaggagccatcagcacaagtgggtggggtcctgtcttgcatgttttaccaggaacctcacttcctccaggaaaccttcctggatttccactcggtatgaggcagatggtagtccagccttcccagtctggttcatctcatccctagtgtatactttcacaacaggctttgttttgtttcttcttgatttgtttgagtctattttgtggtggtacacgtacctacctgtaattttagctacttgaaaggcacagggtggattgcttgatacctgagtaccatggggacatcaagggttccagtcaaaagcatcaaatattttgctggcagttcttaagtctctttgttagttggggcccttgttttctcagccctctcagatcagctatctgataaggtatcaactccctaaagtagtaagtatatggtatctgttgaggtgggtcccaggtcactggcaggagggaccgtttgaggcctgagccctgtctgtcttgtctaggccatctggctgctgtgcacaggggctcgtgaggctgctttccggaacatcaagaccatcgccgagtgccttgcagatgagctcattaatgctgccaaggtgggtcagggcataccacttgggttgggcatttgggagtttgtccagcattcagagctaaccatctgtccttgcagggctcctccaattcctatgccatcaagaagaaagatgaactggagcgtgtggccaagtctaaccgctgatttcccagctgctgcctaataaactgtgtcctttggaacaactataccttcctgtgtgcttgtctaatcatttagggcatagggtacctcccatggtatagaggatgcagctcacctccctggcatggcattcaccagtaaacaaaaagaaaattgtattttcttaaagatttattatgtaagtacagtacactgtagctgtctccagatactccagaagagggagtcagatctcattatggatgggtgtgagccaccatatggttgctggggacttgtactcaggaccctcggaagtgcaatcagtgctcttaactgctgagccatctttctagccctggaactattattttcatgacgagtgcctgcagaattgtagcacctcagaactagtgctagtaagagggtgtaagcctggtgcccagggaagacccaacaagtattggggatgaggaacttgtgttggtctggtctaggtggatctagtttgttcactcccatagtgtggtttgtgtacaggcttcaagtgcccctatggagaccagtactaaaggctttgaaga

SEQ ID NO: 32143 - DNA, 1163 bp, Mus musculus
aggccctaagttgtgcgctagctgttacctaggagacacaaggagcgagagtccttccgggagcgctagctctgattggtcaggatgcctctctggccaatagaaaccaggtccgttgcgcacatgcgtaaggaggctaacccacagtcggctccgtcctacgtgagtcctacggctgcggttgcaagagaagaacggctgccaagtcaggagtgggaaccccccccggaactctgcagcaacgcgaccccaaggagaggagcgaagagtctcgcgcgtgagaggccttggaagcgtgctgtcgttcttgctgaggctcacgggagacgtagtccgagcgaagggggccgatccggcggagcagatgcaggattggccgggctggtagggcaacgcgcgaggcggggcgttctctgagtggcagtgggacgtgctcggtgtcacttcctggaagtgccccaacctcctggggctctcccacgcgtcagaggtgagctcactcctagctgggcgggcgcagcttcataatccggctcctcggatcaccgagagcacctcccagccgtcggacccacccctttcctgtgtcagagcctgacaccccaactcttgagtttctccagagcaggacggatgtcccaagagagccgatttaaaaccagaatcttaagagctgggacacaggttccagtttacaactccacacaaaacggggctgtttgattttggcttttgtttcagggtttcacatgcgtagtaagctgaggcagtatgaggcatccacaattcagctgcgatcagcgagctgtgcctcccaacccataataagctcctgagaatgcacccaggctttcagctctgccccaggtcttgtacctgtgtctcagagccaactcttcagctagcacagtggtctgcctcctgtctgaagcctcagggctccaggtcacccaggatgatggtcccaccccccttccctccgtgtcctgcttgaccctttgtctactggatgagccactttcatctcccaggagccctgtgttgtacccaaatgtttgagcccgtcatttgcagttttctagaaggtccctggacattccacccagtcatttatcttcaaaacaaaatacagctgctcaactgctgtggggctgcacctccca

SEQ ID NO: 32144 - DNA, 1182 bp, Mus musculus
tcaccagccccagacttggatttttggatttttgggtgggtaggctgtgtatataacagtcctgaagtgttcagccctatgggcaggggagtcgcagtcccattgttggctgctacatttctacaatgcaggaatggagtcccctttcaaccagaagccttttagatttaagactccacctccctcatcttgacgtccatgaatgttggacacctactcgtgagatgttcaggagggttcttgggggccaagctgccttaagggactttgaaccctggatgttaagcactaagtgttagagaacccagagtgaactgaatggctgtgttagataagtgggatgcaaaaatgggtaggacccagcttgccaactgaataacctagtgacctagtgtcaaagaaacccatgttagatctctcagctcacggaagtattatcctccgggtctcctgcccgtgtcttatgcgtccatacctcactgtaaggatcgggtgctaggggaagaagggctctagcctacaaggccaggctccagccctacctgtgtgtcttctgggcccgtagggttcctctgtggctgggcatcacaagcatagctcagcctccgagtcccaacgttatgagagctgcttagattcagcacaactcaaatagcaaggcaaaataaaacaaaatgtaataaatccactactgatagatcaggaatacggtctcaggagctgaactgcaattccccttcttgccctcagccagaatgttgcagagcttttttggtttttggtttttggtttttcgagaaagggtttctctgtatagccctggctgtcctggaactcactctgtagaccaggctggcctcgaactcagagatctgcctgcctctgcctccctagtgctggtgttacagagcttttaagcctgaaagccacaaatgtctgttgcaagttacatttttctaccaattaggattcacagataggtgacttcctcatgctgatgcttttgggttattgaactgtggtgagccaatttgcttggcattcacatctcaacttgccaaccaggatgtcagttgcccaggtacatgtctccgtgtctctttctaccaaccaggatgtcagttacctagggaggtctcgggaacataaactttgacccctgttgaaaatggaagttttatt

SEQ ID NO: 32145 - DNA, 1184 bp, Mus musculus
gagtatgggggcccgggtagggttaagtaggcctgctggtttaagagggggcggggaacgggtcctggcctctgccaatgcccgttaccaggtctggacaccgaggtgcagaatgtgatgggagatgtcaagaaatcagagggtgtgcatgcattcccatttttatcttggcagtggtggattgtccagtgtgcaaacagcagtgctactccaaagacatcgtggagaattattttatgcgtgatagtggcagtaaggcctcttctgattcccaggatgctaaccaggtatgtcctgtgggaaatcttggggaagagggaagcgtgaccttttccagagcctctcaccatcttcactagtttggattgtatccttatgcggtctcagtgtctgggagggcggcacagatttgagtgcattgtatgaattttagcttgtgtttactggcaagtaaatacaggtctgctgggttaggtctgcctgttctaaccccccacctttctatcactcacagtgctgcactagctgtgaagataatgccccagccactagctattgtgtggagtgctctgaaccactttgtgagacctgtgtggaggctcaccagcgggtgaaatacaccaaggaccacactgtgcgctccacaggtatgttggatttgtaggctgttggaactgcctctgtcttggttgactaaaatgcatacttgatggatagaacaaagaggattttcaggaacctgacacagaactcagaaatgcttgggtttcaggagcagactttggaggtttaggtggaaagggaaaggcctcaggcagagggtgtgtagggcatctgctaccattggtactaggaagtctcatggaggggtgtaggtcctggtagtgggtcacttagcataagcagctagtaaaggctagaacgaagtgacttccatctttgcagttggtggttctctggcacctggctttagaccaaagaaaaagtcaggagagttttttttcttctctctctctctttttttttggggggggggagggtgtcgagacagggtttctctgtagccctggctgtcctggaactcactctgtagaccaggctggcgttgaactctggtatctgcctgcctctgcctcccaagtgctgggattaaaggtgtgagccaccactgcccagctaaggac

SEQ ID NO: 32146 - DNA, 1103 bp, Mus musculus
taactcactatacaaatcaggttggtctcaaactccggtctgcttttgcctcccaagtcctgtgcctcagggcttttgaggacatctcactgtagaaacaagtctgtttttgaattcagtatatgcagttcaggcttaccttgaacttgagatcattctgtttcctaggtgctgataatatgattagaatttttgacagtgagtgctggtgttaacttctgtgagccatcagggccttgtttatttgggaatggttgttcattggtgagtgggaagataaccaggaaatagtaaggactttctctttacaagcttgcctttattccttattagttggtgtagtcattttgtgagtaaaaagcttccagacctagatctttatcaataaatgggccaaggttgtgggacaaactggaatggggtcagaaggggtttgttttgtttgccgcttgagttgaatggctgagggcataattcctgtttcctaggacctgctaagactcgagatggagagcgaacagtctactgtaatgtgcacaagcatgagcccctcgtgctgttctgtgagagctgtgacacactcacctgccgcgactgccagctcaacgctcacaaggaccatcagtgagtctgaaggcacactgggtagttggaaaccattatttctaagtttagcatgcaggctcactcttttgtggtctcaggtaccagtttttggaagatgcagtgaggaaccaacgtaaactcttggcttcactggtgaaacgtcttggggacaaacatgccacacttcagaaaaacaccaaggaggttcgaagctcgtaagttccgctgccaggggtattggggtaccagggcaaggttatccttgcttgattgtcttgtccattaggatccgccaggtgtctgatgtgcagaagcgagtgcaggttgatgtcaagatggccattctgcagatcatgaaggagctgaataagcggggtcgagttctggtcaatgatgcccaggtaaaacttagggctgcaagggtattaaccaacctctcctttcttgttttttggtttttttttgttttttgtttttttgagacagggtttctctgt

SEQ ID NO: 32147 - DNA, 2700 bp, Mus musculus
attgtgcccaatgggaattctcttatcttcattcaggcaagattgtggctgagcgtcctggtacgaactccacaggtcctgggcccatggctcctccaagagccccaggccctctaagcaagcaaggttctggcagtagccaggtgagctggggagagaaacaaaggagagggaatgagtgagaatgagggccatgggggctactgtaccttgctgatggcacatgttctgttctgtctctagcccatggaagtacaagagggatatggctttgggtcaggtaagtagttgtgccttggaaattgggctgggtgagtaccccgtctctgtcttttctgccaactcttttgtcttctgagcagatgatccctattcaagtgcagagccgcatgtatcaggcatgaagcggtaagtgtggcagcccattgaagtagcaggtgggtacagtattggtgtggtaggaatatatgtgagctcatgacaagatacacttaacaggtcccgctctggtgagggagaggtaagtggcctcttaaggaaggtgccacgtgtgagccttgaacgcctggatctggacctcacctctgacagccagccaccagtcttcaaggtctttcctggaagcactactgaggactacaatctgattgttattgagcgtggtgctgctgcagcagctgctggtcaggctgggactgtgccaccaggagcccctggtgccccaccccttcctggcatggccattgtcaaggtaagatgtacaggatggtccttagagagtgaaacctgtcaccctaagattttgatactaagaatcaaactgtcttataggaagaagagacagaagctgctattggagctcccccggctgcccccgagggtcctgaaaccaagcctgtgttgatgcctctgactgaaggtcctggtgccgagggacctcgtctagcttcacctagtggcagtaccagctcaggcttggaggtggtggctcctgaggttacctcagccccagtaagtgggccaggtatcctggatgacagtgccactatctgccgtgtctgccagaaaccaggtgacctggtcatgtgtaaccagtgcgaattttgcttccacctggattgccacctccctgccctgcaggatgttccagggtatgtgtgaggctgggcaggatcagatagattgtggagagagagctggttgtcatcttttacatttcctaatcttcctcatcctagggaggaatggagttgctcactctgccacgtgctccctgacctaaaggaggaagatggaagcctcagcctggatggagcagatagcactggtgtggtagctaaactctcaccagccaaccagcgggtaagagctgaatgcatgtgttgtgtggcccagtagctgaagctttccaagctacaactctgatatctcttgtattgtctagaaatgtgagcgtgttctcctggccctgttctgccatgaaccatgccgtcccttgcatcagctggctaccgactctacattctccatggtaagtcccagaacaggagaggttgcaggtgccaagaggtggtgacccccctcaatgtctatgttgtctctccctacaggagcagcctggtggtaccctagacctgaccttgattcgtgctcgcctccaagagaagctgtcacctccttatagctccccccaggagtttgctcaagatgtgggccgcatgttcaaacagttcaacaagctgactgaggtgagcctgcagaatgaagccgggggtgggggagtatagcaggcaggggaaagaaaagccaggacccactcacgtgtgtattcttaattggaacaggacaaggcagatgttcagtccatcatcggcttgcagcgcttctttgagacacgcatgaatgatgcctttggtgacaccaagttttctgctgtgctggtagaaccaccaccattgaaccttcccagtgctggcctaagttctcaggagctctctggccctggtgatggcccctgaagctggggctcttgtggtcagcccagtccagctctggtctctgtattttcaccccataccctgtcctttggtggcctgactcctgttcttgctggccccatcgtcccctcagtccctcttcacaaaatggtttttacttctgtggatttaataaaaacttcactgagtcagttgctcatgcctcagctgtctggggactgttcctgaggttttaagactcattctacaggtgaccttacttccctctttttggccaggtgaaacatttgtacactgtccttggtaagacttggatggagcccggcgtggtggtgcacgcctttaatcccagcacttgggaggcagaggcagccggatttctgagttccaggccagcctggtctacaaagtgagttccaggagccagggctatacagagaaactctgagacagagtttggatggaggcctcaggtgtgcagtgcctcccagtggccagatacaaatttagacacgaagcaacttaactgcttacatttaatcaactgcttacatttaatcaaagtgggttgtgtgagattctcaaagggtttttttgtttttttaaatattatttcttcagacactccaagaagagggcatcagatctcattacagatggttgtgagccaccatgtggttgctgggatttgaacttatgacct

SEQ ID NO: 32148 - DNA, 1178 bp, Mus musculus
ttaagctaccatacaggaaatctcaaggatgagatgggatcttgggcttgtaataagatggagacgaggaaggacagtggaggtgggtggttgatgagaaggggtgacttagtgttggggggccggtgtcatggtccttgaattgcggtggacagataaacagtagtgagtggagataatgactagagatagaaaacctcaggtttaaggtgctcagggttcttggaagcaagggttatgggagtagaggttcttggggactatgttgtgggaacttgtggaggacttagctgggtaagggttttcccaagagatgggcagttatacttgaagatgcttgtatatgggatactgtgtatccagaagagtccacgtagagactggaaagtggaaagaatatggagtagtacagactgagttaaagtacaccacacaaagctcttcaggtctagaaagcgaacttatgggttctgctgacacatgcccagacctcctttcttttacctgtttctctccctttccatgctgtccaaacctagacattaacgagctgaacctgcccaagacgtgtgacatcagcttctcagacccagacgacctcctcaacttcaagctggtgatctgtcctgatgaagtaagagtaaaacagggcaggattcccaagaacagaccaggggtggccccataagagtagggtcttcattcactctcccccttcctcttccagggcttctacaaaagtggcaagtttgtattcagctttaaggtgagtctcaagtgtacaaaggtagctctgtggagaagactgggtacaaccaaaacaccttcccatctcctttctctttttacaccttcccatctcctttctctttttctggagccaggtgggacagggttacccacatgaccctcccaaggtgaagtgtgaaacaatggtttatcatcccaacattgacctcgagggcaacgtctgcctcaacatcctcaggtgagggcactgccttcctttccctcccaagacctgccttccaggtatcctcagccttctgtggacactgcatctatctctgtccttccctcccctttatggtcaatctgtttctgtcttagttgtttttctaatgacctgaccttggctttctctgtgtcctgccctgtcccgtatcttcactcttaga

SEQ ID NO: 32149 - DNA, 1193 bp, Mus musculus
gtaggacacctggtgacatgagttggggacatggtcatagagataagtagagcccaggcatgggctgagggatctctattcttgcacttgtatgtagacagagttttcaagttaggagtttatagaaagaaccttcatgggctggatgtggtggtatacacttgaaatcccagtatacccttggtatctcaagttctctaccaacttggaatatgtagcaagatcctgtcttataaaatcaaggagtggggttgtggcttagcagttgactgctttcctagaatctaccagtgagtggctaagagtgtgcttgcctagaatccacaccctggaatttgccactgcctgcttaggtctgtcctatctgggttatgggtatggtatagtccagcagcagaatattttcttcatatgcccaaggcctgggttctaccccttcttccagcaccatggaagaaaacaaaagaccttgtcatcttgctgtcttctctccaacccatccctagtgaggttcctgacctggatcgaatcatccctgtgctgctggaacatggcctggaacgtctcccagagcactgcaagctgagcccaggtatcactccatgggccctcaaagctggggcagctattttctatgtgtgaacaactatacccagacagtttctgagtacttcttccctttgctgagacccttgtcttttccccctcagctctctcttgtgaactgagcagggcatggagtgcagcagcaaaaaatgtccagaaggcagtggcttggccacagaatttgctatgtgcatacatgttcagagcaaggcaggcagctgtggcagcatgtggctgtgctccagtgttcatctagggacctgggttccttctatctcatccttctatttgcttcctttcactctaaagcctatatgatcagggaaagggggggagtaacattgcttgtaaaggatatgaccatattacttgttctgttatttgttacttctgtgcctatttatgacctttattagcttccagggaggctggtatgaggacccaagtttctcttctgaaatgtgggtagtcctctcccttatgtcagcagaagtgagtagtagtccaaagacacattggtagcttttgcctttcccctggcccccctaacttgctttctttcctcccaggggtccctcttaaaccaa

SEQ ID NO: 32150 - DNA, 1176 bp, Mus musculus
tatatggacttcatggtcctaacccttgttgggcggggttaaaaatgtaataactggggcctggcattcagcatgtaaaagtgtttgacaggcaagtttcatggtatgactgcagtccttgaaacctatgtgaagatggatggaaagaacatgtgccacagaattatctgacctccatatgcatgccttgccatatccatacctgcatactatgataaacaaacaaataataagaactaaattataactccacaaagtgtttatctgtcaccaggaagctggtggctccccactaggtctttctgagttcagcatgctagtgggatctgcctttctctgattccttcttctgcagttaaagctctaatacagcagtcctgctggttgttgattcatccttccccaaggtgttctataaccacatcattacgtgtgactcttgtgtatgctgtcaaggtctggacttacaccgtttttgtttcctgagtgttgtctactttttttttctcatagtccctggttcgccagccccctgtctcgacgccggcagctgctccgtgagaacttcgtggagacagagggtgagtttgtcttcaccacctctttggacaccaaggacaccgagcagattgctgagttcttggagcagtcagtgaagggtgagtgtaactactcttctctcccaaggtttgaagctttgctgtacctgtgctgaccattttcccatctcccaaaccctgagatttgcctggaatcctgcctgcttatatcttgtgagccactgcttccttagttaggcttccatgtttcccacagactcctgtgagggcctgatggtgaagaccttggatgttgatgccacttatgagattgccaagaggtcacacaactggctcaaggtgattctggcctctgcttgtctttcccagtatggatgtctatccctactgtgcacagtctccatccactccctagtgagtgtgggtttccattacatgattctaccccagtcagatgtcctcctgaagtaaagcgtggttaatggctcttccgggaactcactgtgaactccctagcctaagccttagggatatcatggtgaggaagccaagtctggtcttcatgtcccttgtccttgtgtccttgttgcatgaggtgtacaaaggagaggcttct

SEQ ID NO: 32151 - DNA, 1141 bp, Mus musculus
attaaatccctgactgcttttcagcactcatggttatcaggatgctaataacataagtaagtatagaatcttatattttctgagttttacagtacatcaggtaccaagatttcaaacatgctgacacccccattgagttaaggcccaggtcaggaaagaagagatcagatagggagtcacttgtcagcctactgcagttggagcccagcagagcccctcccctactactatcctctctcacaggtggacaaagaaaaagggatctctcttcgttttcctcggttcattcgtgtccgtaaagacaagcagccagagcaggccactaccagtaaccaggtgaggccctgggtagagggttggttctggctaggagctgtagagatgggagagctggggagctgctgatacccccttctcccactctcctcaggttgcctctttgtaccggaagcagagtcagattcagaaccaacaaagctcagacttggactccgacgttgaagactattaacctcctgctctcctgggcctggggtggaggttgcgagaacatgggcactgttggattggtggtgttgattggtgtgtgtggagtcacaggagtgagatcctggggctggaatgctttattttcttcaataaatgacttcttagatgcctacttggtgaggaggtctacattgagctctgtggtatcgctgtgagctcacacagagcatatgaccatatgttgaacaagttcccctgcagtctggcagcttccagccacttgtgccatggaacactcaaaacatggctattgccgcttaggactagaacagttcattttatttgccacatgttgtcggtgctagtcagtggacagcggcaatcaagagctgacatggtttagcttctttaaactcccagtactctgccaggttgacactcttagctctctttatagaggaggattcagatactgcctgcacccttgccaggagcatcagcacttagtactccaattcagtagctctgctggcagtcactcccacatctttctaacaagatccccatgctcttggcagagactggtgcccaggtgtgtggttcccatttgtgccacctactgtcttgtcaccagacatcacctcaatcttta

SEQ ID NO: 32152 - DNA, 1226 bp, Mus musculus
ataaattaatttgttagatgaacacagattctaaatcttctaaagtatcaccttgaggactaaaattcctcttttgcttaaaagtcagcttgaggactcaggctccgaaaaaaagctactctctgagccagctcctgacaggaggccggagactagcctcagctttacaatttgcatttaaataaagtacctagagttccccaaaagaagttctgctttcctactttctcactgtccgagattttgtctttcaagcaggtaaatcaacattctcgaggcggaccagcggatgtgcatccccgcgcccctagagcacacaggtggctgctgttatctcctttccaaggacatttccagcatgtggctttcagtctgagttaaaaattaggtttaccaagagggctagaaaagtagatatttctatattaataaagattggtttttattttgatagacaggcttagtcccttagctgacctctggcttttcacccttgctgttactgcaaggtgtccttaggctgtggaaaaaacagggatgaggaggaacgacttccagctcctattttagccacaaatcgtggtgttactaacgacatagttcttgcttaggctttgctaattctgaggttgataattctcctttaggagctgcacagcactcagaactgtgcatactggtttgtgattgtacaaattcagtatgggcatcgcttggtgcagaggtactgcaagggaaggtccggcttgaccatttctgagtttcctgtgagataaacccggtttaaaagaggttggtatcatattttggttaaaaatcaaaaatattttccggctctgcctcgcctccccaaaagatacccagagccacatgtgtgggtcttatcaatacccacgggaggaatcgggtccatgtccacccaagccaaggttaaaagcccactcatctacggatgagaaaatcatttgatcacctcagttaagcattgccttatttaacttaattaataggggggagagagattggagacgtactattgaaagggcaagcccttcactgcctcccacccaaataaaaaagccaattggccttgtactacaagagccggtcgaactccttctccctgtttcccacctatcatccaaaaaagcggagaaatatcaacttagtgttattatagtgtatttcacatttgttcagtcaaacttagccagagttccaacgcc

SEQ ID NO: 32153 - DNA, 1286 bp, Mus musculus
gaataagcatgaagacctgcatttagagtcacagaatccctgtaaaagcctccaacatgtgcctgtaaacccagtattaggaaaggatggtcaaaatgatcccagtggctcactggccagcaagtctctttaaaatggcaagcttaaggtgctagaaaatgaagtgtttctgttgattgtattgatgccaatctcaggcctccaaacacatgtgcacagatgtgattacccctacactcccatacacatatgcacccatgtgtacaccacagagggaataaagaccatctctatttaaattatatttgtttaatattgggtgagaacttttattgcaacagggtcagaggacagtttgcaggaaacagttctccccttcgaccatatgtggaaccagggtatcaaactagagtcagcagtattggtggcaagtacctctatccactgagccatctcactgaccccaagacattccattaaaaggaaataaaggcatatgttctgagtgtttgtaaatcttactcctgctatagttgttactcctgatatagtatgtgggtcttctgtgtctcttgcagactagtggactgccaacttatgcagaactgctgtgaggacctggcctgtatgatcacaacaaccaagcacttaaaaagtttggatcttggtaacaacgccctgggtgacaaaggagtcataaccctgtgcgagggactgaagcaaagtagcagctccctgaggagacttgggtaacttcctggggtaacctctttgaggggctgagttcagtggaggtgagaggacctgaacatgaaaccagggtgctgctgtcatgttaatgactccataaagtcatacagtatttacctcggagtcatgggtctgggtgtcccggatcttcaagtggagaaccttcagatagatgctcattgaacttcccccttggtgctggaaatacagaaactaatactttggtggtccagcacatttaattgagcaggaagaatgaatacagaacaactaggaacagtggtgtttcttaagactttagtcatcatgtcatccacctgggagtctgttagaccagagtcctacccaggtatggtggctcacacctgtcattccagcacacaagaggatgaaggaggatcatcttgggtctgatgcctgggctacattgagttctgtgagatctaatttgtgagtgtgcatgcatgcacaatcacatatgcactcatacactcccacacatacacacaacacacataaatagaaataaaactaac

SEQ ID NO: 32154 - DNA, 1154 bp, Mus musculus
aatggttccacatagtttgctgtcctcttctggcctgaaagggcacatgcatacatacatagacatgtacaaatttttttcaacaaaacaaaacaaaacaaaacaaaacaaaaacaagtaggtgcctacagaggaaagagaccatgtgcatgcacatgaacacacagaaagttgaagacagctctaattacaagaattaagtagataggtatgtacacagttctgaaatttgatggcattgaggtagactaatgaagatgaactaacccttaaatcctgtgaccaataccccattgtgtcacctaagctatgcaacacagaaaactagtgcagaatgtacatgttatgttccaaatggtgtttatctttgcctatgtctgctgcttatttgtacttctgaggcaagggcttgacatcacagacaactaggggcataaactaagtagaggcttgctttaaacccctctgtagattagacaaattgagtaattagactgactgccttattaactcttcctctctgttgcagaaagcacaatgtatccttcagaaaatgacagtagagcaatcctgaaagaccatggatcagaagaagtggaacagactttaggtttgcaggctgggtagggttgtacatatgggtatacttaaatatacattttattggttttgatttgagaaattagacccaataattctaatatgtgtgcatgcaggattggagtttggttatccacatagggttttcagagctacatataattcaggctccaagaaatcccacacatctgtcctctgttggcacacacaaaaccgaagacacctgcagttataagttttatttacaagctcattacattataatagcaagatgctagcacaggtctgaaatttgaaggcattgaggatgagtaagaataactcttaatgcctataacccagcacctcatattcacacctatcctaaggcactcagaataactagtgtagaatgcacatgttataggttgcaaatgggagcatctttgcctgcctatgtcggctgttttaatgaacttgtgatacaaaggacctgacatcacagactacatggaacacaatctgagcagggacttacttgccttaactctttatgtagtttggacatgaagtat

SEQ ID NO: 32155 - DNA, 1160 bp, Mus musculus
agactgcttgaatccctgcacctgactgatcctcagctcctaatttacatattttctgcctatcaagcaaccatacaagccaaacagtgtgaaccaagttccccttccactttctcccagtattacccaccatgatatccccttcacacaacaacctgaaacacatcatgatgcccactaactcaacaggtatccagtgggctgctgtatcttggccaatccgctatttgacttctattcagaggacctgcacttacatatctctccaaactcactttttggaatctttgcaccctacaaactttcaaatccattatccgcattcacatttggtaccacactggtttcagagtaattgcttagagccctactcttatgggtataattctacttgtttttttgtcttttgagtcagagtgtctctactggtccaggctattctagacttactgaacatcaaagggctcaggtctcttcttggctggtacacaaaagcacagtagctgggccagcaacatggggtcttaccagccttcttgttctgtcatctatgaaccctgcatgcttatgttttccagtgttaacatctatgtggaaacatctgcaatgctcctgccttttctccacactgcccactcaactctggggatgtgttggacctcaacatccaaacaggtacaccagctgcagaatgatcacaaaaagctcttcatctgctagctccctctctcctccatgagattagccaccctcaacatagccaatgtataaaaaatatattcaggacaaacattcacctgacaaacactagttctctttatcttgttcagatttccttctgtttgtacacttcctcagggaacagccttatataccttgtctgggcaggaacctcaaagctccacccactctttggctcctcccactctgtggaccttcaaattcagtagataaacacacccttcagtgccactgggattttggccccaccctagagattccttgtccttttgattgaattacatttttttttgttttgtttatttgtaagttagtatctgtcagtgcaggaagttgtcttcacagtctataaggtgtctagttctcccaagaaaacaaattccttgctatttaggggaaaacatactacaatacattgc

SEQ ID NO: 32156 - DNA, 1287 bp, Mus musculus
gcggcggcgggagaaagctgctcgcaagctggtgagcaccctgctctgtgacccttgtggccacacagggccctcggacagaagtgggtgacagggcaaacagctgtcgagtgacccgataccagtgccatcaaaggagaggtcatggctttgtgggccctgggtgaggaaggccctgggcagagtggcactaggctgagctcttaccctctgtccacagcgggtgcagcaggctgcactgagggcagcccggcttcagcaccaagaacttttcaggctgcgtgggatcaaggcccaggtggcccgaaggctggcagaactggcacgccggagggagcagcggcgcatacggcgactggcagaggctgacaagccccgaaggctgggacggctcaagtgaggcacaggctagggctccaggaaatgggggtctgcaagttatatcatgcttttttcttggctctgtgagagccaaatccctgagtgtctcaaccctgtgttctgtaggtaccaggctcctgacattgatgtgcagctcagctctgagttgtctggctcactcaggacactgaaggtacttgccatgagggtagcagagtgttatagggaccctgtgcccagtgatgataaccatccttgctccccgtgcctactcgggctgtgggcgacaccatggctgccctgggctgggccagttgggccattgcctggggactgagggcacagggtcagggtgaggtggggagggcaggtgctggtgtgagtttctgaccctcagaaggccttttgtcacagtctcttgtcagccctagtgagtctcctcaagctgtgctggggcctagcctggctttgaggtttccattttttgcagttgtagcctctgtcctctgagcctagctaggatagcacacattgacttcagtatagagccccctggagctcagcagggtgtagctgggggtactctgtggaggctttaggaagatgcagagctctgtctgaaccccagtgctatctaggaccctgctaaagtctctctgaccctctgtcccacagccagaaggtcacattctccgagacaggttcaagagcttccagaagagaaatatgattgagccccgagaacgagccaagtaagatctgccactgtgggaaggataggggtggggtgggggggtgggttgagacacttccatactcccccccccaaccccctgagataagggatgctcatcacattttccccttccccaggttcaagcgcaaatacaaagtgaagctggtgga

SEQ ID NO: 32157 - DNA, 1287 bp, Mus musculus; identical to SEQ ID NO: 32156

SEQ ID NO: 32158 - DNA, 1211 bp, Mus musculus
ccttgtatgagttgggacacacacatgccatgcatgcatgtcaaggtataaggacagttttaagatgtcagttacctctttccacactgggaactggaatagaactcggggcatgaggattgtaaggccagtgcttttacccactgagcactcttgcttacgttcatccccgggattcttatcacctacttataggtgcagatggggaaactgaggttgggttaagcaagccacaggttgcacagtgaagcctgcaactgagtcagggtttggtctgtgcccagtcacttttagatggaaaattcttggattgtggtggtcttgagacagagtgtccctttgttgacctcagctcttgccttcttctcttgactgcctccagctccatgtgcaggaagctgccgccaaccacctaaaccctgagcccagccagcctgcccccagcgtggacctggacttcctagaagatgatatcttgggctcccctgcagcaggaggaggtggagggggcggcggggccccagaccagccctgtgacatccttcagcagagtcttcaggaggccaacatcacagaacagaccctggaggctgaggctgaactggacctgggccccttccagctgcccaccctacagcccgctgacaatggggcaggtgctactggagccgcaggagccacggcagtgactgcaggaccccaggctctcttcccaggcagcgcggatctgctggggctgcaagccccgcccactgtactgacccaccaggccctggtgccaccccaggatgtggtcaacaaggccttgagcgtccagcccttcctgcagcctgtgggcctgggcaatgtgacccttcagcccatttcaggcctccagggccttcccaatggcagtcctgggaatgctgcagcagccaccttgggtctgacacctattcaagtggtgggccagcccgtcatggctctcaacccacccacctcccagctcttggcaaagcaggtacctgtcagtggctacctggcctcagcagctggtccttcagagccagtgacactggcatctgccggcgtgtccccccagggagccggcctggtcatccagaaaaatcttccagccgcagtgaccaccacactcaacgggaactcggtgtttgccgggacaggggctgccactgcagcagccagtggggcaccctcgggacagccgctgg

SEQ ID NO: 32159 - DNA, 1191 bp, Mus musculus
gcagaaggtgtggcccagattaaaggtgtgtaccaccccatctggatctgggacttgctttgtcccaggctgaccttgaactcacagatctcctgggattaaaaggatgtactaccctgcctgggcctaagcttctcatagccactgtgcctcaagatccccatgctaagatccagatcagaaacctgtgtcttccagcctcaagatctggatcacaggtgagccatccaattctggattgtggttcattccagatatagttaagttgacaaccaggaacagccattacaaggagtatacaccaagaacaaggcttgctggtctaggtgcagttggtttgagatagtgactggcgacagctgggaaaggggaggaagggaggactaaagcactgcaggaagtaggagcagtcacgtggatagactgagatagactcgtgcctggatcgatcggtgcatgggaggaaaactgaaaaagttatatggctggtgggagggtggaagagaagggaccaggcagaccatttagaactggttcctgtgtaaagcctgaggtttacactgaataaggttaggaatcaaggaaaggtgctggctgacagccatgagccaacctgggttcttcctgtgtgttgaacgagaatgagatggcagagggtggggcacagcagggttgtgctgctgtggaaggaaggattgcggcttctgtcctagagctgtggtgcagggggcacctaagccctcagagaacaacttccttcccagggaagcagccagtcagagcctattggcaagagttctttctcatttggttctgtagactgagggggctgttgcttttgctttttttctgtacttgagatgaaactcaggtccctgaatgtgctggacaagcactatgccactgagccacacttccagctctctcaatgggggattctaggcaggggctctaccactgagccacgcccccagcccctcactgggggattctaggcaggggctctaccactgatctacgcccccagcccttcactgggggattctagggaggagctctgccattgagccacgcccccagaccttcacttggacaatctaggcatgccccctgcctttggttttcagaaaaaggttctccctatacattccaggctgaccctgaactcttcaccattgtcctgcttaacca

SEQ ID NO: 32160 - DNA, 1176 bp, Mus musculus
caattctagagacgatcgccagagggagtaagaaggttcgttttcactgcacagttttttcccaagtgactatgacgtaaagcgaaacaggaggcggagctaaactgctgggtcagtcaaacctggagcatgaacctagaggcgtcacatgagcgccgcgacactggtcaggtgattagtgtgacccagttccgccgaggcgtggcagaacaagtctatagagcctgctgattggttggagggagtcaaaggtcgcgctttgggggcggtgggctcttggcggttcgggcttatgattggcttatttggtgtcacgtggcaatgcgcttgtgggggttccaggaggctagcggcgtgtgctcacgtgttgggggggggggggtcaaggtgctgagtgcggtagccggagggggcgtgccgggaggagagtgcctcgcagcttgagcccactggttggttcgcagggttcacgtggggtggcaggcctgggtgacgtcaacgcagcgggcggagctccgctgagtgcgcggtgtccggggcctgtgagtcgtcgccaggctgtgtcgggcctgagccgagcagctgcgcgacgtcatggacaactccgggaagcaggctgaggctatggcgctgctggctgaagcggagcgcaaggtgaagaactcgcagtccttcttctccggcctctttgggtgagcaatgggcgaggctgggcccaaggcggggaagagcgggctcttctgctctgcactttgggagcccctcagcggccttgcaggccctggccgtggccctatggctgacgacacccgctgactggtggccgcgcctttcccaggccggtgcccgtggatctgtgcggcccaggctgccggggtgaggacaccagaccgaggggacccgggctggggcgtccttgggcatgatgagccggagtacgaggtgtgagggtgagtggggccctgctaagagtgactgatggcgaggcctggactgagaggtggagacttgtgcttggggaacaagcatgaatggacagtgacactggttttagccaagacaatggtgatgggaggatgaggcacacaagagaatcattagggtggtaggaccaccgcctactaggtggtcctcaagtctggagtctgaacacacccaggaggtggcaaatacctc

SEQ ID NO: 32161 - DNA, 1466 bp, Mus musculus
tgtctgaagagcctgcccccgtggacagcaaggctggctggacccctctgctgattgtttccctttcccactccaccctgaacatttgtttccaactgtgtctaccttggttctctagccagtacttgctgctgacgtcactctctgggtgccctcagtaaccaggcccctgacttggcacggaggtgggagaggcagtgtttccatgcctccatgcctcaattccacccacaaagccagggtgcttggaggtcttttaaactacaagtcttttcctgccaacttatactccaagctttgcaggctgaggtgacagggtgctctctaggaaacctcaggactggggccagggagggttccaggagagcagtgtgtcatggctcaccctctctgtgccataggtgaaggaatatgactccatctccagactggaccagtggcttaccaccatgcttctgcgcataaagaagaccattcagggtgacgaggaggacctgcgctaggcctccagccactgccttccacccatctgtctatcacagaggtggagccagcacctcccaccaggagtctgaaggagtgggtgcaatgtgggccacattctccagcaccaggcgagctctcctggatggctggtcacccgctgcgtccttcaccctgccgtttatttaagcccccagaggtgccctcctgccctggaaagtccacctggacagattctccaattcagacttctgtgtgcttcaggaaccagaggtcagggtctggtcccatctcctgaccagcagtgtactaaggctgtttccatatctcctaccttgtcccctagcagagataagaacacaggtagctctgagacttgctctccctggctgggggtaacctctgcccctggagccttcccttgttcctacaatgccaacctctcaggttagacccagccctggagctcatggggtgccttggccctgccctgcgcacctgcttctctccatgcatccaggtctatcgacctgaagctgcagctggcccaaaaaggacaataaaacctgccacttttgcatgagcctcttgagctgtccctttgaccctcggtgcccttccctttggaccttggctgtcctggaggagttggaggtttctgcagctgagcctcagaaccagagtgctttctagaagctgtggactggcccaagatgacgggagcctcatacccatttcaccctgcagggggtctgccagggctggcctccttccatgggattgccctgactgaagcagacagcctaggagaaaaagttggccttccacacatctcgctctgctcccctgtccctccagtgtccccaacagcttcattcagttgataatttggccctcagctttggagaaccctgaggctggaggctgacaactttttttaccatgggattgccaagaagccttgtgagaatgtcccagcctgc

SEQ ID NO: 32162 - DNA, 1169 bp, Mus musculus
ccctctaatgtagtctgttttgagccatctctgtctttcctctgattactttcctactccttcctcccctttctctttccacttatttatttatgtgtctggtgcttagtatcagactcactgtgctatgtcccccaacccttgggtttgcaaggcagagtcacattgtatagccaagctgttccagaattcagtccctgtgtctcagctaccggagcaccatgcccagccttctgctgatctccaatctcagttctttctacttgggtctaatttgcccctcccacaggaagttgacctaaagctgtatcccccacccaagtctagcctctgttccctcctacttgggagatcaattctcatccaacaccctgtggtctagtctctgcccagtatggtctgacatgtgtccctctcctgtcacagcttaccgtcctctcttgtccccacagcacagcctgatccaggcctctgaactggtcttgacacggcttcgtcatcaagtggagcagaggaaacatcagcagggccttggggacagagttgggcccaggcctgtggaacacccagcctcctgagcactccatcttctcaggtgtgggcacctcgtatctatcattgttgatggggagcgaagcatcttagaagaggagtgtgccccttggactccctcagaaggggaattctaagagtccctgacccaccctggtgtgctgtgtgaccctagctgataactcctgtctgagccatttgaaaagggatgttctcagccaacctctgctcccatcaggtgttggtccctgaggaccatttacacattcagagcaacaaagctgtcctggctgtcttaatttcctttgtctggcaagcatctatcaagtacttactgtgtgccaggttctacaatgtttaattcactctcaaagaactgaggaggaggaggacttcgcagagattcctaggttagacccagagaaaagaaagaaagttacagtgtgtggagggtgcatttttgaaaactatggagccattctctgctctggtgagctaaactcaggaagtagagtcccagacaaatgccactgaggttcattgtctcaacctaggatgaataaggccacagacaaggagtcagcactgaggggcaagtgagaactcaccaggggctt

SEQ ID NO: 32163 - DNA, 1198 bp, Mus musculus
acagggtcttccctgtctctcccaaaacccaaaaagggaggagggagaagcaaagggaagtctgcttgggatcctggtgggttcataattacgcatgagtgtttgctaattaggggctgctaattagatatatcattaaaggccttgtctagggggctaactgtgtatcggctctttaagaatcacccctctccccgcccctgcctacacacacacacacacacacacacacactccactccttttcgggaagttctgccaacatactgcctccctcccccagagcgggctcctggtctgtgggtgtgaattgagggtaggctgtgggttagacttcgagaggaactttcagactgacatagaaggtggaaattcctggagacaaggctcgaggcaccccaaggcatttctaatgggcagcaggctcaggtgacagctcctcgggctgccttttctctataataggcaactgggttaccataacaacctgagggtggagccaggagctcagaccttgggcaccttctggggggagtggatgctgggtgatctgtgcaaattgtttcacttctctgagccttgatcctctactttgtgaactgagtgaaagagtcctctccaaaggccaggggtgtcattgtggagagcacagtcagagccccaaggaagagcgggcttcaggccccaagggagaaacagcagaggctagaatgcctgaaacagagcaggggggccagaggccatgcaagcaagggagggatccacagtcctctgagactggagttgtggaatatcctggaaggagaatggacgggcgctcctgtgtgcttattttttatttgttattgtgtggatgtggatggtcagaggacaactgtgtagagtcaattctctcttcctatctcttctttggccatggcacacttaaaccctcctcaaaataaataaaatgtaataaaacataaacacagaaagacaaaaatagacgctcatacccagaacctactacagccccctcaagagccaagctgcaatgcctggaattgcccagtggactcctggcctccagctgacactggtttcacagtgttctttgtacctggcatccttcactcagccatgcatctcaggatcaggttcctctatgtcatcacggttagccacagtcccctctctgcttaggggcagtatactactc

SEQ ID NO: 32164 - DNA, 1150 bp, Mus musculus
taagactgctgcctctatttgcataatttattcatgggcctggcctaattcgtacacccacatgcataatttatttgtggtgcccaagactcactcattcacgctgtgcatgatctgttaactgctgtcacttaatagattctactctagaagtacccagatataaaagtgctctagagttggcatcaaagtagagactgcagggtttatctgggcatgaggcttatgcctgtcatcccaacactaggaaagctgaggcaggaggattgttgtaagctcaagttcagcctgggtagcacagtgagaatgtggagatgtcggtgtaactaaagggtgaagtaagtccctagcgtccatgaagtcttgggttccatacccagcataggaagaaacaagaaagaaaaggagaggaggaaacgggaaaggaggggaaaagaaagaaagactagaggatcagagcgtgggaaagcttgcacccagatcacgactagagcattgagcttcctagcagccctggtgaaaaggacagcatcctggcttagggtccagaacagcctatgtgtgtgtgaggtgaaggatttcgtgtgagtgtacacatgtgtgccggcacagagctcaatgtcagggggcttcctcaattactctccacattatatgttgagtcaggtaccctctctgaacttagagattggctagactgtatagcccctgagctcaggggtcctgcctctacctcctcagcatgggggtcaaaacctcacccagtatatacaaacatacacacacacacacacacacacacatatatataagagagagaggagagagagctgtaaggaattctagacactgtgggtgttgtagggagcagcagagtggaggtgacatagaagctggctttgatgtagaaggtagaaggaagatggaggacaccacagctccagatggagaagaggtccagatggactttttatttatactcagggaagaaaatgaggtgggaggggctgggggcttttgctgattaatggagaaactccattaatgaacacacacacacagagagggagagagagagagagagggagagagagagagagagggagatcctttttctggacaggcaagattgctcagtgggtagcggtgc

SEQ ID NO: 32165 - DNA, 1781 bp, Mus musculus
ggttggttggttggttggttggtttgtgacaaagtcctactgtttgtgtagcccacctgcactctgctggccttgtacttcctgagatgtgaatgccattccagggactaaactcgaatatttaactctgaagctagggaaaagcctctgtttaagcttggtcatgattgtgttaggcctcttgcttttttctctgtttgtttgtttgtgtgtgtgtttgtttgttataaatggtgtttttctagacatagtttttctctaggctaagctggcctggaactcaacatcgatccacctgcctctgcctcccaagtcctaggattagagctatgtcgccacctcccatcctaagcagaagcttttacccagagggctcttggcccttcctttgtcattttcattgtagtttttccctggcccacgttagaaggcccgtcaatgtggtggtcttctgtctctactctgaagctgagccctcttctcctctctccaggccctgtctcaaagggaccctcctcacaacaacttcttcttcttcgacggcatgaaggggagtggaattgtggagtgccttggtccccagtgagctgaggtgtgtacaaggccaccgagtcacctgccctctctccggatcatttttctagagcaagcaggccagacttcatcctgcctttgtcttcgaagctatcagggaactgcggggtcccaaatatgataatcacgtggcacctctggcattgctcccttgggctgtcactggggactggcagtgcctagtgagagagagcatcatacttcatgatgtcagagtgtcttgtcacggtttggacttaacttccctctatagtcagcagaggggatccgaggcccagtgctgcctggagaactgagaatagacctctgttgttgacccttcctcaggctggagcctgggtgttggaagggagagactgtcacccagttgtcatgtcttttggttgtgagcctatgcaccttacctttaatggttgaaccatcttttcagcccaaacagtttatttctaaaaagtagatttaatgctaggggccattatgcaggcttgtaatcctagatgttgggatgccggggcaggatttactgtaaatttcagggccaagttggtctacataatgtaccaagaacctttctcaaaatataataaagggcatattccagagttagggtggggcactgttacccagctccttatactgggcacccgggcccctgacaggagtgggttggggggcagttggtttggtcttccttctaggagtatgagggcagcctgtctagtttgtagatccccttggttgctggataaaggatgataataaagtgtctttctcttaaacttgcttgtctcctctgttttagaaacatgggtgggtagctggtgtcctattttccttaaacctgaaaagtctcacaccctcttatgcttaaaagattcctactgtctccagcccagcctccttgcttcctttgtccttttgataatacagcagttgcactgcagacaggacacatggatgcttaggctcctgcctgtgtgctgagggtctcagtactaacaggctgaagtcacgtgggtgagctagagcgcccagcttaaccatggtgggtggcacactcctgtcctgtctgcacctaggaggctgagacaggaaggtcacaagttgaaagccagccccttctgtgcagcaagttggtgaggtggaaagcagaatcctatggctataagatagggcttcccctgcaa

SEQ ID NO: 32166 - DNA, 1229 bp, Mus musculus
cctcttcaattaattatgaaggccggagttcaaatcccagctactcacacgaacaaataagtaaaatataatttaaaaagagaaaccatggggccgggtgatggtggcgcatgcctttaatcccagcacttgggaggcagaggcaggcggatttctgagttcaaggccagcctggtctacagagtgagttccaggacagccagggctatacagagaaaccctgtctcgaaaaaccaaaaaaaaaagaaagagagagagaccgtgacctggttgtggtggtggtatgcctctgttaccattacttgagtaatggaggcaggaagatcacgtgagcttttttttttttttttttaaagattttatttattgttatatgtaagtacactgtagctgtctttagacacaacagaagagggcttcggatctcattgtggatggttgtgagccaccatgtggctactgggatttgaactcaggacctttggaagagcagtcagttagttctcttacccgctgagccatctcaccagctccaactcttttctttttaaagtcaagcattggtgtaagaacttacctcaaaaagagagagagggagggtaggctggagagatggctcagaaatgaactattcgtaactccagcttcaggcagttctgctgaaggcaggtctctgagggcacctgcactcataagcacatatcccacacacagcccaaaccccacacacatacatagatgtacacatacagtgggacgggaagcctaaaaacccaaagcgtcacctaaaaagaagtgcgccagtattgaacacaggacactgcgcttattagtctctagaaagatgtctgtttttaagatttgtttattcactttacgtatatgtgtacattgtggctgtcttcagacacaccagaagagtgcatcctgtcccattacagatggttctttgtgattcctgggaattgaactcaggacgtctagaagagcaggcagtgttcttaactgctgagccatctctccagcccaaagaaaagttgtgtttgtttgtttcagtggtttatacacccatcccaccccctgtcccattttagtggggaagatctagtaccctgaatgtactagatatgcaatcagccattgtgctgtacctccagccccaaagctgtgttcagcagtgcatcatctcctgacagggatcttaaaatgaaaatctttgtgtatactca

SEQ ID NO: 32167 - DNA, 1181 bp, Mus musculus
caaagctccagttccaggttagcttgggctacctgagactttgtccccaaaccaacagaaaggtctttaatatgtggatagtaattgctggtgttgtgtgggtctccccccccccccccaaaaaaaaacaaaacaaaacaaaacaaaaaaccattgggcgtagaacctggggacttagacatgtgtttgggtctagtgcagtgtttaatctcattttagagaaagcagttaggaaagcaaacagaaggcaatggtttctttagccggtgttagacaagaaaatcttgtactagggaaagcaatttgaagtggctggtattggtttcacaaaactgagaaataatgggaccaaacccatatttaaggaaagccgttggttggaacattcatttaaagtttcattgagggttagaggttctgtgcaggttccacagcactgggactaagttttctagcaagacaaaactgcattttctgtcccttacttttgtgtttgtgttgggatagctttatctgtgagcctgatgccgaggaattattaagctctaattttagtgtctattcacaggactgtaattacccggagtgaacaaacctggagtcctttctttttgaggcccagtcaggctttctctgctgggttgcctgagtttggtggggagagacattgttaacaaatggaggaacacaaaaggagctttgtgggcggctctgtcagtttataaatcacaccctcttacaagtgtgacacttggccctggtgtgaagggttttatggcttaagggccttctctgattgaggcccacattttgcattcatatggaaaaagcccttgctttgttagccattcacagctggaagtttccctggaatcccttctgatgatgcccactagggtggatatggaagcttcatttgggagccacttttctgtcactatgaggagaatgtggggaccccaggccagtacttggcagtcttggtgtgccattcctgagcgctctgccggcactttgccctttgtgcaatgtcttccttacagagggcagaaattgaagatatcaaaatattccccagctgacattgttagtcagctgttacaatgggactattcagctgggattccaaccctgagctcttgagggcgcacagcatgcagcacattccttctgacaatccc

SEQ ID NO: 32168 - DNA, 1195 bp, Mus musculus
ttaaaaaaacagaaacaataaacagaaccctgccagctgatagaggcttctaaagatcttccagcttggtttcttagccttgtgatccaggttactgctgaaagtgctgtgtccgcgtttgctcttggacacctgtgcagcaggctccactgcgcaggccctggtgtgggcctcacacagggctggaagcagcactcctttacttacacttgagttgtaccagagtctacaacagactccaagaccgtgcttttctctccataagtctttaaaatctgatcgagatctgatagttggtacccttcatagcgctgggatttttagccacatagggttggtgcctgctgtcttggacagtgcagccatgaatagacaggtagtgagagaccagctactgaggacaggagtagctgtgtgtccagagtgccaagtcatccctcgagggaactagaggcactgtagtcttaatgggccaaattgcatggcttcctaaaggaggaggcctcaaggaagacataggaaatgggaccctatcttccttgttgttgtagtctgtagccatgtgaggctcactgttccaatcaccccacaggtagccgaggccgaggcaggggctacaggggccgtgggagtcgaggaggatctcgaggccgaggcatgggcaggggcagcagaggccgaggccgaggctccatgggagagcacccagaggacgaagaggacttgtatgaagaggagatagaggtaaggttttccatagctcttggggccagcagtgtgattggcaggttctctgggctacgagtcctttgggtgggcttgctgagactaagaccagaggatgttggtggggtacccaagggaaggaagacttggagtgtcagacacacttttaaaaggttcctcttggtgctgggcagtggtggcgcacgcctttaatcccagcacttgggaggcagaggcaggcagatttctgagttcgaggccagcctggtctacacaggatagccagggctacacagagaaaccctgtctcgaaaaaacaaaaaaacaaaacaaaaccaaaaaaccttagtgggtgaagcaggaaaaggtagatagcaaaaaccctgttctgagacagggcttctctgagtcttctagaatgtctcctgcctcttatggcaggcatgggagggatgtacagaatacacac

SEQ ID NO: 32169 - DNA, 1184 bp, Mus musculus
caggacatgtacaacaagaagatcccctctttgtttgagattgtggtgcggcccacggggcagctagctgagaagctgggcgtgaggtgagtatattgtccacagaagcacaggagcattggcctggcagggctctgcccttgatgaggctgtcagacgccatttggactccgggcctcaggctccaagtgaacactgcaggtttactggttgggagctgctgcctttccttagcagcttcatcacaagtaccatttcctcttctaggttccctggacctggtggaccctcggggccaatgggtcctggccccaacatgggacccccagggccaatggggggacccatgcatcctgacatgcaccctgacatgcacccagacatgcaccccgacatgcaccctgacatgcaccccgacatgcaccccgacatgcaccctgacatgcatcctgacatgccaatgggtcctggcatgaaccctggccctcccatgggtcctggtggccccccaatgatgccctatggtcctggagactccccacattctggaatgatgcctcctatcccgccagcccagaacttctatgagaacttctacccgcagcaagagggcatggaaatggagcctggtcttgttggagatgcaggtatgtaggcaacagctaggctgtagagctgggctcaccaaagtgggatggagatcagaagtggcttttcttccttgtccagtcttacagcagcattccagtcccattcccattctataggtgttttaagtattatgggaccctttgccttgtgggagccgaaggactcttgtgtttgttgtcagtgagggaaacagtactcaggtcttagcatcaattatgagcaaggcagaaataccttaggaagctgtgcttatggtgcctgggatcagtcaggaggaaggcaggtgccctagacaaggtccttcttctgggtagaggtgggctcaataactgtgcttgtatgacaccatcggctggacaggttcttgcctctgtcctgtgatgtgagcaaccttagtgtccagtatagtcaagaatagctgctgtggctgactgtgggaaaatcagaaaggaggagggacctgccccaggccaaagctcaaagagtgtgtgtggtctctgtccttgctatagttgcattttagtagagggaac

SEQ ID NO: 32170 - DNA, 1099 bp, Mus musculus
ctctctcaggtgacactggaaactggtactcaagtgatgaggatgaagggggaagcagtgtcacatccatcctgaagaccttgaggcaacagacgtcaagccgaccccaggcttcagttggggaaccgagcagcagtgggctgggggatccccgtctccagaagggacaccccacaggaagtcggctgtctgacccccgcctcagccgggaccccagactcagccgccatgcagagacttcaggagggtctggcccaggggactcggggccctctgaccctcggttggctcgtgctctgcccacctccaaggctgaaggcagccttcattccagccctgcaggccccagcagttcaaaaggacagccccctgcagaagaggaggaaggggagagagccttgcgtgaaaaggcggtgaacattcccctggaccctctgcctggacacccactacgggaccctcgctctcagctgcaacagttcagccacatcaagaaggatgtgaccctgagcaagccgagctttgctcgcacagtgctctggaaccctgaagacctgatccccctgcccatccccaagcaggacgtgcccccagtgcctgctgccctgcagtccctacctgctctagatcctaggctacaccgttccacaccccctgggcctccaaacacccggcagcgtccaggctccacagatcccagcacctctggctctaacctacctgactttgaactcctctctcgaatcctcaagaccgtcaatgtcaatacccctggtcagagtgaaaagcccagtgatccgagggtgcggaagacccctactgaccccagattacagaagccagcagatcctgtggcagcctcccgtgcagccaagccctgtcccactgaagcatcgcctcctgctgccagcccaagcggggattcatccccaccggccacggctccctatgacccccgagtgctggctgctggtggcttgggccagggcagcagcagcgggcagagcagtgtgctgagtggtatcagcttatatgacccaaggactcccaatgcaggtggcaaaactgcagagccagcttctgacacaagtgctcagcc

SEQ ID NO: 32171 - DNA, 2706 bp, Mus musculus
caggatccctgaaggacgtttttaaaggctttgaccccacagcctcccccttctgccagtagtgtcactgggggccagtgctccctccactccaccaccctcccagggtgacatttaagggcagcaaccagagttacaggcgggaggtggggcaggtgggcagggtgttctttcttcacatttttcttcccttttttccccatttttaaatagtactttctttgagtcataaattgtatctaaccatcttgggttctggtcagtgctgcaggctcctgggctcccctctgcccagtgagcaacttataccctgcactggatagtggcaagtacccagcctgggacttccctggaactgagggatgcatagctgtctggggaagcactgacggccactcactcaccctgtgctgctgcaagtttgacagaaccacatcacatcgtggagaagctggtgcaggagttcctagagccccagggtcaactgtcctctctagcatgcagcctgtgacagcttgcttcaggacaaagcaacagtgaagtgagaaaatgtcaacaggagagaaagggcccggcaaccctctggccctaacctgctctagcctgtacatcccacatcctccgtccgtctgtccatccagggtttgtctgtcctgaaagtgacacccaccagctctgcgggagactcttggtagacagacctgtggggtagcaggcctggcaggagtgggacagccccttgaagcattctccctcagtattacctaccctgtgccactggcctgaccctcgagacagctcaaggatccgtggtgtggccacctgccagacccccaaggagagaggccaagagtggccctggcacagtgtgtctgctagctgcttccacaccccttagccatgttatctgtagagtaccggatagtgtttgctttttcctcccaagctgacagaagctgggcatcagtgatctgttgtgttggattaataggtccttccccaaatgggacctgaggaaatagcaggtgtccagctgatgtgttgggccttttctaggaaagggaccaagccccttcaagtggggaggcccagagttacctgccatatcccacatagtggaggcgttcccgcagccgccaccactagcctccttagggctggccttgtccaaagaatgggggtgggagcgccaaggggcagagactctccttgaccctctccctaaggttggatcagggaactgggtaagacctgcagaaggtttctctgagtcactcaccaggccctacaagtccgctttcttgcaggctgcctcttttatattgggtctcttggcccaactgcttccttcttgttaataaggagacctgacgcacacagccagtggattcccctccacctcgggaggggacaggctcccacatcccatcccaccctccacaccccaaagagaaatcccttcaaaacagtttggggcctgtagccagggtgggaggggcttgtgccccacagcctcacaacccttggggtcagtgcaccaagatcaagttggttggtttgtcttgtgttttttattttgttttattttcttaaacaatcatcaatgagatttgtctttgggccccagccttggccacgaggccctgaggccaaggctggggccctggtgagcataggataggtagggtgagtacagtgtggcagtgtttgggtcccgacacccctttgaaaaccccctttttgtaaaagccaggcttggtagtgggcacctgtcatcccagcactcaggaggcagggtcaggaggattacaggttcaaagccagtctggtctatattagaaaaagaaaactgtccttttgctaaagaaaaattaaatgaatttttaaggctgaaatctgtgggtaagatggagtctggagctttcctcttggaacagttaaccgaagaccctcatgggcaaggacatccgcttgactccccactcaccatcaggccacacttttaaagaaaaattgttctctaaccaggattgtaacaaatgtgtaaatagtatttctgagttgaaagtcgatggtgcaaatatgtatataacgtactgtatttttacaatgatcgtcgcatggctctcccacccccttttgtactcagtatctgtcttccagaaacctcacctgccttctctctcatgtggtctcttaatccagtaattgtattactgccattaaaggatgcagttattttaaacagtctgtgagtctagtctcatctctgccctgtcagggaacaaagaaggagggtggggagttgtctggtttgtttcattacagtgagatgaaggccagggtttcatgcattctggggagcaccaggcctggtacattccccagccctcagacactcaaataacagtgataaccaatgcaggtgtgcaggcatgtgatcctagcacttaggaggctaaggcaggaggatgcagagtttgaggccagcttgggctagacctgagatgaaaggaaaaaaaaaaaaatcagtcatgtaagacttcatataactagaaccctgattatacattcagaaatgcatgcaggctgcctgtggctgtatttacccacctactgtgctctcagccctctgacagtctccaggttggccttgaattcctgaaactcggccttcaattcctgtgtgctaggtttctaggtaca

SEQ ID NO: 32172 - DNA, 3713 bp, Mus musculus
atgcctggtacccatgaagccagaagagagcacaagaacccctcggactggaggtacagatggttgtgagccaccatgtgggttctgggaactgaactcaggccatctgaaagagcaacaagtactcttaaccttgaagccatctctccaggactgccccccccaccccaccccttcccgtgttattttgaggcagtcgcagtagcccgagtaagccttccgttagctagcactgctccagcctctcactagctgacgttagaagccttgtcccgccctgtgctcgtactgactcatcctccccacccgtcaccctgtcagccccttgggatacgctggaccctgtaactattgactactgctccttcttccacaggcttcttcctgctgggtggcctgtgcgtggtgtggggcggagcctcctatgcggtgggtctggcagcgctgcggggacccatgcaactgtcgcttgctggtgctgccgctggtgtgggggcagtgttggctgccagtctgctctgggcttgtgcagtaggtctctacatgggccagttggaactggacgtggaactggtgcctgaggatgatggggcagccagtacagaaggcccagatgaagcgggcaggccaccccctgagtaaacaacagggctgtggggactggctgggcctgacgactgggacattaaaacctgacccttccgcagttcaagactctgagtgatagctcctgttatctggggaggtggggaggggagaagagggcaacctttggggacgaggctcagtgggtaaaggcacttgctcctaagcctggcgacctgagtttgatactcaggacctgcgtggtagaagaagagacctaatttccacaccataccacacatggacacacatacaagtaaatcagttcaaaggaacaaggccaagcaatcatgagaggcagcatccccggggagggagccccttagggcatggtgtttaattctcaagaatgactccaggacttgatctgtgtctcaggtttggccctctggtgttacactgtcttcagtctcccttccgctgcaccctagtacctgtgggccccggatagggcaagcccagcgtagggtaaaaggcctctggaagcgaggggcctgcgcccagcctgtgcagatgtggatacatcaggctcaactccgcagggccatagcggatggtgcctggggtgcacaggccccgcacaacgggtggcaggaagcctgcatgaaggagggcgggtgaggggtctccgggagttgtcaagccccacggcagcactggatcatgcttcagggctcccgcccggatgacagaagtgaattctggccgaggtggagccggtggatccgagagctcctcttctccactgtcctctgagcctctagcttccttcgggctggcctccactttgatgcgtttgcctcgggcctgagggtccttgtccttgtcctggtccgcaggcacagcctgcttcccgtcaactggaggctcttcctctgaagaagatactttatagttattctttgctgagctctactgctgtaccacacccacagccccttacagcctgcacccgcgggagagggggaagaggtcaagatagaggctctaccactgccaagctatgcccccagcccctcactgggggatcctaggcaggggctctaccactgccaagccacgcccccagcccctcactgggggatcctaggcagggctctatcactgagccacgcccccagcccctcactgggggattctaggcaggggctttaccactgagccacactcccagcccctcactgggggattctagggaggggctctaccactgcgccacactcccagtcccttagtgatggattctcctcaggcctacagttgagccagattctaagccttcttttgattttctatgtgtggatgagggtatggaggtgaacatcaacactggtgctcttcctctatcgctatcatcatcatcattattaccgtgttgtgtgtatacaatggaggcgtacatgccgccatgaaggtgtgcaccaggtcagaggacagctttgctgagtcgggtttctatttctacctttattgggattctgaggatcaaactcaggtcatcacgtttggattgttacccactgagccatctctacggtcgcatttgtgattgctctgtgtgtgtgagtgtgggtgcacaggccccatgatatacatgtgggggtcacagggcaaggcctttctacctgatgaaccatctcactggattaacgagacagagacacttactgaacctagagctcatacatttctggctaggctggctggccagccgactcctgggatctacatgtgtctgtcccaacactgaggtcacccaggtgagtgctggagatccaagcacaggtcttttgtttgcttgggttttgtttttgttttcgacacagggtttctctgtgtagccctggctgccttggaactcactctatggatcaggctggcctggagctcacagaggtccgcctgcctctgcctcccgagtgctgggatgacagatgggtgcataccaccacccggcccacactcaggattttatgcatgcacagcaagccctgtattcacggggtcacctccccaggcccttttactctttgagacatggtcttgctaagttgtccaggctaacattggcatctccctgtctcagcctccccagtagctggggttaaagcccttcactaccacaccagcctcaaagaaggcttctgaaagaatgtgtgtccccagcccttgctcttgaagtgtaggcacagtggggtaggtctgcagttcccaagccccagcgattctccctcctcaccccgcccccaccccccaggcacagagtaggcacattcccacagcacagctaagagccatccagccctgatattgccagtaaagcccaggctgagaaggcccagctagacctctacaaatgatggaaccctccagcacgccctcctacagcaatagaactttgatggtactggacatatctcacctgtattgttctgagacagctactggccacatattttgccagtgactatttgaaatatggtggataaatttgaggatgaagatgtttaattttggagtaggatgaaggttccccctccctcccccaagacaaggtctcacaatgttgttctggctggcctggagctcactctgtagacaaggctggccttgaactcagagatctgcctgccgctgcctcccaactgctttgattaaaggtgtgcaccatcatgacctgcctgattgtgttgttttcgagggaaggtctcgctctgtagctctcctagtctagaactcattatgcagaccaggttggcttcgaacttacagagaccctcctgcctctgactggtggggataagggcttgtccttgaggcactgctccccaccccagctggttttaattgtttagatccctctcatgtgtttcagtgctttgcctgcatgcatgtgtctgtacactgtgtggaggccaggagagagagagagagagagagagagagagagagagagagagagcacattagatccactggaactggagtcacatggttgtgcatcaccatgtgggtgctgggaacataaccccagtcctctgcaagagcagtcagtactctatcactca

SEQ ID NO: 32173 - DNA, 1252 bp, Mus musculus
aagcgtggtagttaaaaattgacccaaagcagacagacatggcagagtttaactttcatcccagacggcagacggaggcagagagttctaggccatctaggactacacagagagaccttgtctaagataggaaagaaagtaagcaagcttgaactcagggtcatagaaccgggtcagtaggtcaaggagcacattcccttcccaagcctgtctgtcagagtttgatctctctgtgctcaaagagaagatcaactgtgggctggagcacatgcttgatccatatatatacatatatatggatcaactcctgaagattgttcttctaggggagttgaagagctggagcagcagttaagaacactggctgctcttccagaggaccggggtttgatgtccagaatctacatggtggctcacaagtgtgtgtaactccaatttcagggggatctagtgccctcttctggcctctgtgggcaccagtgtacatgtgcatgcaggcaaaatacacaaatacataaaataaaagcctcttagaaaatgaaccaagtctacggctataccaccctgaacgtgcccgatcttgtctgatctcggaagctaagcagggtcgggcctggttagtacttcgatgggagaccgcctggaaataccgggtgctgtaggcttaaaaaaaaaaaagacaatgaaccaagtagctaccatcttccccctttgggtctcattttctcagggtcttccttccaatcttcagagagctactttggtgtagaatagcaggggcctaagtttttgaatttggttgtctgtcgaccggatgttgagccacccccacacacgttcctgaccagttggttctgatgcacaggtgggcattgtggaagtggccaagagacgacccggcccggggtgctgtgaccagagtgagcctctatctcttgaagcttccggatggccctctaagtgttgaggggctggacaccgtcagggctctctcagcccccctttttccctccctggggctccaggacaatagacaagatgtttatccccccgccggcgcacatgttgttcgcggtaatgacagtaatcagcctcgctaatgcggcattctctcagcgccagtcaattcgcctaattaccgcctgggaagccggattatttaaatttaaatggtgatttattgcggggcttaatcaatgctattttctctccccccacctcctctctgggtaccagggcaggaagggaatag

SEQ ID NO: 32174 - DNA, 2173 bp, Mus musculus
ctggcatggcccaacagcacagcaagaggagagctttgtgcctatacccagtgtgtggctttcctccaaccccttcccagacttgtgatccattccctgcagcaaaggaacactggaagaaagatggagctcctccacagagacagaaagaaaccacagcaagaaaacagacctcaagtttccactctgacctgccaggtggccactgggtaaacaagtccttttgtctatgtatgacagcaaagcaaggacacctgggcagtaactgcaaccacagccccctccccccactccctaagaacacagcccttggaaggattgttagcatggcccccacccctcctgccaaccagcacactacatacactactatagaaacactacaggtgtgtgcacacagcactcaggttggcatgtttggtgttgaaatggggtcatttcattccatgttatgaatgcaaccagaaagggtgtctgggatatgagcagatgtggcatcttccagaaatgatcatctggttatggaatgaagggacctgttctcaagcaaaggtcatcacagtgacccaacccagacacttccccagcagcctccccatactctgctcctgatgtggcaacccttgtcggctcctgcctttgccccccactttaatctaagcactgggccatgaaatctgacactaaggtaccctgagcataggaggggcatgggtcgcaccattgcactttagaaataacacggagtgttcccaagggcctcaggtggactgccaccctgcctttatctctgtaggataagaggaggatgactggcctctggcccaggtcctggctgtctccctatctctaatacttggcaacataaggtgcttgcaaacactaaggctgccccctgcaaagtaaactccaagacaaaccaaacccaaggtacaaatgtgttacacataaatgttttccttcctgggggtctgtgttggatgttgtgggcctggagtcaataggaacatacaatgtgtgtagtgtccgctaaggttgcagttggtcccctgccctgacttcatgccccaagcctcagctattggaatggcttccattcagtagcttctgtgttggtcctttgtagagatggaagtggagccatcctgctgtgaacagttatgaaccaggggaggctgctgcatgtgcctattatgttggcagtgggtggcaggcagaggcaggcacgcgattagtagagccctgcttgggcctcactttgtggacaccaggctggtgcacctcccttttcaggcactctgagtgtccttcccacccatgacaaggcaaccacagaagtcagaacaatcaggcttgagtgggtggccaggtcagctactgcccttcccagaaagccctggaggtgaccatagcctgtcaccacccaacatcaccacgggctgggttttgtgtttcacattgggtagtatgcattctgtctgcactgtcccaccttctcatctctaccttttaagggatatggaaaggtctggagctctgtctgaccccacactctccattttccccagccaaggcagacagcagcactagcagacggtcttagaaccttcacactgtctctaccactacatggaatgacataaaagcaacttgtaggccagaggggtggggtgaacccttctgtggtctgtacccctggtctagtgggaggaatccctgaagacctgcatcccctaagtgaggaccctacagggtaccttgtgctctgcccccagacccatagccttagcagtgggccaactacaatcctcatctcctaaagtcatctacagatggcaggtggaagaaagtggttctccattccacatccactgccagtgtgcatggggagggcaggggatggactgggtcactctaggactgcagcagccagggacactgtagagaggctaaggctagaggcactattacccaaccatgaagccacccaagtagtggagccaggacataagttattgttcacattaaagaatcatgttccctgtgtacattttaagcaaaggaaaagtcttgggattgtatgggaataaaacttgtttgaaaatttggaatagtgctgctgtcagcttatttttctggtacttgtattttctatgttaaatgatctttatat

SEQ ID NO: 32175 - DNA, 1183 bp, Mus musculus
tagggtctctgctctgcagaggtaagaaaacagtcacattgcttgaatatcttgtgatcatatagctccgtttggttttgtttggttttggttttggtttttttgagacagggtttctctgtagccctggctgccctggaattcattttgtagaccaggctggtctcgaacttagagagagatccacctgccttagaaatctgcctgcctctgcctcccaagtgctgggattaaaggcatgcgccaccaccgcccagcatacctcggtttttacacacaaatgaatgtgagatacaacaaagggaagtgcctcaaggttttctgtttttgagatgacaatattttacttgtgtggatgctctattttattgacttagggttcctacgtagctctttgccttccagtttcacactacagtttctctctattttctcctagctgatttcaaggatctttgaggaggtcctgaagcaggtgcctatcactgtggatttccaagcattattaaacttaaaattataggcttgggagccagtgcatacctttaatttgagcactaaagggggcaaagacatgcagatctctgtgagtttgaggctaatctgccctacatggcaagttccaggtcagccagggaaacagtaagacactgactcaaaccacttatcccatcccaccccccaccccctaccccccataggaaaaagtaaaacaaaactatagacttgggaggttggagagaatattcagcatttaagagcactgtatgttcttgcagaagtctggggtttgagtctcaccacccacaaagcagaatctttaaggtggaaaatacagatacttgggctaggtgtgtagctcagtgctagagcacttacctggcatgtgcaaggacctgagtgtgattcttcacacttcctgagcacacacagagacaggaatctgtgtcctcttaaccctttcacccttcagccactgccaagctaagctgctactctctgaactttgccagattgcatctctgtccccccaaacactgactcgtctgaacatattccaatctcttaaattaaattacatcatctcttgtttctgccctctctctctctctctctctctctctctctctctctctctctctctctcagtttatcctgcttgtgtgatcttgctgcagaaaag

SEQ ID NO: 32176 - DNA, 1873 bp, Mus musculus
catcagtgtggtgggattgtcaggcactgagaaggagaaaggccagtgcggcattgggaagtcttgtctgtgtaaccgctttgtgcgcccaagtgctgatgagtttcacctggaccacacttctgtccttagcaccagtgactttggtgggcgggtggtcaataatgaccactttctgtactggggagaagttagccgctccctggaggattgtgtggaatgtaagatgcacattgtggagcagactgagtttattgacgatcagacttttcaacctcatcgaagcacggcactgcagccctacatcaagagagccgcagccaccaagcttgcttcagctgaaaaactcatgtatttttgcactgaccagctgggactggagcaagactttgagcagaaacagatgccagatgggaagctgctggttgacggtttccttctgggcattgatgttagcaggggcatgaacaggaacttcgatgatcagctcaaatttgtctccaatctctacaatcagcttgcaaaaacaaaaaagcccatagtggtagtcctgactaagtgtgatgagggcgttgagcggtacattagagatgcacatacttttgccttaagcaaaaagaacctccaggttgtagagacctctgcaaggtccaatgtgaatgtggacttggctttcagcaccttagtgcaactcattgataagagtcgagggaagacaaaaatcatcccttactttgaagctctcaagcagcagagtcagcagatagctacagcaaaggacaagtatgagtggttagtgagccgcattgtgaaaaatcacaatgagaactggccgagtgtcagccgaaagatgcaggcctcccctgagtaccaggactatgtctacctggaagggacacagaaggccaagaagctcttcctgcagcacattcaccgcctcaagcatgagcatattgagcgtcggagaaagctgtacctggcagctctgccattggcttttgaagccctcatacctaatctagatgaagtggaccacctgagctgtattaaagcaaaaaagctgttagagaccaagccagagttcttaaagtggtttgttgtacttgaagaaacaccatgggatgccaccagccacattgacaacatggaaaatgagcggattccctttgacttgatggatactgtccctgctgagcagttgtatgagacccacttggagaagctgaggaacgagaggaagagagctgagatgcgaagggctttcaaagaaaacctggagacctctcctttcataactcctgggaaaccttgggaagaagctcgtagttttattatgaatgaagacttctaccagtggctggaagaatctgtgtacatggacatctatggcaagcaccaaaagcagattatagaccgagcaaaggaagagttccaagagttgcttttggagtactcagaattgttttatgagctggagctggacgctaagcccagcaaggagaagatgggtgtcatccaggatgttctgggcgaagagcagagatttaaagcattgcagaagctccaagcagagcgtgatgccctcattctgaagcacatccattttgtgtaccacccgacgaaggagacatgcccaagctgtccagcttgtgtagatgctaagattgaacacttgatcagttctcgctttatcagaccatctgatcggaatcagaagaactctctgtctgacctcaatattgataggatcaatttggttatcttaggcaaagatggccttgcccgagagttggccaatgaaattcgagctctttgtacaaatgatgacaagtatgtaatagatggtaaaatgtatgagctttctctgaggcca

SEQ ID NO: 32177 - DNA, 1275 bp, Mus musculus
aggcaactcttataaaggaaaacatttagttggtactggcttacaggctcagagattcagtccattgtcatcacagcgacgtgtagacagacatagtgctggaggaggagctgagagttttctacatcttgatctgaagaattgtggatccgtggaattgtgtcacttcctccaacaagaccacacccactctgtaaatggccacaggtgacctgtaaggatggttccctactctcttgacccagaaaaccccacaaaatcatgcaaaccaagaggttcaaaccttcatgttcactttaagaacacgtgggaaactacccaggccatcaagggtttgcatatccacaaagccaccaagtatctgaaggatgtcactttaaagaagcaatgtgtgccattctggcggtataatggtagagttggtagatgcacccaggccaaacaatggggctggatacagggacagtggtcataaaagagtgctgaatttttgctgcacgtgcttaaaaatgcagaaaaatgctgaacttaagggtttagatgtggattctctagtcattgaacacattcaggtgaacaaggcagctaagatgcgccgacgaacctacagagctcatggccggattaacccatatatgagccccccctgccacattgagatgatcctcactgagaaggaacagattgttccaaagccagaagaggaggctgcacagaagaaaaagatatcccagaagaaactgaagaaacaaaaactcatggcccggggataaattcagcataaaataaatgcagataaagtttaaaaaaaaaaagaacacacctactccaacactccaacaaggctacactccctaatagagctacttcctgtaggccattgggggccattttatttaaactaccacactgagcctgtttttggttttgtttgtttgttttgtgtgaggcactgtcatcctttcattgatagccagactgtagttattgctgatacattgcatggagattccagtgtcaaatgacattcacatcagagtcacagagccttgttcatggactgtggtgtctgtaacttggaggaagggctgtagtttgcaggctctgtaaagagatagaggagggaaccaaaagacagtagtttgaagtgggaaattctggttttgttggagactcagttgtgtcgtgtgatagttttctggaaactgtctttgaccggttggtttactgaagtgaggacacttgagaggatgttttgctgagaacagacacatg

SEQ ID NO: 32178 - DNA, 1175 bp, Mus musculus
ctggtttgcatagtgactacctttggcctagtggctcactttgcctgcccttatggttggttattatgatttggtcagcaaagcagcagtacattttgaactatgggtcagatattaatgtcacagctattaacatcacagctatggacaaggtcagggcggtttgtgttttggttttgtttgtttgtttgtttttgtttttgtttttgtttttgtttttgtttttgttttcagaattcagtgtggggaaagggagggtaatttctctgggaactgctaatcttgttatggttatttttctgagaacagctcattttgttttggcagctgtagactcagtcattttcaccactatgtttctgaaagtcccctcagaggggaaggggctgggtggtcttgaactcattttggattctacaatctagtaagctgaaccagcactccgaggcaagttcagtgcacacctgttcaggacgtaggcccctacactcccacccaagacagaggtttggtctgtggttgtgtattgtaacgctaaatactggccccagtatctgactgccctcaggaggagatcctcagcgatcctctggcacaccaagtgatactgtgtaaccttgcttcttaatttgaaactattgtttgaacaaagaggcctacagcctgtagcagggcagaagagaggtaggtggggttttggtccccagtcttggggtctgaggcagagaccatgaggaagggaggagggaggagaaggaggaggaggaagttgccatggggtagttagattgtgagcacatggccaagagagcgggcctgttggaggagtggcccaggcagaacgtggcaagtgatatctctcggttactgacaggacattagaccaactaacatagagagttgatacctgcctagctctagtgttcttttgttttgttttgttttgtttcgtttttgtttttgtttttcaggacagggtttctctgtgtagctctggctgtcctggagctcactttgtagactaggctggcttcaaactcagaaatccacctgcctctgcctcccaagtgctgggattaaaggcgtgcgccaccactgctcaccgcatcagccatgaaaatgcataatgtgtactagccattgatttccatagactggagcctaaacacagaggt

SEQ ID NO: 32179 - DNA, 1496 bp, Mus musculus
atctggaaatttgatttttctctccagagcccgaaacgctcggtccactccttctagggctccagtacccaagagtccgagagccaggcgtcctaatcctgggatctcggtctcccggagcaaggcatcccggatctatgccacttgggttgagcttcctgaagacctcagctacctgagtttccttactccttcagggagtcaaagaaccctctgaagagctgttccctactccaacaaggcgctctcaactcccagttttcggggattcgacatcaccaggaaaaataaagggatctccgcatacagctcagggagcctaggaccctccagtttccgagatccggtggacgcataacttcaaggaccgctgcaaagtttcagcctccattctcggtcctaaggacgtcacacctagtctccaggctcacaaggaacctccctgttacggctcagcatggcagtggatccccctaaggctgaccccaaaggggtagtagcggtggattccaccgcgaacggtggccccgcgctgggatccagagaggaccagagtgcgaaagcaggtggttgctgcggttcccgtgaccgggtgcgccgctgcattcgcgccaacctgctggtgctgctcacggtggctgcggtggtggctggcgtggggctggggctgggggtctcggcggcgggcggtgctgacgcgctgggtcccgcgcgcttgaccgctttcgccttcccgggagagctgctgctgcgtctgctgaagatgatcatcctgccgctcgtggtgtgcagcctgatcggaggtgcagccagcttggaccctagcgcgctcggtcgtgtgggcgcctgggcgctgctctttttcctggtcaccacactgctcgcgtcggcgctcggcgtgggtttggccctggcgctgaagccgggcgccgccgttaccgccatcacctccatcaacgactctgttgtagacccctgtgcccgcagtgcaccaaccaaagaggtgctggattcctttctagatctcgtgaggtacgttcccgccaggcagtggggtggttaggggccagtgcaagcgtgcaatctttctgctttaccccctctgagtacagggattacccgtgtgtgccgccactagtcaccaaggttgagtcctccagattgagtcatgccttctagaatctaggaaaataaggtaacggtgacaggaccgctaacatcttggaagggtgaacttttacggaagttctccaaatttgggggcgggcctaaacatggagggcttttagaggaaggaaaaataataagccttcttagtcttgttacgctttttggagacagtacagggtctcgtacagccaagcctgtccttgaactctccttagcgccctacctccatcaccctagtggctgggatgaaggagcatcatttagcttactgaaaacaagtctgctacaagtatctcaggctgctctcttgcctcggcctccttcct

SEQ ID NO: 32180 - DNA, 1226 bp, Mus musculus
ataaaagtagctctgaggatgtagatcagtagtagagtgggcaaggtccttgtgttctatcatggggggcggggggggggtgggagattggtgggggttaggctcagggcttaaggttttgtttttgtttttgtttttttttgccaagcctgatgacttgaggttgctctctggtcacaagagatgaagaaaacagactcctgcacacaagtaggggcacacatgctcctcctccccccccccccccccccccagtaattaaatgtttatggccaggcaccgtggcgcaggcctttaatcacagcacaatggcataggcaggtggatctcctcagtgagttcaaggccaactagggctatacagtgagacactatcaaaaaaaaaaaaaaaagtagggtggagttgtatgtgtggaggatgtgactgcagtctaagtactttatgatccccttcttaagccaccaagagagaatcccattgccactctccaggaagccagccccgtccctctctgcctgcgctgcctcctccccaccctcccatgacagcatctaacatcggtgtctgtttctgcaggaatattttcccctccaatctggtgtctgctgccttccgctctgtgagtcctctggggcttaggggtgggatggtgaccgataagaaaagggaaatgcgtgtatgagtttgccaagagcattctgagtttgccactgagactcatccctgcctttctcactaagaaatgagattctggggagctggccagacaaccagacaacaggtgctgtgtgagctgacagcctcaagtttgattctcagaacacgcagttgtcctctgacctccagacacattcggggggccacatgggccacacacacatacacacaaagttaagttttaaaaagaaatgagattatgggcttggtggagcctgtactactagctcagaaaggctgaggttcagcagaaagttcaggctacacaaggggatagcatctcaataagtgaaactggcatgaacggctcgtacctgtaatcccagtgcttgggaagtggatggggaaggaccaggagttcaaggttatcattgactgcatagggagttagaagtcagcctgggctacaagagaccttgtctttaaaaagggaaaggacgggaggaatgagggatgcttggggctggtttggggctttgtgtagctttggtaacaatggacactgatt

SEQ ID NO: 32181 - DNA, 1527 bp, Mus musculus
ttggagtcttataaggaaccctggaagagcagtgagccattgtagcttgcagtcgtgactcctaggcctggcagcttacgctcagttctgtcgtagctaccttaatcctcctgtgtctcagtttcctcatctgtacaatggggaggtagcaaagtgcctgctacacaaggatgaggccctggatttggatctctaaccccatatgacccctagactcggcagacggatggatctctgagcttgtgggcctgtcagtctagctgattgagctcattcatggccagttcagtgagagctgctgtcacagaaaataaggatgtgaggtgtagtgcacacatctttaattccagtacttgggaggccaaggcaggagaatctcttgagtttgaaggcagcctggtttacatactgagttccaggacagctatgtagactctgactcctaaatcaactcttctagtgggtgaaggcaggccacctgggccctggcctcctgcctccccttccttccgtctcacattattgttgtgtcccccttttagggacaggtcctgtactgtcctcaacgtggaaggtgatgcttttggggctggactgcttcagagttacgtggatcgaaccaagatgccgagctcagagcccgaattgatccaggtgaagaacgaggtgtctctgaatccactgcccctcgccacagaggaggggaatcccctcctgaaacagtaccagggacccaccggggactccagtgccacgttcgaaaaggaatctgtcatgtgaatatcaggagggactttctacgccctggtgacttcacgttggaagccgggtcttgcgagctggagaaatggactggatgagggctctaggggtgggctgtttacacactccaggaatctaggggtcggtgtctccttcctggagaggctattaggagccttgttgctggggtgcatatgcttatatgtgaatgtgtccacaaatcccaccccctctccgttctgtcccccattcaaggaatgacattctcagtcacccagagccatctggcctaccctctcaggaaatgggttgtcctgtagagttctctacccttttaaaggcaaaagtattgggatgcaatactatcttaatgtccctatctgtggtgtgtgtgcacttgctgtgaccttcccagtagtccctccatgacagaaaacactcccatgagtctcgagggaaagccaagaataaatgtcactccagaacacatttttttttagcaataaaatggtgtcaaatgtattgaccatggccctagagtctgagtaataccaggtgtgttgtcacatgtctttcctttctgcactggggaagcagcttccgaggttcgtgcctggggaaggacacgggcaggagattcagaagctaaagggcatcctgggctgtgacactgtcccaaaccttttatgctggacacagtgtcacacaccttcaatcctagtactgcggggcagaggaaggcagatacctgagttcgaccctggc

SEQ ID NO: 32182 - DNA, 1131 bp, Mus musculus
ggacgcttggctccagtgcttgcttcctccactagagggcacttctgtcccgcttcagttcgtgtttgatgaccgctcgcggctctgcttcatcaccttcatctctggttttcttggagtggctctgggaggtgggacagcactggccacctcctctcctccccgaatgtggcactttcctttgagagtgctgcttgatgtatctgctgcttctaaccccatcttgctcttggaggactgactgggctctctctggtttgggatctggccaatgcattacctctttatttcagccctctgcacctgttccccgccttccccctcccttctaggaagggataaaccttcgccatagctcacatttacaaagagctttcgggctcaggcatacactcggaagtgacagctgctattacgtccattttccggggaggaaaactgaggccaaaatgacagtcacttgccagtaatcagatattttaggaagtggctagtaagggacttgaattcagatcaccgtttcaaggcccacacttcatttcctctctaggttctgctgtagaaatagtacccaagtggagccttgccatggctgtgccactcaaacaggtttaaaaaaaaattctcatttaattatgcatataaattatgttcaaaccagtctgtatattgttaaataagacttaaattatgctactttaaagtttaaaaattcaagacaaatagagccgtttgtttccttgcttcattctacagcttgttccacacactccctgaatctccccacacccaccctgcaccccatgaggagcaggagtttaaggcaggtgtctaactttctaggccaaactggcttcaaacttacggtcctcctgtctctgcctgtggagcgctgggattacaagtgtgcaccacaatatctggtccaaaggaggaggaggatttttattggtggtccttgacccaacctctgtccttgctgcaaatcctaggcgagcctgcaagtcatagccctccctcctcagtctccctggcgctagggttacaggtctgtgccaccacgcccttgtcccggctttttatttatttttaaagcacaggaacagggatgtaggcctcgggtttttctag

SEQ ID NO: 32183 - DNA, 1453 bp, Mus musculus
cgcaagaagcatgaggaggccatccatgcagtggcctgccatcccagcaaggcacttattgccagtgctggtgctgatgccctagccaaggtcttcgtatgatcccacctggcctcgccctggctgcacagtgtcagggagcggggccaggcagtggggctgaggtaaggatcagggccatttgtgttctagataggaatgcagacacccagtgtccttgccccagaagacacccctatacccaccccacctccatgatccacttgcctgtcagttgggttgtgccaaagcccacagtcctgtgggataaatgaggcttcccggagaagatagagggaggaattggagctagtgaggggcactgtcctaaccagctgccttgcctttgtctctccaggcagcccccagcctcaccttcagaggctctgagtcttggcctctttcatcttcctggagcctggtggtgctaaaggccctttccccaggagtcacccctcaaggatggcctctggggtttctgctcatgccccaaccccaactcctgacatagctgtcgtcctgagtttgacacagcccaggctgggtgtcctttgggatctgattttgaccaagatgaaagaagatgccaggctccctcctagagtgccaccctccctcattcatcagatgaagggctgtgcagagaggggtctcctggggccctcctatgtgggccccaggttgtccttttggacctcagtccattcctcttgcttcccaacactaaccaagcctctggggccaggccttcctgggaagggcctccactcctctggggcattgtcctagccacaggccctccttgagatgtagagagagggtggagtgggccctgtgcccctagttctctgtatatctgtataaaggaatgggattttaatggcacccaccccacgttatcactgtgtgatagtctgtcagtctcctccttgctccacactttggcctctatttatttcactctttatttgggtcccaccttatgccctcggttcccctttcaggttcctgttcataagccccttcctttttgccccaacttgtatgtgaaaaaaattgtctcaataaaccctttggagtaagataggttttccaggccatctgtcaaggggatggtggacagtaggggaaggccactccctctgccttggttgagtggagtctggagagagggatatatggtagattgggggtctgtggtcgactgggatggggaacgaggtgacatgtgtggggggggtggaaatggaagcacatggccacatctccatgatcctccccttcctgtccctcaacttgtgctcccccgcgcagtgagctagggagcagatgctgggatggagcagtgaacatttagttgaagaccccttgcctgctcaggggctgagaacaaaagcccctttcctgccccatg

SEQ ID NO: 32184 - DNA, 1133 bp, Mus musculus
ctccgtgggccacactctccccatctgtacaatgggtgtacgcaaatgcagtaattctgttcgggtctctcctccttcacccccgttttaattttagaagcttagtctgttctccacttctctgacatagccttctcattcctcttttccttgcccagatagggtccccttctcattcacaaagtgccccctccatgtccctggacccttaggataccccctggggcccccaagtcagagactgtctgactcaggttatgcctacagagtgccatgccctggaagaggaagtggcactgtcttaggggctttgagggtcaagtaggagttgccaacacctggaaaggactctttctgctccatccttggacagtcatggggaattgggaggttagagagaggaaggaagatggtttcaatctcgtgcctctccccacggggggtgggggacgctgaatgaccctcagctgttccaatccagtgggtttttttgatttgtttgtttttgtttttttttttttattaaagaaattactgtatttattatgacaatggtgactccccggtgcatggggggccagattctgtgtgtttctctaacctctttgtaaataaatgcacagtgttacatacccctggattcttgttctgcactgaatgagagctgcgtccctttcaacctgcatgtatggagcgccttcagtttgctgtggagcggcagtgagcccagccaggtggtgggcaccaggctgaatttgaatgtcgcttcacggccatttttctttcccagtgactctgactttctagttatatctggacattgttatgtattcctaagaagggcaagtgaagaccagggctggggcgttggctcagtgggtcaagcccttgccgtaccggcgtgaggatgtgagtgctggtcctcagacgccttggaaagcctgactcactagtgttcatatgcgaccccagtgctcctgtggagacaggagacttcctgggagctcaagggccagccaccctggtatatgaagtgctaaactgcagactatggcgaggtagaaggcaagggccggcaccctggcttgtcctcaggtctccacacatgaagcactgtttgtgtgtacctcata

SEQ ID NO: 32185 - DNA, 2412 bp, Mus musculus
ctttgacaaggtaagcagtcagccctaggacagatgtcaaacagcaaagccacagtgcccaccccacccccgcttcagagccccctcacccagtgctgtgtgggggtggcagttgacagtccctgccctctgcagccctaccagcaggggagcctgagtgacaagcctttttccccaacccccaggatgggaatggctatattagcgctgccgagctgcgtcacgtcatgacgaacctgggggagaagctgacagatgaggaagtggatgagatgatccgagaggccgacattgatggagatggccaggtcaattatgaaggtgagttgcattgggctcatcgtccgtgtcccagagctgggaggactgtgagggctcagccggtgactgacggactcaaccctgttatctcttggcagagtttgtacagatgatgactgcgaagtgaaggcccgggcagctggccatgcccgttctcctgatctcttctcgcgctctcctctcttcaacactcccctgcgtacccggttctagcaaacagcaattgattgactgagaatctgataaagcaccaaaagatttgtcccaagctgcatgactgctctctctccttcctcctgactgtccctccacgccctcaccgcttcctttggccttccccttccattcccagtctccaggcctgatgcattcacaaggtgaaccccattgccctgccctggggagcctctgccctcctcctccagcccggatggctctcctccggttttggtttgtttccttttgtttgcccttcttttgggtgccggggtggccaccattcctgtccctgctcagtggggaggggagcaaggccttctgccaggtggaggagcatgtcccctgccactgtcgcatgcaccccagccctgtgactctgtgtgcaagcccagcagcctgtggggcggggtgccaagaggggatgacgggacgttccaggaccgagggagttgaggatgtgacccaggacggggggcgggggggggggttgtgtgtgtggaagggtgggaagaggcaggaaggccttggaagctaacatgctttcgctactggagggggactgcatagagtggacggcactcgggtctcgctgccgctgttctgaaaccatctggctggctttctgaggtcaggctgggtggggggctgtcatcggccatgctgccgatcatactcgccctcctcatccctccagccatgtcccgctgttctgtaaatacctggtgctaacatcccatgccgctcccccgtggcacccccagccacctgcccagttcagggctggtccaggaatggatgtgggggatggtcgctgtgtaatgtgccggtgatctttttttccccttcccctttatgccccttaaaactttgatttttgtcctaaacatgccgggccaactaaagggtggggagaggagagatgcgccccaccatgctcacaagaaccaacctgcaataaacacttctatgggccgccgcgcagagcacgcagcgggcacctcctgcccctccgtggtgacttggcatcgctttctgccctcgccctgcctgccccactccccagcggagagcatgatccgcacccttgcttctgactctagcctctgggacacgtcagtcaacgcgggcagttcggtctgggttcctttcctttctctgttctcatctggccccccagggtgatcttgttgctttttgctgggacctgccagctttgagactctccaccccttggcaccagccttaagggagggagggacagagcaaatcaggagacccagcctagagttgagggcaagggcaggtaggcgtgaggctgtggactttgcggaatgtttcggggttttattttggttttttgtttttccttttttttttttttttttaaacaaacaaacaaaccgggcaatattgtgttcagttcaagctgtgaagaaaaatatatatcaatgttttccaataaaatacagtgactacctgtctggactcttccgtctgtcctcagccttcctctgtggacaggtcgccaagagcaaggcgctgccctggctgggcagtcagggtctgtgtatgaagactgcgaagaacggcccgtcaccaggagagcagctgaaggaccctgactcaggagaaggaaggatgctacagccagaggaactacagagaccttgtgacaggagaggacatgggtggggagcagaggatgacagggccttcgtactcacggtgggtctcacaggtggccacctgggtatgccacccaggagcctggaggggcactaacggcatctgtagtagcaggagtgctgcaaaggggattcgacttgaagtgaaaagcagagcagctttgtccctgagttcgaggccagcctg

SEQ ID NO: 32186 - DNA, 1099 bp, Mus musculus
ctgcctgcccatccttccagacaccggtttctggccgaacagttgggatttgctgtgagccacctctggccctgactgggccttagggagaagcaagagtgttgggcactatgggcattagggggtcttggaagggttaagggccgtgtgtgcgtgtgtgtgttcgcgcgcatgtgtgcacgcgtgtgtgtgcatgcgtgttcgcgcgcgtgtgtgtgcgtgtgtgttgaggggaaagtattccataaatgaaagtttgtgagggctgagaactggaggaggaataaaaatgggaggagaggaggggaatgctggggggcggggctggaggaagagggagaagaggggcagggaggaagagggaaggaagggaaggcgttggcattagcttactctcctgaggctctgcaggtgggaaagaggggaagccaactcccccacccccacccccaccccaccctagcccttgtccacgggttgaattggtaatataccctgccaaaatgttctgctttggaaaacttaggtgaaatccagatttctgggtttctaggcaagccctgccccctcctactgtgactccccagctgtcactggccactcctcagctgtctgcccttgtaactcttgacttaatataacaatggagtcccttgttcacccctctccccactgtgtgcagtatataccccagatctccttaaagggtcaagtgtccctatcatgtaagaagcagttgctgtgccccaccctggcctcattggtccctaactaagcctgactgctgctggccaggctccagccctcagctgtccctgagagcagccgcctcagctgtgtgttttcctgtagtgctacgtgccagaagccccggctgggctgcccagctccgtgtttccatgtgtagataatgctttgccctgcacagcactttgaaaccctcttgttcccgcgtgtgcgaatgtgtgcgtgtgtgtgcgtgtgttcaactttctatccccaggaagtgaccggttcgtggtacctggaccctctaggatggaacagaagttctgaccagcctcacacccagaccgtccagctcctcagtggggacata

SEQ ID NO: 32187 - DNA, 1196 bp, Mus musculus
tcccccacctttccgtggctttcctccagcccttcactgtggtttctttggcaccaccatctctccatggcaagtgtgtctccctcttctctcctctcctctgcatccccttcctgtctcagacctcgctccctccctctgttccccaccttctcataatctccagccccaaccacacaagcccctctgcccctgttcctacagtgaccagatgggaaacaaagcctcctacatccacctccagggctccgacctgcggccccagttccaccaattcacagcagtggtgagtgacctgggacagggcactgcctgggcgagtgctttgtatgggcaagtctcctgactgtctctctccttctgtccctgctgcagcctcaccccaatgtcaagcccatggcatacgccaacacgcttctgcagctaggaatgatgtgaggctgtcagcagcagtgagccgggacttgcccagctgaatggccccgccctcggcctgctgccccgccccagggcaacgttggacccccttttactttgtaaagtttgtatttattcccctttaggttgcagagggggtgggggcagcgtggggcagcagacgacaggctcctggtcagagaaaggagactggaggtagggcacagcctgggcatttggaggaaggccagcctgggtaggggtggggccaagaggaggtcttgccccttcacctgcatggctcctcccctggtaaagcaataggaccctgccataggaagaccccaaaagagggtcatcagggaggcctcctcctggtagcctcagggtggggcaaggctggggcccaccccccagctattttatgttctgtaattaactatgttaaaataaaataaagtcattattgtaagtcaaacctcatctcaaacccacctcgacgtgtgtccaccacgtacaagcccctccagggtgggtacagtttggttctgggtgcccctcagtgatgtggacatcacaggacaagagtcaccacagaagtatcgtcggacccctgagacctgtgcaggctgcaggctgacctcagacccctcagaagcctctgttctagctgagctttgcaaggaaacggcatagtgggtggagcatgcggagccttctgaaccctcatctcccaacagcaccgcaaagtccatgctcagtgctctgggctcccaagc

SEQ ID NO: 32188 - DNA, 1230 bp, Mus musculus
ccgtggcaaatgtgggaagactctgggtcagatttcacctcaaacaacttatggagtctcagccttccaactgccccccagctctgcttgccatgtctgctcctgacttcatgctggccccagacgctgcctaaataatgacttcatttgtgatcttcctgtgttagggggagccagcgacttcctccactccacagacctataatctctggatcttgaatacttgactcccacctttactgtttgtagactgtgcaacttctagccttccctggacctaggctataccactttctctcttccttgcacctagacatgtagctcctggtctttgttggctctagactgaaaacccttgggccttctctggttctagagatctctgggttctctgattctagactttctacttcttggttctaaaacatacaatccatggcttttccctggctctctgactccatatttctcatcttttttctgtttctagaatgtgaaacctgtgagcttcattggctgtagactgtaccaccagtggtctcctctagtttgtgactcatgacctctggccttcccttgttctagacactgtggcctctggcctccatggttctaaactgtgttgttcctgccttcttttgttctagactgttcaatctctgacattctctagttctagtctgtacagtctccagtcttttacctgactctagactgcaggcctttggacctggctctggttctagaccatgccacttctctggccttttctctgattctagactttaggccctctggttttctgtggttctagaacaggggttctcaaccttcctaatgctgcaaccctctaatacagtttctcatgttgtagtgaccactgactataaatttatttcattgctgcttcataactgtaattttgcatctgttatgaatcataatgtaaatatctggtatgcaggatatctgatatctgatcctcaaagtggtcacagcccacagattgagagctgctgttctagactctacagcctatgagcttctttgattctaggttatgctgcctctggtcttcactggttctaaactagatgaccactagccttctctggcattccctggttctagactgtgctgtcattgacttccccctggttctacactgtgttatcattggcttcccccctggttctagacagcatcatttccaacatggtctgttaaaga

SEQ ID NO: 32189 - DNA, 1266 bp, Mus musculus
ttctaaagactaaaattccttttgtgcttaaaattcagctgagagcaacagctctcaaagctgttctccagctactctctgaaccagctcccgacaggaggccggagactagcctcagctttacaatttgcatttgaataaagtacctagacttccccgaaagaagttctgctttcctactttctcactgtctttcaagattttgtctttcaagcaggtaaatcaacattcccgaggcggaccagtggatgtgcatccccgccccccctagagcacacaggtggcagctgttacccccagtctcaggacatttccagcacgtggttttcagtctgagttaaaaatttaggtttacctagagggcaagaagagcagatatttccatattaataaagattggtttttattttgatagacaggcttagccccttagctgacctctggcttttcacccttgctgttactgcaaggtgtccttagctcaataggctgtagaaaaaacagggatgaggaggaacgacttccagctcctattttagccacaaatcgtggtgttactaacgacataattcttgcttgggctttgctaattctgaggttgataattctcctttaggagctacacaacactcagaactgtgcatactggtttgtgattgtacaaattcagtatgggcactgcttggtgcagagatacttactgcaagggaaggtccggcttgaccatttctgagtttcctgtgagataaacccggtttaaaagaggttggtaccaaattttggttaaaaataaaaaatattctccggctctacctcgtctccccaaaaggtaccgagagccacatgtgtgggttttacccacgggaggaatcgggtccatgtccacccaagccaaggttaaaagcccactcatctacggatgagaaaatcatttgatcacctcagttaagcgttgccttatttaacttaattaataggggagagagagattggagacgtactattgaaagggcaagcccttcactgcctcccacccaaataaaagagccggtcgaacgccttctccctgtttcccacctatcttccaaaaatgcggaggaattcaacttagtgttattttcacatcgttcagtcaaacttagccagagttccaacgccctacttaaaattcaactagaaagttacctaccaagtactaattagcattataaagtcagagtctgcagctccaggcctttcagttagttgtttactagaaaggacagt

SEQ ID NO: 32190 - DNA, 1169 bp, Mus musculus
tggtgttgctgtgttttggggatagggcttctgtgttgggatcttgttatgcaacccaggctggcctcaaagttttggcaacatttcctgcctctgtctgagtgctgggatagctagctggtgtgcaccatcatgcagagccgagagtcagttcctggatctaccgatgatctcgggagaatgcgctcactgttctgagcctcattccttgtctgaaagatgagtttaaaaatgatgccttcctaccagagctgttagcgagggttgaacagataatagcataggaagcacggagaactgggttgagtgtggccgtcccggtacttgggaggctgaatcctgagttctgagccagagtggaacccactctccaaagaccaagattggagagagcgctggctgcccttctggaggacctggttcaattcccagcaaccacatggcagcccacaactctctgtaactccagctccagaggcaacgctgtcttttggcctctgtagacaccaggtgtgcctctaggtctctgtcttgtccccattttcaggaccctggccatggaccagcccgctggcctgcaggtggactacatcttccggggtgtggagcacgctgtgcgggttgtggtttctgggcaggtgctggagctggaggtggaggaccggatgacagctgaccagtggcgtggagagtttgatgccaactgtgagtgtgcttgcgggggtgggctccccttcctcccggagctgaggctgagccaagctgtgtgtgttcttgcctcttctgaagctcttcaaggcggggcaggagtgtggctcccattgatctggccagaggcaacgggggtgggcagagctggagaacttactccagcatattgcctttgtgctgggcaagtggtcagacctcaggaagaacttttctttccactcagtcattgaagacttgactcataagacggggaactttaaacagttcagcattttctgtaacatgctggagtcggccctcacccaggtaaggaccagtttcagggtcggggaggtttctgttacccagagtttggggtgtggggctgtggatggctacctggtgtaggcagggtgcttggtcttcagaccttctcttgcacatgccagggggtctgattctctctctctctctctctc

SEQ ID NO: 32191 - DNA, 6073 bp, Mus musculus
gaggaggggagggagccttcaggtcacctggaatgaggtgcctctcccaaacacaacatcctgcctctctgattgcagttccagaacctggggaagagacccaagtaggagtagaggtagccacccaggagtcagagctgaagtgaggggtttcaaacatagacactcaccccggtccgagcccccaggatccccacatttcctcagctcctctctccccctgcagtattccctggaatggaagtgtaactttctccgttgagcagagctattcctgctgggaatgactccagctctgggatgctgcaggtcctgtgagccacactattgtgcgaggcccaggagcagctggctgtaacatcttagggctcttcctagaggaacgagggtccgtgttgtgatgtcactgaatcaagtatttaccgggtgcttccagtaactccctatgatgtcataggaaggatttcctcagaggctacttccggtactggttagagaaaatcatttcctgtgaggtcccaacaaaaggcctcaaaggtcgcttctgtagatggcagaggcatgtacttcctgtggaatctcgaggtcacttcctgtggcatcatagggatgaagcatgcgcttccggtgttggacagtggccagtccctaagattccccctcctccctctacactcctctttggtgggtgttggccctgggtgagggggaatccttaggaagaatgggacttgggtttaacatggaagattgtaagggggaaaaaaaatcctgtcagggttatctctgtccagacacgctatctgtgaacttgccttgacaggcacgaatgggagacgaagctagtgaaaatgaatgattgctaaagatccccccttccccacccctgccttttgtgtgcatgcctgtgtctacgtggtttcatttcattgatggatgagccaaatgtatggtggctctgtcaggccagtgtgatctggtgtagagttcagtgagccttgcaaagtttagggtatctcgggctgaaatgccttgcgcagtctgccgaatttgaagcttggcggcttccagggagctggtgtatgttgacgatcttgattggtcagaaatgttccagtgtgctcagccttattagactcagaggagctaggagattctctggaagtacgacaaaccaggctaccctgggagttgtcttgggagtggctcacttggcatggtggctctggtcagctctgaagagtcagggcctgaaaaacctatagactaggattgctgagacatccccctgtcccctaacatcgccccctctctgttggagagcaccttcaatttcctccaaccccaagcagggtcctcagagccctgtctccatcatcagcatctctgggggagggacaccccatgcccactccctcctccatccattcctaggtcttccagaccctgctcttctccatggctttggggatatctggcctccttgtttctatccctacaaaggagctgggaggagagagaccacccagatgatgcctactacagccttcaagcctgggaggccccccctaccccgtgctagagagccaccccaaaatcaaaatgtgaaaatccctagaaagcaatagccttcgaggtacctcgcactgactccccctcccccagcccttccacaggaatgggaggctatggcttgagcactggggtgacttttttccatgtcctcatctccccagtgaggggcaggccccatttccttgacacacccccatctcccacctcctatcgctgctgcccctttatccctaatctccaccctgagcccagatggagattttagtgccaaaacaattcttgataccactttgtacatatcttctacagttggggctgctgagattggaggtgggggccggcccacagggccattgctcccctccacctcttaaatgaccttacagtatttcatgtagctccacctgcatgtgggtagtaaagtatctagctggaatccccccccccccgcgcgcgcgcgcccgtaaaaccctcaggctccatgaggaggggaaggaataggggtgaagcaatgtccaggatgggtaggtgggataaagacactctatttgtaaatcatctgtgccctctcttggacagcctgctttccataagcccattggctggagtctgggtccattccctgtgtgacatgcccgtgttctcagggatccattcccccaccagccagggctatctgaaaagtagtttgctagcttagtaagctggtccactcaccatgttggtgagtgaggagtggcacacctccccacccgcattgtaccctgggaaattccatcatcttccctatcccttgaaaatcccttctgaaatccaacctcagtctttctgtactgtagttggtccagaagggatacataatgcaggtcagggatgagaattacttttaaaataatagtaataacaaagctcattccccgccccttctgcctgttagccaatcagatcgcaaaggatctgaccggcctccttgcatcccactcttcagcaccagtaggtgcttagtaagatagttaagtgttgcctgcattgaactgtctcatctgccctcctgcttccgatacccctgcccccagcattctcctctgcctccctaaggcccactgggttttcctcttgtggttgcccctcccccacggttctctgtcctgtctctacctttgtctgtattcttctcctcctgaattctcgactctcatttcccctttaaaagcaaaaagtgccaaacttcctcggaactgagccgatctggggtggggggatgaggatcttagatggagggaggaaaccacctctcttagaggggggggggccttaagaggcaaagaaaacactttaggatgctgagctaaattggatccccttcctcgttcctctcaccctgagttttttcttagaatctttataagaaaaaaagaaaaagaaaaaaaaaacattttcaactaacccctacttttttggattcctctcccccaaattccaccagccaaggagaaccccctttgcctttctctgggcaaatccattgaaactggggatggagagaaagactccaccctcttttgctagcccaacggggtggctgctggggaaggacctcaaagcatgacaagaggggttcgaaagtgccaaatttcaccttcttcatcctgtcttgggcagggctctgagccagcctgcccggtcatcagctttgccctctcccagccatctctccgtgggcgggaaaattttgccgcaataattagcagggcagggatcggaaggcagggattttgcagtctctgtctgtactggacttggaggtgggaattatgggagcgtggcaagagtctttaaaatggttggggacctatactcggaatattacggtaccacttgttttcccacggtatttttttttttttcctctctccactcttgaccaaccaaatcccttggaatatcggacctccgttcccacctcagttctgtttcttcagcccgcccctgtggccaacaccatccttattactttatggctagctggtctccagctatttgaaaaaggagaggaggttctcccttgcatggactcttgctgtttcgagcctaacaggttaatttgcaaaagcgttcaccagagcagcggtgaaggtggcaatctaggcgtccaggatgctccactaggttgtacacctgtcggacagccagacaggccttctgcccagggcatcagccccaagcgccatccggaattgaggccggcgtcgtcaaaacctgaactggttgtcaccatgggggagcacagaaccgcaatacccaggtcggggggcagagaagcctggtttacgctttgtggagtgtggacaccgagccttgcggtccgagccctctctccaccacagtcagcggtctcgatgccccagctggtgtgtccgttccatcgggtccccacggctatcatcggaggcatagacaacctcccgcttagtggcaggagggagggaaagtctctggagggtggtggtggtgaagactgctggtttttaaccccttctcagacagtctaggacactggtctccttagaattaatatagggagaccctcctccttcctcccttccccccaccccctcccaccccccacaaaaccaccaacctctcatcttctaagtgactccatcaccaccggccaccacgggaacctgcggcctcattgctccagcccgccccactcgaccgtcagactcgctccatcgaactcttttaattaaccctttctgtgttcatcccacggaaaacctgtgtgtctggcagggaagccaggggggtggatgctaagggcagttgctaccttccctccatctcctcccagcgcccatgcctccccatgccatgccccaatccttatccctcaccccttaggatccgcctcccctgggggcacagggatcttctagaaatacctttgcagtttggctttgcaaaggccggcctagggggcgtggcctccccatcggagcgctcactctgactgtcctccccgttgcccccacccactccccacgccttcattgtaaatagtcacttttgtacttggtttgagccaggcgacgtggggagtgtctctctctttctctctctctctctctctctctctctctctctctctctctctctctctcttatttgtgttggcatctcaactcctggaggcatggtccacatcccggttcgatttgggagaaacccaaggtgtgccccgccaaaatgttaaggatctcgagagaacagtattaactcggacagctggctggggtgcacaggtcctccgaccgggaggagggagagaaagcctttgttcttgagatcctgtgaaatgggttcgttctccgagctttctgaagaaccttggtggagctgagaattgaatctctcctctgcttcctctgttggaggctggctcaaaaagaatggctttgggatggggcagtctttggagaattgactgctgaattcttcctgggacctgaagctaacctctggtaggcttgttttcttgcaaagaggtagtcagatgaacatccctctccaaccgttagaggaaaggtccaagccccgcggctggccctgcctgctgccactctgccgcattatagtttgcgggtgggacgggcagtgaagtggccatgcctccagtttctccattcaaacccctcttaactgatttccttccatcctctttgaccagcgccgccgcccacttcctctctgccacctccagaagctcttggctggggtcaccgcactctcttccctatccccccatcgccatgcctgggccatgcccacatctcccacccactcacccaccccccagtgtccgttgtgtgacctagtgcaccatgtattagcttccatggacccccccccccacctacccactccccgctcccaccacacccctcccccaccccttctccctcggcgacttcacctttttttgccgcgataaacgtcatctcagcatctgtgtctaatgttgtcttttttgcttggcatcacacacgccttcttaacccatccccttccctctccctcctccctgacacctccaccctcatcctcaactcttttcccctttgtcccccatcccccacccagggctctgggcatttaagggaggggggacctttaaggatggtctcagaggagggaggggtgtgttctctgatttgggtgaacaaatgagagtaagcatggccaaagaaagtaagtgtttcaaggctgaacttgtccatccaatatccagtcctgggaaccatggtcaccagcagccacacatacacagaacccacagacagctcctggacacccgtgtccactgggagcagctcctcgactccagtagcaccagaatagcccggggccaggtgcttggagcgatgcaagaccccacctcagacccctgagattttgcccatctgagccaccaaccttgccaactgtagaatga

SEQ ID NO: 32192 - DNA, 1223 bp, Mus musculus
ggtgcacagcaggggcacctggcggcgttccggggggcgccatggcgtccgtgcaagcgtcccgccgccagtggtgctacctgtgcgacctgcccaagatgccgtgggccatggtgtgggacttcagcgaggctgtgtgccgcgggtgcgtgaatttcgagggcgcggaccgcatcgagctgctcatcgacgccgcccgccagctcaagcgcagccacgtgctccccgagggccgctcgcccggacccccggctctcaagcacccgacttccaaggacctagcctccacgggctcccagggctcccagttgccacccccgcaggcccaggcgcagccatcggggaccggcggtagcgtctcaggcccggaccgctatgacagggctacttcatccagccgcctggcgctgccttcgccggctttggagtacaccctggggtcccgcttggccaacgggctgggccgcgaggaggccgtggcggaaggggcacgcagggctttgcttggctccatccccagcttgatgccccccgggctgctggcagctgcagtgtctggccttggaggccgagctctgacgctggcacctggcttaagccccgctcgtccacttttcggctccgatttcgagaaggagaagcagcagaggaatgcggactgcttggcagaactgaacgaggccatgcggggccgggcggaggagtggcatgggcgtcccaaggctgtaagggaacagctactggctctgtccgcctgtgcccctttcaatgttcgattcaagaaggaccacgggctggtgggacgggtgttcgcctttgatgccactgcccgccctccgggctatgagttcgagctgaagctcttcaccgaatacccctgtggttctggcaatgtttacgcgggggtccttgcagtggctcgccagatgtttcatgatgctcttcgagagccagggaaggccctggcctcatcgggcttcaagtacctcgagtatgaacggcgccatggttcaggggaatggcgccagttaggagagctgcttacggatggggtccgcagcttccgagagcctgctcctgcggaggccctgccccagcagtacccagaaccggcccctgctgctctgtgtggcccacctccaagagccccatcccgaaacctggcgcccactccacgccgtcgcaaagcatcccctgagcccgagggcgagacagctgggaag

SEQ ID NO: 32193 - DNA, 1184 bp, Mus musculus
gcctacgccatctgagcccgaggcccagagtggggatgatgtggggggtctggactgcgcctcacctccttcgtccacaccttatttcagcggcctggagctcccgggggaactaaagttggatgcgccctataacttcaaccaccctttctctatcaacaacctgatgtcagaacagacatcgacaccttccaaactggatgtggggtttgggggctacggggctgagagtggggagcctggagtctactaccagagcctctattcccgctctctgcttaatgcatcctagcagcgcaattgggaacgccatgatgggcgtgggctgcaacgttcttgggctctgatctttctggttacactttgcttgtcccattaattaacatcttatttggtctattactgtgatatgacccattggctactgtggtaactgccatggactctttggtaggcctagggttggggtattaggaaggcagatgcgtttggaagtgctgcgaaggtggtcatgttggacatattgtgaaggcagttagactggtgtactatgaaagctgccatattaagtgaagccattgggtgattgatccactgggtgcctgatggtcgtgatgttggatgacacatgtctggtcctttggatgatgtgttggacatcttgattgaccttttgagtatgtgacagaacacatcttctttggctcattttatcctgggatcgcctcttttttttcctcttctttttctttttctttttctttttttcttttccttttttcttttttttttcttttttggcagacttcttggttcagcagatgccaaattggccaccatatcacatggtgtcttttttgacattctggatgcatggaaggtcactgtattggcaaggtgacatctcagcatgctgctatgcaccaagatagatggttaccacaggcctgccatcaccatctccttggtggaggttgggtgaggggaagaggtgagcagaccctatgagttttctctgaagcccatccccaccctgtctgtgagaaagggctagtgtgggtgtcgggagttcctactgaggtcaagttcttgtctggggcttgggaatactgcctgtgtttggccattaaaaaggcaccatctccatctcttagtgtctttttcttggtggaccctgtgaggct

SEQ ID NO: 32194 - DNA, 1111 bp, Mus musculus
taaagactgtttataattagcatgcctcagtagcatacacctgtcatcccaggaggcagcggtaggaagtcagggtcagggtcatccttggatgtatagtgagtttgaggacagcctggggtgcatgagaccctgacctgcaaacctctaatgggccagtgagacagctcgggggtgaacgtgtttgctgtcaaacccaaagtgtgatccctggaaggagaaaactgcacacatgtgccctggcatatgcatgtgtatccccatacagataaataagatgtaaccatgaggacttgtgttccaatctataatgtccacagagaagccaaggtgatgtgcacccaaaccacagcattggataggacaggcacatgtaggttctgggcattttcctggtcaaccagtcttgctgaaacagccagctctgggttccatgggtaatctgttttagaaagtaatgtgggtctggctaaatggccctcagctggtaaagttacttgctgcctgtcccaaagacctgagtttttcgtccctgggacccattggaaagaaccaactccacaaaagggtcctctgacctctgtacacatatacacgcacaacacataaataaaatgtagaaaaagaaaacagggcagagtgggagcacacacattgagtccaggccaaccagggctacacagagatactcttgtctcattaaaaaataaagtggagccctgccgtggtggcgcatgtctttaatcccagcactcgggaggcagaggcaggtggatttctgggttcaaggccagcctggtctacacagagaaatcctgcagcaaaagaaaaaataaataagcaaacaaataaataaatagagaagtgaagatacaagtctgccttccatgtgtgtatgcagtctagcacaccagtacacacataccacacaagcacactcatgcatgccacacaaacattaagagaacctgcttgtgatacataccttgaggctgtgacaacggctgtgcctctggaatgaaatagtctggctccatccttggatcatttgttaggtgggctacatagtgtggtaggtgctgtgcgtgtacagcggagcctggggtcaggt

SEQ ID NO: 32195 - DNA, 1206 bp, Mus musculus
acaggtgacaaaagagagtcttctcgatcctttccctatgcagtgaagtgcctggttacttactgcctccttacctaggagcctggggtggcttgctgataatgatagcttgtttcttctttgtccactgacacatgatgtgagactgctatgtttatgcttcttcatgctgcctcccttgattggttggttgactgatgagtcattgattgatttggttgtttagagagaatgtctcaccaggctggccttcaacttgagcgctctgggtactggaattatagatgttagccactgtacccaattgcactgggcattcctgaccctggctgcaggagtgcaaggcacgattgaagtctgccccagtggccagccacactgccacatgtgctcacctacttacttctaggtgcgcatcaagatcctggccagcctcgtaacacagttcgactccggattcaaggcagaggtgctgtcctttatcctggaagatgtccgggcccgtctggacctggcttttgcctggctctaccaggaatataatgcctacctggcagcagggacctcaggcactctggacaaatatgaggattgcctcatctgcctgctctctggactacaagagaaaccagaccagaaagatgggtaatgggttggccataagccccatgtcccctccagtgtctcatttctcttttctccttggtgccacccaagcttgacctctcgccctctccatgtccctctctgtgaagtgtgtgcagaccatgctggggatgggggtggggtgttccgactctgctacttggtctgagtgacctgtcaccctctgggcttcatattcccatgtgtactgacagttcccagagatgggacagtggctcagtggtgagcaccaccctggcatgaagcccttagttgcatcccgttctagcaaaaggaagaaagtgtcagagagggagcacctgcgctccatctgccagtcagcagctttcaggcaccagactctaacctgcctaaagctgggccccagggtcggggaagctgttgtgagcttggggccacaacatgtggctgccttgcaagacctggtctttcttgggcaggatctttaccaaggtggttttggaggccccactgatcactgagagtgccttggaggtgatacggaagtactgtgaggatgaggtgagctggctgccgctc

SEQ ID NO: 32196 - DNA, 1112 bp, Mus musculus
aagtggaccccagtttcttttctctccactgtcgtcccctgtatgcccaggacacctggggccacattactgtggaagtgctactctgggtcagtggagacggccgagctgtttgttcctagctaggacagcagctttaggcctggggggcagatcccagctggggcagcagctccaaggcctttgggtggctccttctccgggttctggcagaagcccaggtgctgtctaatccacctttctcctcttgttctccccagggcatctcctcccaaccaggcagctcccccagtggcactgtggtgtgaaatgtggatgtcccatgttcccggcctcctagccataaccctccccgctgacctcaagaatcactgtattaacaagactaatcatgatggaaggactgctccaagccccacgctgcacacatactgggggtcccctaggttggcccagccatggggatgtagtgtcctgtgtggccttggccctgtcctccacccactgccaagtacaatgacctgttctctgaaacatcagtgttaaccatatccctgtcccagcatgtgactgttcactcctgggagagacttagcccacagtacccctgggtgagagggcagggcaggggccatccccactcctgcccaaactccaccccttgctatggtctgtgattttgaaagtgttaaattatggaagccctgagggccctccttgttcccctggacctcttatttatactaaagtccttgtttgcacagtgtttctgttccctggggcagggtagggtgggggttgcagtacttggcctccaagctgtgctctgaccaaaggaagcccaatcttagctgtttccccatccctagccccgagcagagagccctctgaaagatgagtctcgacccccaaagtcaagaggctgagatggccttcctactaggtccttggagatgtttgaaacttgttttaaacaccaggactatccaagcatgctctccttggggagaggaggatgctggaattgactgcactccctgcctcctctgaacatgcctttgcagtctgctgcccctggcccatttatgactggccatctagtgccagctgga

SEQ ID NO: 32197 - DNA, 1180 bp, Mus musculus
taagccccacccttcaacctgattcgtgcgctttgcctcccctctagctcccactcaagccattggttgtctctattggactctccattggcctgcggggcggtttcctttccacaacagagatattgcgcgggatttagggcagaccagaagtattttattcgcaagggtcgggagtggaggtcgtaggtggggacagacaataaataccgaggaatgtcgagtctcaatgcatctaaaacgtgggtcccggagtctgtcagtgagtcagataacaagatcaataaatacccacactgctttgggggaggggggagtgcagctgtggctccgttgttagagtgcagacgtgtacacggggaaggagttgcagcaacccccaggagtgaggctgtccgaagccaaagactccgtgtgtgctggcagaggtcttgctgatccatcactatgggaatgggatgtccctggaaatagggggctcatgcttatggcttgtaactgatggctgggagagtgaaaaagtgaaatcggatgagctgagcagtttgcccatccacgtcggggctgagtaaagcaaggtcggcgaatgcccagctgctgcagcagcggtggctaccagctctgcaggaaccaggggtgctgggcacgagccctgttcctccctccccggccgccaggtggcaggcctggatcacaggagcggagctgggtggggacccaggctcacagaagtgtggagcggagcggtggggggggggggggggcgcgatgggcacagagacgctttgggtcgctccctggtcgctcgaccttcctaggaggcctaaatgaaagatggcttggagtcttagggttcagggggcgaaggtggctcccgggaaacaccagactggggtgagaccgccggtataggccaccaacccagtgcagcccagtgtggcggcagcagccagagcagcggcgaacaggagcaggcaacgcgcctcggataggccaggcctagggatctgcaggagagaaggttggattagcactaggctacaggggcccactggctcctgggagccgcccagcctatacccatagatgggcctctgagcgcatctctggtccccacagcccgcagctaaagttggtctgctcgcaagaaagagctcctgttggaactcgtcattggcta

SEQ ID NO: 32198 - DNA, 1375 bp, Mus musculus
catagtggcacgtgcctgtactcccaatactcaggaggcagagacaagtctgagttctggggcagccaggcttctacagtgagatgttgtggggtggggcggaggttcatggagagagatgattgaagtttaggttgcggatagaaagggccaaggtttggatgtaccatggtggcagatgacaagatataaggatagagtaaggtttgaaagaagaatcaactgccaggcatgatggtgagcctctgtcatctcagaccttaggcagtggagtcaggagaattgagaattcaaggtcagcggtgggtggaagaggttaggtagatgagccggggcaggctaccatggaaatgtctctcctgcctccagaaaagactgcaccagaaagggggctggggagacactggacagtgtggctttgatcacgtacatttccaacttgaacccatctcacccctgggttctctatccaggagtctcctcaataaacccaagagtgagatgaccccagaggagctgcagaagcgggaggaggaggaattcaacacaggtcccctctcagtgctcacgcagtcggtcaagaacaacacgcaagtgctcattaactgtcgcaacaacaagaagctgctgggccgggtgaaggcctttgacaggtgagtgctgtcttggggagggctgggtctgggtccgaggggcctgaaggaaaggtcattccagaaggataataaggtgggcacacacggtgacaaagcacctttaatctcagcactcggggaatcactatgagttggaggccagccagtgtctcatggcacgacctagctcaaaaatgtagaaagtggcgatgcttaacctttttataatacatatcttacgtgtttaggtgttttgtctgcatatgagtctgtatgctatggacatgtctagtagttatcagaatcccctggcaggaaattggactggaatttcgatatttgatttgtttatctgtagaccagacatcagtgtcaaatatcttgtattgctttgtagtttgttttgagacagggtctttactatgtagctcgaactggctacagatgtggcagaggctaaccttacacttctaatcctcctgctcccatctcccgagcgctgggattacaggattgcatgaagcatgccgtcctgctttattgttttagttagcatgggacttgccttgtgacttagccatacacatctggcactgtactttgctcttattcactgtcctcaagcaagcatttgtggaaagaactgatccaagtgtgaacaatggccacccggccccatgaggacaggactgtgcagcactggagtgcgcgtgttgggagccgtgtctaaccccagcacc

SEQ ID NO: 32199 - DNA, 1176 bp, Mus musculus
gcttggagagccccacctagcagggtcctgctttctttcagtctgttcttcctttcctcacagtgctaagaggctgtggctgtggctcagcgagttcagccgtgagttgtcgctccaggtcaggcctctctcccactgctgatccatctgaggatgttggcgctcagcccttgtgttgtgcttcactttgttctaagacagagcctcactctgtagccctgcctggcctggaactatgtggaccaggctagccttgaacttgagctccctacctctgcctcctcctcagtgctgggattaaaggtgtgcctggctgcctgccccttatcctcacagctaggaaggccattgtggctgctacagctgagagagtacagggaagaagtccccggcacttcagtagtcatgaagcagaagcccgccctgtagttcctgcctgtctcaggtgatccacactcctgggaggaagagacagccttacgttctgtccagttccttgatgcactgtgcagtgacggcaaatgtcttgttttgtttttttggcttttgaagacaaagtgttgtacagttctgggtgctggcctggaacttgtggccatcctcttgcttcggaggtcttttgagtgctaggattttagacttgtactgcaacttttcccgtggcctccattacaaagtgtgttacacgtgcttccaaggagctgagggtgacattgggcaggaagaccctggttcacttgtgtttatttctttctagtgtgctgctcattttcctagtttgccacatgcaataagcaagactgtggtccttcaaagatgcccacttttgtattagttgtattctcatcactgtaaccaaatacctgaggcagactaattgtataaagaaaagaggtttatttagctcagagcctgggtatcatttgcatcggctcagctcttttcatggcctacttgctgttctgggacatcactgtgtctgtggctcgtctctgcttataatgccatcaggattctgcaattctgtccttgacttccatcctagtgatcttagggcctagaggctccacttttgagtctttaccgtctaagtctgtactctcttaaccactagcagaaatttctggggactacactcctgctggagctctagggggaaaaacactcgaaggttag

SEQ ID NO: 32200 - DNA, 2428 bp, Mus musculus
accccatttcctccctaggcacagacggatcctagctggctcgattctgacctgtctcagtcgcagccccgctgccctatcctgaaatgtccctgaaccttgtttcgggtggcacatatttcctcctgtccttctgtggtatttttcagttgggtgggttagatgtcacacacacacctgtctgacccttcataccccttaggtctgggtccctctaccctttctgttgccccaccttccttgctcgatccccccagacatgacttactgctgggaatgtgatggaggaaacagagtaacctgttctcccaccgttctggaagccagcggcagaggtcagggtgtttgggccccactttcttctggcttcaggggccccagatctcctagactctgtgtcctgtcttcatgtggctttctcttcccccacctgtctcttgcaaggacacctgccctgaatacaagacccaccctaaatttaggatgaccatattgaaagagcctttattacatctctgaagaccctttttctaaatggagacacacaggccccaggattcagacatggagttttcttttgaaggccctctattcagcttgctgccttctgccattttaaaatgcaaggcccctactatgctgtttggctcttccggcagcctactcatggcttctggggttgggctaaccactatagctccagaaggattgtgggtgcagcagtcactgtcatggttgtccagttcctgatggagctgcagaataaggaggcctcctaaggatatatgaggggcataattaatacggaccttcaaactgggccagtgatcattaacaatagagaaatccgggcttggtagctcatatctgaaattccagcactctgaggctgaggcaggaatgagcctgggtcccatcgtgagttcctggacagcctgctgaaccacagggagagaccctgtctttaaaaaaaaaaaaaaaggcaaaaagtaaaaaagacaaccaagccagacagtggtgatacacgccattaatcccagcacttgggaagcagaggcaggtggattctgatcgagaccagcctggtctacagagtgagttccaggatagccagggctacacagagaaaccctgtctccaaaaaaacaaaacaaaagtaaaagaaaaaaagacaaccttggaggaaaggcagaggttttggctctgggggaaaaggagccgagactcatcctgtgaactcttcccacattgggaaactaaggctcaggaaaagggaagctaggtgacttggccaagaccccatagctcaggagggaccagaggacccagaagattctggctgcagggcaagatgagataaggcccaacctcttcccagtggccagaggcactgggttctgccctcttatcagaaaagccccaggccacacccaagatgtctgactataggtaacaggttcattctccctggcccttgtccctagaggtggcacttgtagggctcccccaaggggatgaaaatgacccatccccaggattccccagactgaaaccaatactgaaactgtacctcagtttcttctagaagaagctgaagttggtgtctttaaatttaggagcagctgagttaggtgaaagctgaactagggacagaggacacacatggctaggtgatgaggggaggacagagtgaggagccaggaaagctgcctgtttgccatggttacccctgtggagtcactaagagttccagggccagccctggccaccttgccctgggtcagtctatagcagttatggcaaagccaagaccggtgagggcgctgagctccatcaggtcagtccttactccaacagaccagcctcactggtggtgaagagccccataggaatggtttctctgcttgcttgggaggaaacaggcaccaagaggaaatgtcacctttgggtcacccaagcatgaaagtaggcctcggggcccaccctgacccagtggagccttcacatggtcctggtgtatgtggacatggcagcctctcccatgatgacagtgcaggaagccaccgtggtgtggtgtgtggttccagaagcctctggggcaggaggccagagcagctttcatggctctgactccctactcatgcaatgttacatatccccacaaagggagaaggaggacaataaatttatgaatgaagctggttgtcttcaattttatttgtgtgtgcttttaattgaaaaaaaatcaaagggggatggagagatggctgagaggttaagagcactgactgctcttccagaggacctgaattcaattcccagcaaccacatggtggctcacaaccatctgtaatgggatccaatgccctcttctggtgcatctgaaaacagggacagtgcactcacatatgcgacataaataaataaa

SEQ ID NO: 32201 - DNA, 1134 bp, Mus musculus
tacttaaaggtggaaattgatgagatcccttgcttaaccaagggtacccccatcccccaaaaaataaactgagaagtccacggagcgagttggagtggagaacctacacccccagatctctactaaagaatttgatagtggagacagctagagatcaaagaaaggccccttgtctcttccaccaagctttcccctccaactccggagtgaggctcagggtgcacccccacgccacaagaccgggaaaggagtgcaattgcggaagcccaaggttccgcgttgccttttaaacgctctccatcccccgcctggaggcgtccacggcccctttaaggcgcagggaattgtgggtacggggagtggaattttggaacgaaatgtagcaaagagagtacagtagtaagagtaaccgcgtaggtgcagccggccgagggggtgcgccggcgaggttcggacgctgcaccccgctttccatcgcaggggatcccagcacatcagaacaccggtgggaggaggcgcctgaagacccgccccggcccggtccacgttctccccaggaagctggactctatggggcgggaccccgagagagactgagcagaacctggagccagccccgcacccctgcacttccaatcaggggcgccccgggagcactccccgtgggcgcgccgcccgccctccgcgcagccatgaggtgagccccgaaccctccagccgggtcccagccgggagccggctccgcgccccgcctttgtccccctccccccctccagcgcatttggggctagatttaggggacacagcgctttgggcgtcccagatctgagccggtgccttctggaacgatctctaaatatcgacaccccgtttctccacactactccctaaaggcttggggcggtgccggctgaggttctcttgatggctttcaggtttaggggcgctctcgggactcagaatttgaagacttttggggggagcacctctgagttctcagatagtcagatcctcgcagggatgatctagtataagcgggctcagagttaccgcccccaaactcaaaaccaggtgggaggctggctagagaaccctagccctaaaactcttgagtctcaggttgtggttggaatt

SEQ ID NO: 32202 - DNA, 1330 bp, Mus musculus
caggtacacaggattgtcagcatgcacttgtacctgctgagcctccacagctcgtgtctttgacttagaatcatctaagcctctagattatagaatcctcatttctttcccgttgcagaagaagctccatctacagcctcttctacccccgattccacggaaggtaagtggagtggtgtgtgtgtgtgtgtgtgtgtgtgtgtgtgtgtgacaaggtgtcatgactggatagtctggagaggctgagaacccttcttctactgcaggagggaatgacgactcagattttcgggagctgcacacagcccgggaattctcagaggatgaagaggaggagaccacatcgcaggactggggcacccccagggagctgaccttttcctacattgccttcgacggcgtggtgggctctgggggccgtagggactcagttgttcgtcgtccccggccccagggacgttcagtctcagaaccacgggacccaccccaacagtccggcctgggtgacagcttggaaagcatccctagcctgagccagtccccagagccagggcgccgcggtgaccctgaccccgtgcctccagctgagcgcccgctggaggaactgaggctgcggctggaccagcttggctgggttgtccggagtgcgggatctggggaggattcggccaccagcagctccacccctctggaaaatgaggagcctgatggattggaggccagcgaggctggagaaggtgagatctcggaggtgtgtggagggtgtgtggctaaccaggatacatccaagaagaaagcaagctcatggctttccctctctctgacaccagagacgaatctggaactccgacttgctcagtctctacatttgcaacttgaggtcctgactcctcaacttagccctagctccgggaccccccaggcgcatactccatccccacaaagatctcaagattcgaactccggtcctgatgatgagcctctgctgaatgtggtagaagagcattggcggctgctggagcaggagccaatcacggcccagtgcctcgatagcacagaccaatcagaattcatgttggagccgctccttctaggtaagcagtttgtgagcaaaggacttggctacggaggaccatgtacagctatgacagaggtgaagagatttacacttaaatgtgacgggaccagcttggcacaggacccaagaacagtggagaagggagtcccccaaaattccctttacctgagtgtgtggtttgatgggtctctccaatacacattcacactggtaactatctctaggacctcctgcactcaaggcacaagctct

SEQ ID NO: 32203 - DNA, 1166 bp, Mus musculus
gaccaatcagttgagccacatcaaagctaagtaagtacatgagaagatgacagggaggagagtggagcctgggatatttgcttgtgggttttcttttgtctcccccccccccccgccccgcccccagctccccacttcctatctcaaagcaggtcatcaggtggagggcaggtgctatcttctgcacctcctccatctcaagtcacacctcatggcccctaattttgctccctcaggatccgagctaagatcccggggaccggaacccttgccccaacagcatcagtctccggatccaaagccaaagccgaatgagaggggtgtctttgcccgatggacgcctgcctataccccagcagccctcttcccttccatttcccgtgcatccacaccctctcccactcggccgagccatttcccagtgggaagtgcctgagcgacccggactacatttcctaagaggctctgctctaagagtccaggaaaaggccgcggagcctgctgggacttgtagttgaatagtcaggacgctgccctgcacttccgtgacccaccgctggaggcgccgtgaggggttggtgcctctgaagccaccaacccctatgctggggctttgcatggggcccaggcgagccttgagcttggatttacactgtaataaagagtcctgtggaaaattcactgcattctgtgttttaaagtccctccacgtacatcttcctacacggaaaagaattaaaacaaacaaacaaaaacattaaacaaaacaaaaagaacctctagcgataatgttatccttaaatcccagcattcaagagtcagaggcaggtgaatctgcacagtgagtttcaggacagccagggctatgtagaaagcccctgtctcaaaacaaccatcaagccggtggcgcacgcctttaatcccagcactccggaggcagaggcaggtggatttctgtgttcgaggccagcctggtctacaaagtgagttccaggacagcctgggctatacagagaaaccctgtctcgaaaaaaactttaaaaaccccccaaaactaaaacaaacaaacaaaaccatcaacaaaaagaaatgattgggggatgcaagaatgatgatctggtaaaggaagcagtggtctgagttgaatccccatggtagagagaccg

SEQ ID NO: 32204 - DNA, 1205 bp, Mus musculus
ggctaatcacatagatataaaaagggatggtttttagcgtctaaacgcaaggggagttggttgtcaactccatcaccttagggactcagtagattccctacatacttgcagttctataaagcaacggcaggtgtcgctctgcggccgcgtgccgtcagaccctacggtctcgcttgcagaaaatctcgaattctgctacgaatgggccgcgtgagaagtttttccattaaaaacaaacaaacaaacaaacaaacaaaaataaaactgacttttcactttgcaaaaaattctgcttttagttagggagacaggcactttaggcgctgcttcccagaatgcaaggcgctatgcaaatgaagctacttactttttagttagtagagtcattcacggaacactttactgaggaaacacatgttcacaagaaaaagtgaaaaaaaatgttcgaaaccattgaaattaattatctactgtataccacaaataatgaccataagtgaaaaaagtagtagtatctggcctttatataactaaccgaaaatagctcctttcgcccggatgatcctcagtggtctggggtgcaggcttcaaacctgtagctgtttagcgacagagtggttcaattccacctttcgggcgggagtatctatcccattttgctccctgcaattcacattcttgtacaaaagcgaccagcgcgcagttaacctctctgaagccacccctattctcatttattctctcttcatacttacactttttttcctcccaggaatttccgaccaaatacatctcaaagatggatttaaattagtctccaaaattctaggatcttgctgtctctccttaaacgatttgctcatccagtcatctgctcttttatgtatttaatcacgcatgcattattagtcatttttgttcatttgttcactccggctcagtcctgtctctgcgttggagcagtaatggggatagagttgtgatcacacctttagccctggtcttttgaggtaactgagccagtggagagagcagggcaccaggcaattgtgtttttaatgaactcgagcatagaaggtcgtctcacaaggagtcctgagcagggtggccttgagacacacacttaatggaagacaagctgacagaagagcgagaatgggggaaccgaggcttgagcaaatgccttctcttttccaagaaccccc

SEQ ID NO: 32205 - DNA, 1197 bp, Mus musculus
tttgagccccagggggctctagcacccagcaagaaaaaagagagaggcgcacgcctttaatcccagcactgggcaggcagaggcaggcagatttctgagttcgaggccagcctggtctacaaagagttctaggacagccagggctacacagagaaaccctgtctcaaaaaaccaaaaaaaaaaaaaaaaaaagaaagaaagaaaaaagagaggacagaaagcaatggagcccgggtctaaggtgattgacccaagacaatccgaggaaccagagcccaaggccagtcaaagatcctccaagaagaaaaagagggatcaggaaactgaggtgcaagacaccattccccaatgagagatgtcttccacggacaggagaagcagcagaggagacttgcacaggagccgtaataacaccctggggaaggggagaaggagggactcgccaggctgaggtcagaaaccagctgtatagacactccctgcccctcccccaagcaaacacgcagagccactggagcctgggcatggaaaattctttattgtgacactgggcctaggtggcagcaggtcatcgaggcactttgaggaagggttcgtgtagtacttcaaagagcctgcgggcctgggggcaaggggagaagagaacctgtcattaaagctgtcgctggcccgcctgtttggaatggggttctgcctcttattctcctggctgaggagcttcgggtgtctgggttctacatgaggctggcccggaggtggatggaaatggacctaaaaactagtacatcgctgggcgtggtggcgcacgcctttgatcccagcattcgggaggcaaaggcaggtggatttcggagttcaaggccagcctggtctacccagaaaccctgtctcaaaaaacaaaaacaaaaactagtacatcgctgggcggtggtggtgcacacctttgatcccagcactcgggaagctgaggcaggaggatcggaagtgcaaggccagcctcagctacattaagtaaataaaacaaaccaacaaaatgtcttacttttgatacatggggtcaagtatcctgggctgggctgggctggctagctgtttggccaaggatggctttgaactcaacctttgatcctctgccctatatggctgctgtaagcatgctcaccacacttagtttagccagtgctgggatcagagcta

SEQ ID NO: 32206 - DNA, 1168 bp, Mus musculus
agtaggtggaatgtctagcgcgtgccctgggttcaatgcccagtactgtaaacaaataaacatttaatatattatgctagaaataaatacatctgtcatataaatgctaagatcaagacattatgcacatcccagagtagtctagtagccactctgaggtcacagagccctgaagctggttgctttccagaagctgtagtttttttggaagctcctggctaccctccctctaatggggttctcctcctgccaggcctcctcaaatcccctgccgagctggagcccgagcccgagctggaggtgctactggctcctgtggaggaggccggggatgcagatgaaggcacggtcacgcggcccctcagccctaccaggctgcagccagcgctgccaccggaagcacagactgtacccgagctggaggaggtggcccgagtgctggcagagattcctcgacccctcaaacgcagaggctccatggagcagagccctgcagtggcgctgcctcccacccacaagaaacaataccaacagatcatcaatagactcttccatcggcacggcggcccagggcctggagggcctgagccggagctgtccacaattacagagggatctgaagccagggcagggccccctgctcccgccccaccagctcctatcccacccccagccccaccccagagcagccctccagagcagcctcagagcatggtaagtcataggaggagcctggagtgtatgctcttctctgatacagttgctgtaacaaaaaaagcctctgccagatagtgatttaaatgagatctactgttgcacctagaccctgaccccaggctaaccaatattgagatctgtggggcttcaataccaagatggcaccagctatgctacaaaggagcctgggaaatgtagtcttttgtgtagatagggctgggctcagggaaagagagacggaccagagggaccgggcaccttggtttcctctgcctgtgccttatcccagcattccttcatgaatctcaattttacactgcaattagtgtgggattttggtatgacactggatttacctagagaccagacagtctctgatacctactttttctgggcacctactctgtcttcttgtgaagagagaatctcagttctcaaaactctgatcatg

SEQ ID NO: 32207 - DNA, 1171 bp, Mus musculus
ggcagggcagtggtgggaagcagaggcaggtggatttctgagttcgaggccagcctgtactacagagtgagttccaggacagccagggctacacagagaaaccttgtctcgaaaaaacaaacaaaaaaacaaaaaaaaacacccgaaaaacaaaaaaatcaagacggtctccaatttctctgttattctctcttaaacactattttcacgacttggacaaccagaacagaacctggaggagcgaagcagcaatgaactctatcgattctctcgactctcttctttctgtgttctgctcgaagtcctcggcgatcctcagcgatgcctcgggcaccacttctctccgaagtccgccctctcaccgccatgcgcacgcgccaattttccgattggcagagtgacgggaggactcggccaatggcgtcccgaggaaggtgtgtctctgggtcacgccccctcgttgaatattcaggagcgggcgtgtggacgccgcgatcagccgccatgaagtgagatggggtctctgaaagagcgggcggctctgcggtgggcaatggggcggcgggtgggcgtcgccggggctggggcgcggcgtggagaggctgcggagaccggtccgggtggcttcggggtccctggcggcgagacgccacgagggcgggcgggcgggcggagcggaggccgaggcggctcgagagcaccgggcaccgacgcctcaccgccgccaggctcaacgtggacgggctgctggtctacttcccgtacgactacatctacccggagcagttctcctacatgctggagctcaagcgcacgctggacgccaaggtgggtggcgaggctgccctccttgcattctgatgcctctggcaggcaaacgtcctggtcggggcccgggccttgctatcccagcacccggaagacccaggcaggagcatcgctgcgattttggaggccagccggggctacacagcgagaccgtgtactaacaacaattgtaaataacaaggcgaggaatgtcgctcagttggtagggtgctagcctagctagcaggggtgaaactctgggttccatcctggcaccgcataaactgactgatagtaattacaattatgcctgtaattctagagacagggtggctgaggacagattgctcgagtttgaagtaca

SEQ ID NO: 32208 - DNA, 1298 bp, Mus musculus
cccagtaccagtgcaccgcctttaattgcagggagcgatctacaagagctgcccaggcagggtgcagggtgaccacccacccttcctgatccttgagaagctgtggcctctgcagccagtccacttagcgcgggctcagatcttgtgtgctgatgctcagggtccgaggggcctcactcaggtgccgggttgagagctgggagagctgagagcacaggaatggttagagttcttttccagttgacattggagccacttcatgccctgcccaccagctcctccctaccttgagtccccaggaggcggccccacctttcctggcttgctgagcctgccagcagcaccccactccatcactgactcctcacctgcgtccgggcagccctgggaccatccacgttcagcatattgagtgacatggctctcttcatcctgaagaggagcccaaaaagacaggagtgagacagggaagactgcagatccctggctctgactgatgtcacggatggttcctgacagactgctgacctctcccggcactcacccggcagcccctgccatgccctctcctcggaggcgggagaccagcttctcgcttcctcgcctgatggattcccggagcttagagaaggaactgctcctgcgcaggacctggggagggcacagtgatgtgtggggacatggtgggggcccaacaaggacctgaggtggagcctgcttacctgctgctgtgtatcgcctgctgtgcctccctggggggctcctgtgggacagaagggacatggaggcaggtgtgaggaatgccaccatgcaggagggggtgcaggaaggtgcaggggtgggctcaccaagtggggcgggcagggcctcctggctgaggatctccttgtatagctcctctgcctgctgatacttgttctgtttcaggtaggctgaggcctgcggggagggagggcaggggtagggtgtggacatcttgtttaggcctgggaacgtctcagacctgcccgccttccccagcatcctgcctcagcttactgcagtgcagagccacccgcgcaggagaccaggctacctgccactgggtcctgcatctctgtgccagtctcctacctcagtgggtgaaatgttcggggtcacccaccatgacacaataaaatctgataggactttgtgaactggggtttgcttctgatatttttgtactgaaggggctgtaagatccttcagtctctctcctccctacagtgtccccaggacaggacagacctggcatgccttaccaggttgttcttagt

SEQ ID NO: 32209 - DNA, 1182 bp, Mus musculus
aacggaccccgcccctcccgcccctccccctgacgtcccttcctccccggccccttggtcgcctccctccgccgccgccccgggccggctccgcgccccctccccggcccccgcccgtgcaccctcccgcctgcccgccgcccagatggcgccccgggttccccttgcacggggccactaggaccctcggtgtcttctcccctcccccgtcctgccctctcttgctctcgctctgcgaggactcgggcgtccacggcgcccagcttttgagctcgcgtccccaggtcggctggggggggggaggggaagagaggggaccccgggatccccaccccccccgcccggccgcccctgtccctttcccttctgggaccccagagaagatgtcttcgaggacggcgctggccccgggcaacgatcgaaactcggacacggtgagtggggcccagccccttggggagccctgcctgagtccagccatagaacccctcgccctcccggaccactgaccccgccagtctcgactcctttccgggctccacagcccagaccaacgcttcccatgactttgaggcctctctgctccctcctccccacagccccagcccagcccgacccctaggggcgcccctgtctttggactcttctccggtccctctgcagaacgcttccgcccggtctcttccctccaggaagccccctcccctgcccgccggcagcccctcccttcctcggctgccccggctgtcccccgctcgcccgctcgcccgcagcttggcctcgactcttcccggatggcacgggcccctgttccccgaagcgcagccctgtctcccccctcccccctcaaggctcgacccagtctggccctgttgtcctccctgcttcttgccgagttggggtgctggtttcccctgctacccctggccagtccccagctccgcctgggctcctgctagctgcctcccccaggaagccaaacggcacctgggcgcagggccctgcccgcttccttcaaggtgtctccactccctggcctgaccctgctgtgccaggttgccctgtccttggatcctagtcgcctctggggtccccttggtgggacccgtccagtctttctaagggaagccttggcttccaaccctgcgggcttcctcccatccaagactagggttccaggcc

SEQ ID NO: 32210 - DNA, 1363 bp, Mus musculus
ccgagcaggacccgggacctagagcctaggctgtcactctgtgtccccccacctgactctgcctcttggtgaacattcgtaccacctgtggcatctgactctgtttttgttcctggatcaccgaggcctccaatgcgtggtagcatttgatcaatgccgacagaagccgaatcctcgcatcttctttgatattcttagcacaattccgggctccccaacccaggttctgtggctatcaagtagcttagcccctatccattctggtcctgtttcctaaattcagctttactcttgggcaaagccagaggtttgctttcttttgttgagcctttctgaatttaggctttggggggtagtggtgtctctctagtttacatccctaaatgatgatcactcctgacccgaggataccttcctcttacacatatccctcttaccgaccgctgtggccaaatgcagaccaacctagggcctgggtagtaaccctaattcttaggcctttgtgtcaggggcagcgcctcctggtgttttgatcgctatagagacatgacaccacaaatacaaatctaccactcactgtgtctctttctggatgctaaaaggacttggattctgacctctatgggcctcgaggataacaggttctttttgcctctttgggtttggctctttgggtgtctttttggccactccttttgtctctgtcttaatgaggattcagtgaccttatgtggaagggagctcgggtggtggggtgagactgtagctcagtggtgtcgtgtacgcttagtgtgggcggccctgggttcaattcctaggaccaccctgcttcaaaagaaacaaacaagcacattctttgtttgtttgttttgtttttgttttgttttttgagacagggtttctctgtgtagtcctggctgtcctggaactcactttgtagaccaggctggcctcaaactcagaaattcacctgcttctgcctcccaagtgctgggattaaaggcgtgtgccaccactgcccggtcaaactagaacattcttagatgcctgtgtcccctttaaaaatttacccagggtggggggtggggtggggctggaaagtagaggtcctgagttcaaaccccagaaaccacatggtggctcacaaccatctgtattgagatctgatgccctcttctggtgtgtctgaagacagctacaatgtacttatatataataaataaattattaaaaaatttaccctcttgattctaactatcagctgatatgctattttgtttttacatcaactagagtcagggtttttattggtaattaggcgtggagattggggatttagctcagggttacagctcttgcctag

SEQ ID NO: 32211 - DNA, 1147 bp, Mus musculus
ctgcctggccctgatctttgctttttattgtatgtcacatgtcccagcacagatcacatttctcccagcatgctctctttatatattgcctggttttcccacccatgatcacgtgatcatgatcctaccggtcagccctagaaacagagtgactggccactctgctcttaggggtcagtagggtccctgctttgtctcctccaggaatataagagactcaaaatatccaagaacctttggaggctctgctgtccccatgtcagtaagatgtctggggtaggggcttcttcctctgcccaccgtccctgccttccccccccctgcattctattgtcctctcacccctgaccctgccactccagtcctttcaggtcagcagatacttaattgatccttgcccagggacaggcagagggaggccagcactgacctcagctgtgtctctgtcaccatcactgtgaggaggtagtgcccgtgtgggaaagtgaggccgctgtatccaggtcacagtccaggatgtccaccccagggagtgttgagtctgtggaaggagacttgagcttctgacgacccttcaggcccctctgctctcttggctggcaccttctgtgtctctgtcactgttgtgttaaatatttaatattaattgggggttccagatagaagacacttttatatttataataagccttagtcagcacaagagctgggcagacatctaccctcttgcagtagaacttctggggaacattgaaacagcttgagccacggagagttggactttccttgtttgtcacagtagggaacatggacacaggcgatagagctttgtgatagagctggtgtgaactctgagggaagcagtggcccccaggtaccccaggctcgcccaacgccaggcaattctaggttctagatccttggaacacagccacctccttaatggggttctttctccagctaatggtgtcacgttggccaggggttgtcacctgctctgatggacacagatgctgtacagagtatcacaataagacaaagtgatttatggcttgacttcccctgaggatcccaagggacagggctgccttccttttgcacacaaagaaactaagacacggggctggtgagatggctcagtgggtaa

SEQ ID NO: 32212 - DNA, 1167 bp, Mus musculus
tcactgtgttttgctaccgttctagggctgaaacccaaggtctcttgcatcggcaaagccttctttgcactacaccgtctttcattttactagcacagaaagccagctacttttgttttgttttgttgttgtttattgagacatggactcttggtactctctatgtagactaggctggcctctacccctactaccccctgcccattttcttttgtgaaaaattatatttatcagtctgggtggggttggtgcacatgtgccacagagctgaaggtaaaaggacagcttagttctctttctaccctactgtgtggattctgagattgacctcgggttgtcaggcttgcaggcaagagccttcccacctgcagaaccatcgcaccagccagaaacttagtaattttttcttttttctggagacaagttctctctatgtagctcttgtcctcgcttttgatgtataccaggctggctttgaactcacacatcccactagggccctggtgcagctggggctctgagtgctgcctcccttttgctcatccttcgctgcaggtcaccttcagaatctagttccgagtcccgctcccgctctcgctccccgagcccaggccgcgaggaaaaaatcactttcatcaccagttttggaggcagcgacgaggaggcagctgctgcagctgctgcagccgccgcatccggggctgccccagggaagccccctgcgcctccccaaacgggtggccccgctccaggccgtaatgccagcacccggtcggtaacgctcacgcccgccctagcggacctccgggaggagggacgggccctctaggacagtgtcgctcacaaaccctgttttccccgtgctcccacagccgccgctcctcttcgtcctccgcctccaggacctccagctcccgatccagttcgcgctccagttcgcgctcccgccgtggctattaccgctctggccgccacgcacgctcccgctcccgctcctggtcccgctcacgctcccgttcccggcgctactcacgctcccgcagccgcggacggcggcactcagacggcggttcccgcgacggacaccgctactcacgctcccctgcccggcgcggcgggtacgtgccccgccgaaggagcaggtctgtgacttatgttaaggagcag

SEQ ID NO: 32213 - DNA, 1159 bp, Mus musculus
gcaggatgctgcccagcatgctcaaggcccagggttccatcctcactgcaccgtcagtgttgcctgcccctcgagcatgctcgtgagtcctcagttctggggagcttctcagtctccccacttgatgcagtgtttcgggcttctttcctctggccccgtgtgttcaaggctcagttgtgttgtaagatagcacgttggtccattttatggctgagtaaggccccactttatacatagtctgctgggttgttagcactttctggctcctgtgagctggagtgaaccttagcatgtgtaagatctgtacctaggagttgtggtatgatgataattttttgttgaactcttcattcattgtagtttattttgttttgtttttttcagtgccaggggtggagctaggtagagcaaggacctcctgctagtcaggcagcggctctgtcactgagcacagacagcctcagcctgggttagcttgtgtgggactgagtttcatggtgccttgcctgtgtgatgttgctgccccagaggctgcaccaggtccagggctcgaactgtgctacaaatggatgacttgggatggggttgaagacgtaggggtaacacttgagacagtgtatgtctgtagctcaggtaggcttttaatttgtaatcctcctgccttagttctgaagtagctgggatagataggcctggctggcaggatgcctcagctagagcagagttaagcacccctggccacacctgggaggacacaggtccctgtcccttagggtgtggcccagggacttgacccagaggccaagtgaccactaggtctacttaaagtagggaggcatggtgggccttggcttcttggtgacctctgacctgtccatccctgcagaagaaagaccccgctcagttcctgcaggtgcatggccgagcctgcaaggttcacctggattctgcagttgccctggctgctgagagccctgtgaacatgtaagattgggggagggggcagcatagtgtctgaaggggcttgggggtactctagagactgcagtagaagcttggataaggacagtcttgtatagtcaggccaggaagactgtgcatgtgcggttgactcgcagagaagttatgtaggtgctcacagtagaggagttaggactga

SEQ ID NO: 32214 - DNA, 1169 bp, Mus musculus
cacaccctagcccctcactgggggattctaggcaggggctgtgccactgagccacgcccccagcccctcactgggggattctaggcaggggctctaccactgagccacgcccccagcccctcactgggggattgtaaggcagattctactaatgaactctatctgtatttgaggcaagtttatgtgaggaaattgttggtctttactgccaaggacttaggagccatgggagtcttctacgcaaaagagaaacgggttggtattaacaaaatccctttggctgtgtgaaatgcacaaatacaaactggcaactgccttagtccaatcgggagatagatggtgggtggagcaacagtggcagatggcgcctcctggaaaagtgaatatgtttttgaagtagaggcacagccttgggagtgctgcgtggcgttccttctggcacttgtctgtattcgcagcactggaaaggcagagacaagaggagcttgtgttggagaacttggctacacagtgagaccctgtctcaaaaagccaaggggagggaggggctggagagctggctcaatggttaagagtgctagtcatgttcgggagacagaggcaggtggatttctgagttcgaggccagcctggtctacaaagtgagttccaggacagccagggctacacagagaaaccctgtctcgaaaaacaaaaaaacaaaacaaaaaaaaagaagtgctagccattctcccagagaagccgactttgatttctagcactcatgttgagagactcacaacggcctgtaaccccagctccaggacatctgacaccttcttcaggcctctgcacctggacacttgttggtacacacccctgtatagacaggtgcatacacatactttttacagatctttagaagattgaaaagctagctcagtagttgagaagactggctgctcttccagtggacggtggttcgattcccagtgtccatgtggctgctcacaaccaattttaacttcaattctaaaggttctgacgccctcttctggcttctgagggcacgggtccttccaagtgatacacagacatatgcaggcaacacagacacacacacactaaaattaagtgaaaaaaactttaagaaaatcaagggtgagccggagcacacctttcatctcaac

SEQ ID NO: 32215 - DNA, 1184 bp, Mus musculus
atggtaaggcccagcggacacagggatacagtgggcggggaggagcctcatctccactgcggtgggccatctccctcacacagtcccttcccccagatgtggttttcttcatctacctctaccaacggtggatctaccgcgtcgaccccacccgtgtgaacgagttcggtatgagtggagaggatgtctcagcagcggcatccagggcccaggcatccactgcagcaggggctctcacacctgcacccagcacagctgtcagcggagaggatgcctccacagtcccaaaggccacttctggggcctgcactgccagccagccccaggaagcccctccaaagccagcagaggacaagaaaaaggattagccactgcagtcctccttatctgctcctggtgactgaccaccaccacctcccgggcccctcccttaccctctctgtcgccctcttcctggacagatcaggccggggcggcaggaggcccccagggccagggcccggtgtgtgagatggggccgggcaggttggggctggctgtgtgtatgtggaggcaccgtccatcgtcttgtctatccgtctgttcctatgtgtttgcagacatctcgccctgccagcccaacaccatcgggaatcatggtgaagccaatatggcgccgagggtgggccaggcggggaaggggccagggctcctctgtgggacgcctgtggtcctccatcatcttgtccctcatcccccgaccaccctgctcccagaccgccaccctttaacacagtctggatttaataaattcatatgggtgtttaacttaagctcaaccaccgcacctcctctgccttccttgtccggaccatgcagctggctcaggtcttcaagagacctggaggtgatgacggagtggaatctggggttgttcagcatttaacaccctgggttaaccctgtgctgcataaaacagtggtgttgtatgcctgtaagtcagagctaacttagatggcagaggcttgcaaggtggctcagtgggtgaaggtacttgccatgcaaccctgataacctggctttgcacttccattgtgctacaaggccacacaacctaagttgatcaccaaaccacacagaggcaggagggaagcaactatagtgttatctgacctccacacacacactgtagcacacatacccaa

SEQ ID NO: 32216 - DNA, 1167 bp, Mus musculus
aggacctaggggattttcacagtaggggattttttggggtcacattagggcaggggaactgggaagagtgaggaagggcagggggcggttctggctggggagtggcaggagccaggtcccagctgaccttgactttccctttacagctggaccgggagcatagagtggcaggaatcttcccttgcccaaccttcaaagacaagtccacctatattgaatcttcaaccaaagtatatgatgatgtgagtgactcccatggccctggggtggtctccaagcacctacactcatcaggggcaggctgggcccttggtcttgcctgccagtatcactgccaggcccatatcacaccctgtgttccccgcctgccacagctacttcctggccaagtccagagttcccagagccacctggaaattcccctggcctagcctgctggaccaggtgtgggtggatgaggacaaggagtggaagcactgagcagggcccgcagagctggcctgttctgtgacccccaccccaccatcaccccacagatggcgttccggtacctgtcatggatcctctttcccttgctgggctgctatgccgtctacagccttctgtacctggagcacaagggctggtactcctgggtgctcagcatgctctacggtttcctgctgacctttggtgagcaggcccagctctaccctgcctggaaggcatgtccacacagttccaggcccatcattcttgtaggccacagccttggggctggctgccaggcctggccttgaccccacatctaggacctgtgcctgcagaccatctgaggctcatgttctcatgcttctttctgtaagcacagcagccaagccctgtcctggcactcactggcctccagacagtgcccacccagtgtgggcagccttgggaatagggagctataaggattcctctggccaggtctacagagaggaatccatgtgctgggggaatcccaaagtgcagagagaaggcaggcactcacaatgagtactgagtacagacgagggcagagcagtaaatgtgtacgtaggtggagtttaggaaccccactgaggaaagatgcttaacagtccccagaactgaccaggagagataatataaagatcaggaaatgcttgaaattgggaagctggggtt

SEQ ID NO: 32217 - DNA, 1231 bp, Mus musculus
acaccatgctgggccagagcacagaggagatacgggcgcggctctccacacacctgcgcaagatgcgcaagcgcttgatgcgggatgccgaggatctgcagaagcgcctagctgtgtacaaggcaggggcacgcgagggcgccgagcgcggtgtgagtgccatccgtgagcgcctggggcctctggtggagcaaggtcgccagcgcactgccaacctaggcgctggggccgcccagcctctgcgcgatcgcgcccaggcttttggtgaccgcatccgagggcggctggaggaagtgggcaaccaggcccgtgaccgcctagaggaggtgcgtgagcacatggaggaggtgcgctccaagatggaggaacagacccagcaaatacgcctgcaggcggagatcttccaggcccgcctcaagggctggttcgagccaatagtggaagacatgcatcgccagtgggcaaacctgatggagaagatacaggcctctgtggctaccaaccccatcatcaccccagtggcccaggagaatcaatgagtatccttctcctgtcctgcaacaacatccatatccagccaggtggccctgtctcaagcacctctctggccctctggtggcccttgcttaataaagattctccgagcacattctgagtctctgtgagtgattccaatcagcttcagcctcagtttattgttttttgccttacctagcacacattccatggccctgtcactatctgtagagggaggtggttttgcagcaatagaaatgaagcctaggacctagcaacataaaagaacaagtgatctaccactgagccacgcccacagcccctcactgggggattctaggcaggggctctaccactgagccacccgcagcccctcactggggaatcatatctaccactgagtcacgcccctccagcccctcactacgggaattctagtcagtagctctaccactgagccacacccacagcctctggggctcttcaccgccccctacccctggattctaggcatgggctcattttatttatttatttatttaagatttgtttatcttatgtataaggtacactgcagctgtcttcaggcgtcaggtcccattacagatggttgtgagccaccatgtggttgctgggaattgaactcaggacttatagaagagtagtcagtgctcttaactgctgagccatctctccagcacccagtacaggctct

SEQ ID NO: 32218 - DNA, 1194 bp, Mus musculus
tagatcttctgaaagagatgacagtgctcctaaccgctggaccactgttctggcctggtgaaacaagcctttagccccagccctagggaggcagagacactagattgcctgagttgaaggccagcctggtctgcatagtgagactgtctctaaaacaaagaaatctgagcgtgatgatgcaaacctctcatttcaacgctcaggaagacttgtgcaaggagagccagcctgccctgtgagtgttcagttggtgtggtcaaacaccatgcccagtgccacactggaaagggttggatttgtttaggtgtatagatccagaaagataagaccctgtcctgacaatgggacatgacagcaagtggcagaagcaaagcaagagagaccattaaaaatgacattagctttgacacttcagtctgcccccagtaacgtatttcctcaagcaggccatgcccgggcctctccaactggggtgcaagtgttctgatgcctgagactacagggcattcatttctcattcagaccaccacctggtctacctaggtagggtaggtagggaaaggaaagggataaaatggaggttaaatagagaaggcgtgtggcaggcaccatggttaacttcctaggttccatcctcgtggagcaaaaccctgcagtgccatccatcaggcaggaaccatgattgcggggcgtggttcagccctgggctgctgctgtctgcccagccatgtgcaccctagtgacactggtgaagcttggtgagcgcgcgccctgtggggtcaggcgtggcctaagtcccaggtgatggaactgtccttagtctacctgcctgtagtacttagacttggcttttggtcatgaacagggcacagtgttcccacgtgcagacagacaggtaggacgggccaagatgggtaccgacgtctgcccccctgcacttctctcttccttcttcatggtgtgcaggagttcctgatcgcctgtctgtccactgagtggaagtgtaccgagcctaccccgtagggtgtacttaagcgttgataatggattagtggataagaaacctgagtcacctctggggagtgtccgtcccaggatggacctccacataaaaagcacatacagattttagcggtatactggggtgaggcttgccacctgcctagatccaccagtgaggtgctcatggagtgg

SEQ ID NO: 32219 - DNA, 1193 bp, Mus musculus
ggctatgaagggaaggaggtgagcaagtgagcagccaaggtgttgggacatgggtgattccttcctgcagtaatatccctaacatactgttctttatctcatcctgggggtgaggggctgggtttggggacaacttagtgatgacctggatgcttgaaccagatagagcacctggaatgtcaagattttttcttgggtgttctctagggggtgctagagagccacagaaatttggcgagggagatgggtcagatgggtgcttcaggtatgttcctcgggatggagagaaggggtgtggagctggtgggagcgggaggtagaggtctgagctacagctctcctcgtgctccctgtggggttttgtttgtgtttggagatactgacctgtggcagaggatgatcttaacctgtcagttctcctgcctttgcctcccctaagtgctgccattgcaggcctaagtcctcattcttggttttatctggtgctggaactcaaacctggacatactagacaagcattctcactgactgatacgtccttagcaggtttttttgtgtggagtaagcatgtgtgcattcctgtgtagtagcatgtgtgcgggtgtcttgcaaaagccagagtgggacatctgatccaaaagctcactgtttaggcttagacaggctgccaagcaagcttacaggacccaccatctctacaggggtagagtgacaggcatgatacttagaccatgcaatacatgtggcaggggtttgaacatgggttctcatgcttgcatgtaggagtgctcttacctagtttataccaactcaagcccttcctggactctgtgtaaaccaggctggaatccaactcaggtcttgccctcccgtctgtctcccaagtatagggattaaaatgtgtgccaccatgcctactacttttttgtttttaaatctctctacagtcttatagtaagtacactgtagctgtcttcagactcaccagaagggggcatcagatctcattacggatggttgtgagccaccatgtggttgcttgggatttaaactcaggaccttcggaagagcagtcagtgctcttagccactgagccatctctccagccccctctctacagtcttccacctccactagcaagcagatcaaggaatgaaagcctccccgggcactgcactagagtggcagggggc

SEQ ID NO: 32220 - DNA, 1189 bp, Mus musculus
atgagcaggtaggcgtgtcaatgcgtgtgctatcgacaaatagcgaactagctccagccccgcggcgtcgcgaaccaatgaacttgggatacacgagccaataggaaggtagaggaagctgcactgactgatttcgactaggaaccaataggagtagggcttcaacagaagggtggaacttcctgctaattctccaatagaatgtctttcttctagggcggtgggcggatctcggaggacaccgaaccaatagaatccatggggcgggaaaacagcggtggcggcggcggcagcgggttcggttgcgcttagcgcacggggtaggagcggagcccaggccgggaagaggagccgccgcggccgccagtgagagccgagtccgctttgggtgggaagggcctggggttgcatccgggggtgtgcgtgtcgccccgatccctgccctctgacctttcccctcgcagataccatggggaacgtgttggctgccagctctccgcccgcagggccaccgccgcctcctacgccgtccctcgtggggctcccgccgccgcctccttcgccgccaggcttcactctgccgccgctcggcggcggcctgggcactgggtcaagcactggccgtggttcggaacggactcccggggctgcggccagcggcgctgcggcggcctcggaagatgggagctgcggatgcctgcccaacccggggacgttcgaggagtgccaccggaagtgcaagggtgaggggcgccaggcccgagtagccccagggaaagggaagggaccccccggaggattggcgcacatcgttgcaatcattaaacagaacgttggaagctgatgatggattggaagggtgggaccttgaacttggggctcgaaactgcgatcagatgatgaactcgttggggaagaatgccacagcaggagggagaagtcttagggtactgagagccaggggaccaaccccaccaagattcaggagtgtgatcaggaagggaattatagtccaaggtcacggtgtcaagaggttttccccaatgttcctgtgaggggttcgacccaaggatcctagcctaggatcttttgacaatttgatcataagagggaggacattcttactctcgatagttaagtgtgttaacttactaaatactgaggacagttctgtgtggtgagaactgta

SEQ ID NO: 32221 - DNA, 2030 bp, Mus musculus
aggcagaaaactcggagactgagacgggcagatctggcccaccagaacagccagagctacataaaaagaaaagaaaagaaaagagagaggagagagacagagagagagagagagagagagagagagagagagagagagagagagacagacagacagagaacccagaggtcaaattttcttgggtaaggattgggtttcagagatcaaagaggaagactgagacagggtaaggaggtccgtgctgggcttgggttagaagtgactgtacagagaagtttggtcgagggagaaaggatggcagtggtgtagttggatctgattggcagggggcagatctaggatgccatcctgagactgaggtgactttgacatcttgcttttgctccctccccacttctaggagatgcctcggtatcacgagctgcccactctggaagagcggtcagggcccctgctgttgggggctacaggcctgggaccttctcttctggtgcctccaggacccaatgttgtggagggggtttccctgagtctcgaagatgaggaggaagatgatgaggaggaagacttcctggataaaatcaaccctatttatgatgccctgtcctaccccagcccctctgactcctaccagagcaaagacttttttgtgtcacgggccatgtatgtgtgagggaggcacaggggctctgacgtctcacctttcacccttgacccatgagctttccaccagtaatctaggacactctgacttccaggcagaccagggacaactatcacccattgcaatccacctgtgacttcttagtgactccaccatgacgtccaatctatgatgtctgaggcaggcaaacctgcacaactggaaacctggagatttttatctcccttggcagggagctcaccatatccttctgcaccacctgtgaccccccccccccccccaaggactcctaagactacgaccctttgaccatgccactcagtatctcaagaacccttaaagtcccaaaggaatcggaccttgcacttgtcctcaggcaatagagtccaacagatatgcaagaacgggatcaggggctccctgttgctcagacctgagccctccaggcagcagaagctcacctgatccctccccaccctgctccccaaaggtgaaaaggagaggattccccaatgtaaggtaggacctccccatctccacctactcctgcaggcaggaatctcaggtttctcacaccctctcctcagcacccaggttcctgtctccagagcatgaattccaggtccaatgctagaggggagaacctaatgcaagtgtgccttgccaccccaagtttgggagactctgctcttatcctgaggactactgaattcttttaacccctacccagtgagatgagaactacatatccctctttaggggatggtgtgtgtatgtgtgtgtgatggagaatctgggcatctgggttgggaattttattttgtaagcatttcctacataatatgagtttctactttgataaagtcttgtgttttctgtgagatgtgaagtgagtggggtacaatgaggcctgaagcttgaaaggcatccgtgatctgtaagtcaacagagaatggactcccctccctccccaaaaagtcaaaaaaaaatgccccagaaattaatgagtcataagcaaaaccgcatcaaccaaaagaaaaaacggtaggcatgcaagaagtgtctaagatcatgaggcaaatactattttcaatgaagcccccaaggcgtgatgggtaatggagctaaacgaatgagccagaagcaaagtaagaaacgagggctgtaggcgtagtgggtagtcgccagaaggtaaaagattccaagatagttcattagagaaaggccggaaggatgggaaacgtgaacaggcagacacgagctaaaccgagccaagggattgaagctcaatgaatgggggaatgaatgctgggtaatgggaaaggaatgaatgggccaaagatagaagctacagtgacgcaaggag

SEQ ID NO: 32222 - DNA, 1178 bp, Mus musculus
gagagcttgcctgagctatactacagcaaaatggtgtctaaaaacaaacaaaaacaacctgtgggggcagtgagatgactcaaccggtaaaggtgcttgccgccaagcttggtgacctgagttcgaaactcactacaacttatccctcaacctccacaagtgtactatggcacacacgtgctcacacacccatataaagtaaataaatgtttaaaatcgaagcaaacaaaaccaaaaccagcgtggcagctcactcctttggtctcaggaatttgaagtcatccatcctatctacatagcaagtctgaagtcatcatgggctacttgacatcctatctcccaacatttccccccatccaaaaacagaaaagaaaaagaagctttattgaagttagacttttgggttctgaggaagacgaaagagtctctgactctcttgaatcgggagaggtgtcgcgtaggcttctatccctagattcaaaaagcctgaggtgagagcacagctttactctgatccctcactgtcactattccccagaccccgctccacctggctgtcatcaccacattaccagacatggtccggctcttggtgacagctggtgccagccccatggccctggatcgtcacggccagactgcaattcacctggcatgcgagcaccgcagccccagctgcctgcaggccctgctggacagcgcaacctcaggctccgtggacctggaggttcgcaattatgaaggtgagtccccagaggggacaaggtgaggttgacaccattcaagcccaagccggggtttgactgactgtggcttccccttcttcaagggctcactgccctgcacgtggccgtgaacaccgggtgccaggaggctgttctgctgctcctggagcgtggcgcggacatcgatgcagtggtgagccaaccaggcagccggcgaggggcgtggtctggcgcgtggaggtgtggctcaggaggcggagctagcgaagggcgccagggtggcagaaatgttcacgtagttaaggcgctggaggctggaccagagggagggatgctcagagccttcagagagagactgaaacacctgtcctctcgcaggatatcaagagcggccgctccccactcatccacgccgtggagaacaacagcctgaacatggtgcaactcctgctg

SEQ ID NO: 32223 - DNA, 2465 bp, Mus musculus
ggaactttctcaagggggcagggcagagagctgcagggtggcattgggagccgggattttctaggtccccagcttgtgcaccactaggagggaatggaaacttttggagatgggacctagtgagagaaggctagatcattgctccaagtgtgtttttagagggaattttgaaagcattcatctgatttttgagagcagactatcctttgaactcactgtctagccaaggttggcccacctgcctctatctccccagtgatgggattacaggcctgtgccattgcatccagctctctgttttttggaggacatctccctatgtagcctagaatagattctgatgatcctcctacctctgacaccagagtgccaaggttccaagatatgcctacctcctgatccttgcctatggccactgcttaggggcctagtgggccgcctccttgagcgtctcacttctccgggaagaccgtttacttgatggaggccctgactgaagtgtgatgtctgttgtcccccatccagaacgtccagtattcatctgtgaacggcgactgtagactgaacatggagccaaacagcacaaggtgacggtgctgggtagacagaactaaggaacttgaaggcatagcaactggaaccctactctcataaatgaagaagcctccagagagactggctgctcagtgtgatgagcatagcaagtttggggggtctcccaggatgctgccgaattccacgttgtcaaaaggacccatggaggccagtgtgttggctcactcttgacatctcagcaagctgggggggggggggggagcataaagcaaggttgagtctagcttgggctatagagcaaagccctgtccatacacaaacaagctaaggggctttgagacggtcagaaactgaagtcttgctttgggtaaggtaaatcctctaccgcatgtatgtgctagacttgaaagacttccacacagacctctttataagttgactccattggggctatcccctcctctctggacaaggtctctgtatgtagccaaggctaggctcaaactcacagagatatgtctgcttctacctccccagtgctagagttgaaagtatttgtgccactgcacttttctaggtcttcttttaatgaagtaaagtatatatttataaaaagctatttagttatatatatatatatttttgagactatttcatagagcccaagctaacctcaaacttactatgtagccaagagtgatggtaaactaatttattttaatttatttgtcttcaattttaaccatcacccaacccctgctcccttccatatcttctttcaatccatttcattgtctttttcttcccagacactattctgacttacgtctccattacaaacattttattgaactacataaaaatgtgtgaaccacaaaaaaaaaatgtatttgtcaaaattgtagttgtctttctgaggctgacctgagttctctgataccattctctccagttgtatccagtttcctgtaaacaatgtgactttgtttttctcagtagctaaaacatcccaattatgtgagtgtacactttctttactcattcctctgtgggccaccagctgggttggttccatatctgagctattgtgcatggaattgtctctgtggtgggtttagtaaactcccaggaatgcctgtacatgtttgtagaggccagaagaaggcacaaaatcttgagccaggcttacatgcacttgtgagtagccccacataggtgctaagaacccagttcaggtcctctgctgtgggatggtgggctgtgcacagaaagcctggtcccggtctagcaaaggtctggaactccggagccggtgggctgtgatttacaccagcatgggatggaaggagttggacctcgcctcctgggcacctggctcctgtcacatagctacagcctcccacagcccccctatagggaggtatgcagcatcaatcacatagtagctgcactaagccctcccacatgcaaataaggtttccccaaactctcagtccaagccaatgaaaagtacctgctgtcaaaccctaaatcatccccaaaactctgtaagtcctatcagggaataaaatgtgtgtgaaaactactccattgtccgagcctttgtcctatgagctgtaacatttgggaagagatctgctctcccgaaacgccgtttgaagccctgcccaactcccagcccaacctgactctgtgcagggtggctcgaaatgatggtgtattagtcagggttctctagagtcacagaacttatggatagtctctagatagtaaaggaatttattgatgacttacagtcggcagcccaattcccaacaattgttcagtcgcagctgtgaatggaagtccaaggatctagcagttactcagtctcacgcagcaagcaggcgaaggagcaagagcaagagctc

SEQ ID NO: 32224 - DNA, 1208 bp, Mus musculus
tccaggacagtaaaaccctgtctcgaaaacaaacacacagaaacaaaaacaaacaaagaaaaaaagtatcgcgcactgggaagattgagaaccactgacctagaatgtgcttcatgagaccttatttctttttttaaacagtttcactgtgtaactcagacgaggctggatttgtctacggtggacccggctgacacagaactcacagatctgcctgccttccaaagtgctgtgattaaagacatttgaagcctagccccctgccccccattatttttaattaaaaaaaaaatccgggatgatctcacgtggcccaggctggccttaaacccgctttcaattctgatgatcctcttgcctccatcctccccacccgactcaggtgctgggatgacaggtttacagaacactaatcgtcagggtcgttcactcatcaaccagcccggcagacgtgcttggctgtgtgcgcctgcccagcaggggaccgccctcaatgggccgtccctaggcggcacccgcttagctgagattccagcacttgacttcagggtttcggagagataaggcgcttggccgttactaactggactacaaagagctggatcggaccggaaccacatggctcaactcgcccgagccacccgctccccgctgtcatggctgctgctgctgttctgctatgcactccggaaagcgggtaagtagccccgcgccccgcgccccgcgccccgcgccccgcgccccggcctgtgcgcacctcgagaggccctcccaggccacccgatcccttcttcccggcccaaagtcctaggtctggattctggagcagagattccagaaaatagggcgtggtgactcacaccggccaccggagtacaggggaggatgaggtaggagggttgccttgagttccaacgtagcctagactcgggaatgagaaccggatttgctccacttcgcgcacgcttgcgcacgcgcacacacacacacacacacgcgcgcgcgcgcgcacacacacgcacgcacgcgcgcaaaagatgttttattattgtaaaataaatgactcgtacactgagaaaaagtctgggtgactcatgccaggaaccttaaccctagtggccacactctctccagcaagttaatcgtgactgactcagagttgatttattagttcattttcctttcgctgagttggagactgaagcctc

SEQ ID NO: 32225 - DNA, 1207 bp, Mus musculus
agttcttatgtatatccatccacagtaaaaactcttcttgagttaggcaggctctggccattttaaaccaaccacgaagagtcccaagcaatttaaattgcaaaggttcctctaagtgatcctaatccatacctaaagattctccctgttaaaacaaaaacaaaacagttttagaggcaggcagatttctgagttcgaggccagcctggtctacagagtgagttccaggacagccagggctacacagagaaaccctgtttcaaaaaaaacaaaaacaaacaaaaaaccccaaccaaagattcccctatagctgaggttggcttgtggcagcagcaggcccgataggccccttccatttctttttatgtttttcagggggtcttgtggaattgcttatatttcaatgctgcgtggtaggccagttacatttatgatgttttgttaatttcctttctgagtcagattcctcctctgatgtttatttttcctcttctgatgcgtcactgccctctcctgagctcttttttcagccttttctgtagagggataaacattgttcttagatcctgagtgaaactgtagcgacggaggtgaagctagtatcttctgagcacctatgactttttgtcatccaccagtgccttcctaagcgtattccaaatagcaatcactgtaaggggcatgtcgaatcctccagtctctgtaaaccagttctcccgtgtatgcacatctacagttaccccttctgaaaaccaaggactgactgactgtacaaagtgaagaaaggcagtcggctggctagtgccaaccttaatgcctgtttctttaagagtatgattaataccatctgtaaagaactctctgtagattttactttgccccatcctgattcaattcagtgcttccagtagttgatggaatctctgttggtagctacaaactatttacgtttacagggtcagtaccagatagcaggccagtgcttaatactagccaataaaactcccactaaaagtgacaagcagctgtgtatttatcaataacctattggatgcctctttcaggctgaacacacagatcccattttagagctttatacttagcagcaaacaatcggggtgccttcttttcaggtggaaggggcactgccttttcaggcaggggtgctttctttccagttgtcttctttcaggccacacagattcgg

SEQ ID NO: 32226 - DNA, 1168 bp, Mus musculus
actcatcagagagttcacactggtgagaagcccttccaatgcaatgagtgccagaagcggttcagtcaggtctcacacctccagtcccaccagagagtgcacactggggagaagccctacaaatgtgaccggtgtgggaaagctttcagccagaagtctgggctccaagtccataagagaattcacactggggagaagccgttcaagtgtgaggagtgtgggaaggaattcatctggagctcagggcttagtgctcaccggaaggttcatacaggagagaaaccctacagacgtcggcagtatgggaagggcctcatcaggcctcacacttccgattaacagtctgtttcaatgtaaacatagcaggagcattatatcaatcctgtaagaaaataataggaaacaaaatataagttagctattatacaatgagaaaaaccattatgacacatggcgaattacatagtcagatagcattctgataggaaatgatatatgtagatttatatttaacaattttatataccctggatataggattagaagtccaatcagatgcaattagggaccatgtctccagtatcttcctttgattcggtctctggcatgggtggagcgtctccagatgatgatggctgaagtggtcatgaaggaagtggcaggtatcgaagtctctgtctatggagaagacgtggcacaatcaagtggtctggcatctatagggtcctataaatatataaacagaacttcttctgaaaaaaacatctagtcttttttattgtccaattagtaggtttttattagaggcttgagattttcaaagggcgacttattttttgttctatgataacagtatgtgtggcatgaattagttaaactgctctatgcttccaacaggttgcacatgcacacctgcccaagagctctctggattcataaatgaaagatgcatgcacatactagttaattttgatatgccttggctggcttaaaggctgggcacttctaatccttcccaaggctagcaaacactaccctccaatattccagagttaacattctttaatatctatagctcatctctgataccccggacccagtcagggaagtggccactagggccacttacctgaatttttacatggctagtccatcctatacccctgca

SEQ ID NO: 32227 - DNA, 1113 bp, Mus musculus
gcactaaacccctaaaagtgtacgcaagcctctaattaaatgtttccttttataagcgttgccttggtcatgatgtcccttcacagcaacagaagagtggcccagatagcccatgttctaccaccaggtcactcccacagcccctcactaggggattctgggcagtgctctacaactgagccggtcccccacccctcatagggggtttctatgcagaaactctgactctgctgcctaattaggcaactgcagctgtgcagtttccctgttagcttttataatgtaatacagtatgggatctcaattttaaaaaaaaatgtatccacagcaagatctgctggccctctcctttaatcacagcacttgggaggcagaggcagacagatctgtcagttcgaggccagcctggactactgggggagttccaggacagccagggctacacagagaaaccctgcctcggaaaaacaaaacaacaacaaaaacaaagaagtatccacagttgactttcatggaatttcagaaatgaataaaccgaaaagcaacacagaagagcgacctaccaaaaggaatccccttagttaaaaaggttcaccgaagctttgccattccggggaatatagtccccagagagtgcagccactgaggaattctgggaattgtagttccaacgccagtagtggtcaaggtcgtttccgctcccgggaggggaggatgtttgtgagtgcttcctgtgaggtgaaaacctgggccatcgctctgcatttcctttgcgcctgtgctcctgatgtatcccctcagtgaccgcatctgcggcccaggaacaagcccggcatccaggtcctctctcgctgggctctgcctgaggcggggctgccctacactgacacacctcagccccttgcagagccccaggagaggctagcttcccaggggagcctggcaggggagctatgatgagagatggcccatgtcctgaatccttaagtggtatgcaactttactttttatgtgattccacccctatttatttatttatttatttatttaaataaacaatatttttattttgttaaagttattaaataaatgtatttaataattagaagaaag

SEQ ID NO: 32228 - DNA, 1219 bp, Mus musculus
gaggagttgggagcacaggcagaacccactcactgaacgcttagaacaaggctcaggctcctgccattgtctgaaccagggcctgaggggaggacaggccccaggctgtgtagctgctgttgaataagtttgtccatcacagtgctggaggggaggggagacactattaccacagagcacaacgctaagtggagacttggaccttcatccaagtcctgccctcagcctccttgggacagggcatagaaacagggctactcgatcagggtcgacagcattgttgaaggctctgggaagctcacttgtaagctggaacttatttgggccttagtttgccaccctgactacagacctccacacacaggttccactacgctgcccgcatctgggatggggtgaagaagtcctcagccctggcagagtacagccgcctgctggcctgatgccgagggagcagcagcatgcagggaactgccctgtcctgtgggctgtcctgtggacagtgagggcacagccaccctccagcaagggaggagagtgacagaggcctggcagagggatcgtggcttcccgctgagagacgtgaggtgtctgaggccagcccctccctcaaatggggggctgctcacagggtgactaagagatcccaccccgagcctggtatgagcagcctttcccaaatctccatagagaccagcagcagcaggaggaggagtcaatgtgccaggaagcctgaccccactgagtctgactccaggccttccgtgggaaacggggttggggctggagagcttttcaagacgagggtctgatggttcgaataaatgtggtcacagagcctgctctggggtttgttctttctcgaacagagggcagctaatcctgtcactagagcctacataaagacagtgcctgacttaggctaaaaaggtagaattgtcaagtgcggtgactcggcctataagctcatggagagatagaaacaggatcaagagttcaaggccagcttcagccaaccacatgagaccctgactaaataaatgaatagataatagggccatcatgtaacatgctgtgtttgcccttagcccttctctcgcccttatggattgactcttggaaacagcttggatatccctggcctcagaccccaagcaatgtgtgcgcctcctccgctcacttgcacatggtggtccttctcggttctgcttcccaaagc

SEQ ID NO: 32229 - DNA, 2514 bp, Mus musculus
accaatgtgttcctacacccaagcacacctcatcacacaatacacctaattggaaatacttgaactgatcaatggagggcccaattcacatacccgtgtttcaattatatcgataagttccccccaatcatggggttttgatcagtgcctcacatattaaaggcaaacactctgctggaaccatgtacctagccctgtgctgggctgcaggtagggttctgggcaggggctctaccactgagccacgcccccagcccctcactgggggattctaggcaggggctctaccactgagccacgcccccagcccctcactgggggattctaggcaggggctccaccactgagctacatcatatttcaagacaaggtctcactaagttgcttgggctgtccttgaactcactttattccagacaggccttggaatttgggatcctaacccctcagcctcccaagtaactgggatcacaggcctgcctcacctcctggcttagtagttttccctgaacctgtgatgttccagtgggtcaagtacaaatagaatctgagatggatttcccccccccctcggtggctttatccacatacttggatcatagttcaacaatacagtctattgtgaaaaatcataacagcatgaaagtgagacattgcaaccacatttgggaagctgagaaatctttgtttcaccccaggaccacagcgctatggaatagtgtttcaaacagtaggtttcctcgcctcatttaacatagtctaggcactcctccacagccatgtccagggtgaacgtaaattctgtcagttaatattaaccatcacagcaggcatctaagaacttgctctgttacatgtgcacatgtgtggctaagcatgcacacactggcatgtgaatgtgctcacacacatacccagctcccaggtactgcagccccctctgagaagcttgacactcaaatgctactcctctactgcctgggccccacttcccttggtctggctacagtaacagccaaactcggtctcctattaagtgtcctgagctctctaaaccctccatgtcttttctggtattttgacatagcttaggcttgccttcacctcggcatgtagctggtgatggccttgaaatcctgatcctcctgcctgcatctctccagtgccagggtcaggcacgtggcatgatgccctgctctcactgtggcttgctttggtgccacctggcatccccgtcctgtgctttgctgctctcccttcttgaggcaggaggcccatgctagatgcatcgaaggagcatattgtagccattgtgtgtgtcctggtcagctccataaacttgtacagggcacttttgtgttttgtgattccttgcccatttttgttctgttacttgagatagaggatccaggctgtctcaaacacttggcgccaggtgcttctccggtcctagcctctccttgtcctgggttacaggtagaggtggctgccttttaaactatgatctcccacccccacccctgagatagggccttactctacagctctgggcgtctaaagagctgggattacaggtgtaaatgactacatatgttgcccatacaatcttttgttaggattttcaggcttttccagaatgtaagcaaagcagatagccaggcccctggaagcctccaaataggaaaggttcagtctccctcgtcacaggccacctgctgccagcagggtgctcccatgaggcacctcgggtctgaaagagcctgggcgcaggaactctgggaaatgtcagtcctccatgctggaattgcagctacacaatcttggcattgcccttgaaagacgagcaggtttcaaacgttggtgaatggatgaggtgccctcctcaacatggagagagtctcacacttctggctcatgaaggagctgtctgttggaatgtgggggacaaatctgtctggtaatcctgtggtgtgttttggaaaaaagaataaaagggtaggaatgctattatgtgtgtcttctatttaatttattaattttaattgtgtgggtgtgtgctgtgaaagatgcagttttcacctgctgagcatcttccctgccgggcaaggtggtgattttcaaatgcttttaagtttgtgatggccaagcagctgaactcttgagccagcgtgacccactgtcccccagtccagcctctccgtagacaagcacatggatgccctctctcagtctggctctggattttagccacagggacgacagcaaatgtgatgcaatcagaggcttcaagagtgcgcatgaattgaacttcctctctgctatccttgggctccctgctgtcactgccacactgaaaagcctacaaagctaagggttgggaatgtattcccttagaacctcccagtgaggggctgggggtgtggctcagtggtagagctcctgcctagaatcccccagtgaggggatgggggcgtggctcagtggtagagcccctgcctagaattccccagtgag

SEQ ID NO: 32230 - DNA, 1229 bp, Mus musculus
gctgccaaggcttttgctatcaataaatggtttggcctaaggtttaaaaaacataaagaaggaaaaaaggaaggaagggaaggaggaagggaggagaggaaaagaaggaggaagggggagggaagaaggggaagagagggagagagagaaagagagggaaagagagagacagagacagagagagacagagagagacagagacagaaaaaaaatgttcacaaatagaactgccttgagaattttcccctatgtacactcctttttatattttaccatcaagggcatgattaggtctcttgctgcagcaacgagagtgggagcacctggagcgcgagctcggaaggagaatccacgagttgtaagaaaatggcagacaagccggacatgggggaaatcgccagctttgataaggccaagctgaagaaaaccgagacgcaggagaagaacactctgccgaccaaagagaccattgaacaggaaaagaggagtgaaatctcctaaaagcctaggaagatttccccaccccaccccaccccgccccatcatctccaagaccccctcatgatgtggaggaagagccacctgcaagatggacgcgagccacaagctgcactgtgaaacccgggcactccgagccgatgccaccggcccgcgggtctctgaaggggacccctccactaatcggactgccaaatttcaccggtttgccctgggatattatagaaaattatttgtatgattgatgaaaataaaaacaccttgtggcaaaaaaaaaaaaaaaaaaaagggcatgattaaactcctgggcatttcatcatgtcaacttccattcttccttctgagtccctgttttcttccatcaccatttggagagttcctttaaccaccctcaaggacagcaagttcttagttttcctttgtaggtcacactcatcatctttgcccccagagcatctgcagaagtcaggtaagggaggagaaatggctttgctcaaggttttggagggaatgctccatggtctcttggccccgtgtgctcatgatcatcgcggtggcagggccatgaagtagcagaacctctctcagctcatggaagtcaggaaacagaaaggaagaagaaaccatggacaaaacaccctcaaagaccagtgctaatccacaccttccagcaaggcctcacttcctgaagtcaccacaacctgccaaaataatgtcaccaagtaggggcc

SEQ ID NO: 32231 - DNA, 2982 bp, Mus musculus
gagcagaagcagtttggggccagacctgctggtgtgagcttgtattcccagaatttgagagaccaaggcaatgctgagggggctgggctgagctacaggaagaccccagcattctggggtctaatgggttcctgtctggtttgatcaaaaagctcaggctcttaccaaattgtagccgtttgtcataacactgaaaaggggggtacagaggtggcattactttcttcgaagataggctagttctgttcaaagttagttttcagactatgtttgtagttttgtctggataatgagctggcttgttctgtcacttgcttttggggctggagtgcagtggggaaacaggctcatgttttaggtcctgagaaaaggctccatgggcctcctgtgttaggaccagggggcttgttgggagagtgacatttgtaggggaccacttccgttggagaaccaaagggagggtgagttagggctgggagaatagatttttccacagaagtttaacatgaaggcattggggagggaaacatacaaggtttttcatcccacacttaaagacggggtggtcagggtggggtccccaccctgctcttagcacaagtttcttctgttgttgttaggctgcagtgcttcatgaaaccttggtcttcgcaagtaagttcaaatccaaggtgccagcccctcctgagcagcaattctggggctttatctaaagttgtgcctttaaaatgtgccagagccaggtcttgttgaagaggagaataaaaagaaataggctgtcttgctgcttacagcctctaaatagttctttattcagtcaaaaggagtgcacacaagctctggaatggcaggcccatgccttgtaattagttggcaggtggtttcccacgagatgatttttatgtggtgctggaaaggacggctagaatccccattgcagaagcttttagccttgttgtgattccctccgtttgtccgctgtgcttgcagttggctagttctttggtgatgtgctgagattcaagcacccactgtgtccaggcagcctagtgagaccaaggttccccaccctgaggaagagcagagaggtatagagcatttgagtgggcctttaagattggggttgttggtgatgtcaccttgcaaaaaggttggaaatggctgttaatcctgacactgatacgggctgtgggttttttaaaaattaaagcaaaatgaacagagacaagctgtgggggcaatgtcttgggtgccagtccaatgctaaatggaacctgggcagtagtagatgagctgagtctgtcacagggctgttcatccctaaaatgaagttgcctggggccccagtaccatgcggctcttggctactgtgtagcttgcagatgtgaagaatgcatggcacggcttcagctcagtgccttgggttttcctgacgctggtttgataggccagaagagtgcccacaggacaataatccttgctcgacccatggttgaggcaaggcacattacaagttttgaggtgcccaccacagaaagtgcctgcatcaggcacatgggtatggccacacttgatgaggcttatctagaacatggggccagtcttggtgaggggcaaagatccaggggtgtcaaacaccagttttggtacatggtctcagttacacagttgtctaatttcacacagtgaaggacaagcaggtgacctcaggctccctcttgccccacccacagcttccacagcacggcacctgtacctccgaggtggtgctggggttggttccatgaccaagatctatggaggacggcagagaaacggtgtcagacccagccatttcagcagaggctctaagagtgtggcccgccgggtcctccaagccctggaggggctgaaaatggtggaaaaggaccaagatgggtatgcagggttgtggctgggccaggggtagtctttgcctgctggtggcatgtggtggggttgttggacctccctataaatgaaggtatggggccttcagaaagcaaaagggagggcctcacccagacctctctggctgacttgctctgactctgggaaggtaatttagcgactgtctgctttcattagcctactcgttaacttttcccaattgattttttcggggcttttgatctaatgcttgcacaaacgacaccccgtcaactcccaagggtctccctctcctgccccgggctcgttaggatgtggctggccacaagtgggacttggcaaacacagtgcagttccatcacttggtactttgtttgtgcaccacccctgggggggtgggctgtactcatccagggtttgttttgttttgttttgtttttctttgtacaggggccgcaagctgacgcctcagggacagagagacctggacaggatcgctggacaggtgagaggtgcacgttatgcgtctgttgaaacagagcgggggggggggggggctggaggccacactgggaaggggttaaaaataaggtatactagccaggcggtggtggcgcacgcctttaatcccagcacgcaggaggcagaggcaggcggatttctggaggtcagcctggtctgcagagtgagtgccaggactatacagagaaaccgtgtcttgggaaaaaattaaaaaaaataagatatactataattgctggagactgggtgcccaatgtggtatgaggcttctataaacttagacctgtagtcccgtacagatacttggtgttagggcttctagccactcttcctccttagtaccaggcaccaggtttacacagcttgggatggggtagagatgtggcagacaggttcaggcccagactttgtagagtgacttccttcctaccacattccatgtaaagtgatgctcaccctgaacagcagtggtgtaaagaggagccctgggatctgacaggcactccgtgcctaattttctctctacaagagactctaccacctaagggtctt

SEQ ID NO: 32232 - DNA, 1205 bp, Mus musculus
cctgtcccagtcatctctgctgccggacctccctcttctgcctgtctctgggcttcttccatccttgcctttccctcctcccctcctcctccctcttctctttaccctctgtttccggccttctctggccaggttctcctgggctccacctcggtcctattcagcttccttcctctcgttcccaccatctccctcttctcagtaagctctgcctccctcatggccctgctcttggtgtcccttgccctctctgtgctccaagctgcagtgtcctgggggccttgtccccctcacagttggggggcaggttctgccccctgcccgtccttgtgctgctgcttcggggaacccttggtgggtgtggggagctgggctgggcacacctggtccacctctgaccctgttgccctctctccccagaaggtggaagaggtgggtgcctgggccctgggtggggggagggccagccctcccccatctctcccagcccctccccctccccatggccacctcctccccttcaccccctgtgaggggaggggtgggtaggtacgtcaccctcccgattgagctaagtatggaaatcctttctccttgtccctttccctgaccccagcctcagggaagggagggggctggtcctgtgggccacagtgggttttgatctgcccaccacagttcagtacccttggggccactcccaaccccaggtacctccccaagttcactacttctgaccttctcttctctcttctgttgcttgtttcatccctgacccggtcttccctgtccctgtcctggtctgtcctggtctgtcctggtctgtcctgtctgtcctggtctgtcctgtccctgtccctgtccggtctatcctatccctgtccctgcctgatctcccctgttggctgtccctggtctgtcctgtctctgtcctggtctgtcctgtccctgtcctgtctctgttctggtttcccctgtccctgtcctggtctggtctgtcctgtccctgtccctgcctggtctcccctgttggctgtctcggtcctggcctctgcctgactctgtccttggcctcggggtccaggctatcagggcgtctagggcgctcagagagcctgcgggtgagtgaccgccgccggccttcccggggcagcctcggggctaagggccggggtgggggccgttcccggagcgacgtggacatg

SEQ ID NO: 32233 - DNA, 1099 bp, Mus musculus
agtcgctgagggccagcccctgtgcctggtttagctccctgtaaccctcctgtctctgtcctagcggctcaaggattaccagcggcgcctggacttgactcacctacggcagagcagtgaccctatgctgagcgagttcaaggtgaacccctagtcttccctcagctcaccttggccctgctgccctgggggttcttatgtacactgtggctgagactgcatcccgggagtctccacccccatctccttcccagagggtgtccatggtgacctctgacctcactccctggtccttggctgttcagctgccctcccctcccttcatcaccttagctgatcatggctccttcctgcctcagaacctggacatcactaagaagaagttggtccatgaaggccccctcacgtggcgagtgaccaaagacaaagctataggtgagtgcacccaaaggtggtggggccatgggtagaggccaggcctgacattgctgcctcacccacagaagtgcacgtgctcttgctggacgacctgctgctgctgctccagcgccaggacgagaggctgctgctcaagtcccacagccggacgctgacacctacccccgatggcaagaccatgctgcggccggtgctccggctcacctctgccatgacccgagaggtggccactggtgagctggggcaggtcatctgagcgcacttgtcctatggcatggggagtggaactctctaagagccacagagctcactctggggaggaacaaagacttggaagggtcctaatgaggcagaactgggcaggactaagtaaggatggcagagatgaggcatagactgtcattgcagaactcaagaggctaagggaagagagaggagcttgagtgtgaggtcagcttgggctataaaggaccaccctgcctcaagaaactaaaaatagccatgcttggtgacatatgcctttaatcccagcactcaagaggcagaggcaggcatgatctctgtgttcgaggccagcctggtctacagagtgagttccaggacagccagggctacacagaaaaaccctgtcaggagaaacaacaacaaaataagaaactaa

SEQ ID NO: 32234 - DNA, 1183 bp, Mus musculus
ggccctagtctgaagtgacctgagggctcctgggagaggtgaagctagacagcagaggtggggcagaggaaggttgttatggggacagggggctttggggaggcagggtaggggccaggtatgggagacactgatgtgaggagtctgtattattacatggaaggttccagagtctgtgacactagatgggtggaaagtgaccctggacacttgtgggaaagggtcgggtgggaacggctaccttacaccatctgttcccaggccgggaggtgagcccagcacatcagtatgccctggctggtggcgtctctttccccttcttctggctggccggtgctggctctgctgtcttctgggtcctgggtgagtacagggtctgtgtagggtgaggctgggagccaggcgaaagagcacagcctgaaccacccatccccctacaggagccacgctggtactcataggctcccacgctgccttccaccagatggagcctgcagatggcgaggagctgcagatggaacctgtgtaaagtgtcctccaggacctgccggcctctcctgccggccggctgtcccatctctgtctgttctcgtcctacctggccttgctgctcagctccgagccttccacctgaggcctcaaacccagggaggggcttttgtctttggaaataaagctgttacaattgctatttggccaatactttcctggtattttctcttttataggtaaggagaggggttactaaaacacgaggtctgaggctggagagatggctcagccccagatggcactggctgctcttccataggacctgggttcagttcccagcacgcacttgtactgcacacacccacccaccccccccccacacacacctaagcataattaaaaataaaaaaaagtcagctgggtggtgatggcacacacacatgcctttaatcgaagcactcaggaggcagaggtagggtggatctctgagtttgaggccagcctggtctacagagccaggtctgtaggcataggtcaggtatagctatatagtgagaaccctgttaaagaaagagagatggagggagggaaggcaggaagaggactatggccagagcaaccctcccaatgtgaatgaacccgaacagttggggagcagctgcaggtcctttaaggagcctgtcctgggcag

SEQ ID NO: 32235 - DNA, 1235 bp, Mus musculus
gccaggagatgctgcaggagctacgccacgccgtgtcttgccgaaagacctcgcgttcccgccggcgccggcgccctggtggcccgagccgggccctgctgtcgctgcgcgcagtccgcgagatgcgactcagcaacggcaagctctactcggccggcgcgggcggggacgcgggcgcgcacgggggtccgcagcgcctcctggacgaccccggacctcctgggggaccccggccccaggctcccacgccctgcacgcacgtgcgcgtctgccaggagtgcaggcgcatccaggcgctgcgagcttcgggggccggggcgcccccacgtggcctgggcaccccagccgaagccaccagcccgcctcggccgcggccaggccccaccggaccccgcgagctgaccgagcacgaatgaccgtggacggggccgggcgtgcgccccgactgactgcagggacgcgatgcgccccagacggacaggacgccgcgattttgccttcaattcctggtgaagtccgagcccggctccggagcaggcctgcgcctcctagtggacttgagcaagggtgtcgcggacgcccgcattctatcccgcaccgtggacgggaggagcgcagagaccgaggactctaagggccacggactgtgggggctgctcccggagttggaaagcggtccgcggggaggaccccaacctgggactgcccagatgccccaagacttgacacggctctccacacttctggaggtggggagggcctctggacatgtgggtgtcccctggtgcccctctcttctctttctctcttttttggggggagaaacctcagaaatttctatgagacgcccccagggagagggtctcttgggcccctatacctccccctgccacatcccagtcctgttggaataaaaaaaagaacaaaaccccaaaactgggaatacctgggttttattttctgggggagggaggtcaatggacgtttttagaccctgggagtttaccgaaaacagcaagagatttgcacactcgccaccttgcacaatgcccgctgcatgcaggtcagctcaggtcccagcagccgccccctctccattgaccttctcaggacagaaggaggctgcgacagagaccctgagacagatggagagatgcaggatctgagaaggcggagtaattgggagggaagactcgaaagaacgaaaccagatggggctggggggatgggagagc

SEQ ID NO: 32236 - DNA, 1961 bp, Mus musculus
acatgcatgaacatatgtgcacacacactgacaaacaaaacaaaacatgtctatccgttctggtaagcaatgaataaatgccatttagtcccaaggtcccagagcaagctaatgtctgggcacctgggtaccagtctcctacttcctcacaacacaagtgtacaggtcagacaacagcagatatggggtttcagaagcaagactgccagccagtaacgctagcatttgggaggcaaatgggggtggtggggtggagaaggagttcagtactagcctgggctatgtaattagttcagagctagcctgagcaacctaagatttttgagagagagagagagagagagagagagagagagagagagaacaaactcagggttgctgtgatcaacacctaccacagcaccgttaggagccacacaggagcagagctgcgtccagtctcagctctaactctctcgatggagcctgcaggtgtctctaactgtccacctctgtctcgtgcccccttcctctgccccgcctgcttcccctccagcagaaggcagacctggctgtggcagccttcaccatcaccgccgagagggagaaggtcatcgacttctccaagcccttcatgaccctggggatcagcatcctctacagggtgcacatggtatgtctccctgggagtcgggagtggctgtgacctagcacaggggggaggtggggactagggacggactaaagtggacctgcgggtgggtcaggtactatggcttctcagttcctggaggattggggtggggggcaagcacacagccggggcggggtggctgctctcaccaccctttgccctctagggccgcaagcctggctacttctccttcctggaccccttctcccctgccgtgtggctcttcatgcttcttgcctacctggctgtcagctgtgtcttgttcctggctgccaggtgagtagactggtgggggacggggggttggagaggcaggagcccagcctacaagcctccctgccctgactgtccctcttctgttggctgaacactgcagagccacaggtgccctgtctccatttctcagtcttccccctactccccaggggtctgacttgggcctctctccttcctctctcttctgtcctcttacctccactgcagtatccgttcctggggcgtgtcagcatctctgttccctgcaccaccaccccccttctcttctgcatgtgtccgtcactctttcccccgcctcttcccttctcatctcagtggctttactacctcttgcaccccctccttttcctcatccactcatctctccacaggctgagcccttatgagtggtacaacccacacccgtgtctccgggcgcgtccccatatcctggagaaccagtacacgctgggcaacagcctctggttccccgtgggtggcttcatgcagcagggctcggagatcatgccgcgggcactgtccacacgctgtgtcagcggagtctggtgagcctttttttatctaaattgggaggccttccattctggggatatgggcaactgtgttctccccagcatctttctgttcccgccatggctctgcagtgaagagctgaacctcaacaaagtggcccactgtctctatggccttggctaggtgtgtactctctccttgtctcagtctccctcgcccgaaataagatagaaaggcccatgtcacatttaaaagcacagcatttgaaaatgtctggggcaggagaattatgagtttgagatcagcctgagccttactatcaagttcaagaccacactgggctactaataagacagtgttctccctcactctccaaaattcccagggattggggcatgacttcatggcagagcatgcggctagtgtgtacaagcggctgagttcaatcctaagtacatgaggaaaggggcaggcccacggcttgggttcactgagttat

SEQ ID NO: 32237 - DNA, 1117 bp, Mus musculus
tgcctcctgtgtagccgggagtttggtaaggcgttgcagctgacccggcaccagcgttttgtgcaccggctagagcggcgccataagtgcagcatttgtggcaagatgttcaagaagaagtctcatgtgcggaaccatctgcgtacacacactggggagcggcccttcccctgccctgactgctctaagcctttcaactcaccagccaacctggcccgccaccggctcacacacacgggggagcggccctaccggtgtggggactgcggcaaggccttcacgcagagctccactctgaggcagcatcgcctggtgcatgcccagcacttcccctaccgctgccaggagtgcggagtccgttttcaccgcccttatcgcctgctcatgcaccgctaccaccacacaggcgagtacccctacaagtgccgtgagtgcccccgttccttcttgctacgccggctgctagaggtccaccagcttgtgatccatgctgggcgccagccctaccgctgctcatcctgtggggccgccttcccctcgtcactgcggctccgtgagcatcgctgcgcggccgctgctgcccaggccccacggcgctttgagtgtgggacctgtggcaagaaagtgggctctgctgctcgcctgcaggcacatgaagccgcccatgctgctgcgggtcctggagaggtcttagccaaggagcctcctgctccccgggcctcgagagccactcgcacaccagtcgccccctccccgacagccctcagtggtacaacctctgctgcccctgcagcccctgcccggcgtcggggtccggagtgcagtgagtgcaagaagctcttcagcacagagacgtcactacaggtccatcggcgcatccacacaggtgagcggccatacccctgtccagactgtggcaaggccttccgccagagtacccatctgaaagaccacagacgcctacacacaggcgagcggccctttgcgtgtgaagtgtgtggcaaggcctttgccatctccatgcgtctggcagaacatcgccgcatccacacgggtgagcgaccctactcctgtcctgactgtggcaagagctaccgttccttctccaatctctgga

SEQ ID NO: 32238 - DNA, 2223 bp, Mus musculus
aatgttaaaaaaaaaaaaaagaaaccaaatatcgttggctgggggccagccagggcaaggggctgggggctgggcggagccaggtttggttaggtgggggggcggggactgccagtccctcccacccccacctgccccttccactccagtcaccccagtctccgactccaggaaacaaaactatctcatcgtttttattttgtggtctgtacagagcctgtgtccgtgtgtctgtgtgtgagcgagagagttggacggctagggagtttcactggagtggggagggagaccccaggccaggctctgcaccagcttggacatcaggcagtggacccggggcctgggctgggggagaggtgagtggactagggggagaagagctttgaatttctcttctcccagccctgacccctgcttaagggaggaacagagagaggctggtctgccctcgacggtgggccttttgtgccaaaaataaataaataatgccagtaactaaaccacctctctgttcccttcttgggggtcagggtagggactagaagcgggaggaaggggttgggtgtgtgtataggggaggggaggtacggggtctccaagcccttcccctggggcgctccagccagggactagtcaagtcggggcccatgacctgttgacctggctgtttctgtcatccagcccattcccagggtgcctctctccccctcacccagggtaagaactgagtgagacaaatgagcacgattgagacacgcgggcccccaccggtctctgagtgggaaaggcaagtgcgagagataaaggcctccaagagaaaaaaaagaaacaaaccaaagatttaaccatttaaaaaaataaaaaataaaaaaaaaattaaaaaaaaaataaaaccacagacaactccgctacctttttatacgttggggaaaaaaaatgaaaaaaaaaaagttagaattaaaaactaaaaaaaaaaaaaaaaaaaaaaaaaaaaccaaaaacaaaaaaacaaaacaaaaacaaaaccagaaacaaaacaaaacaaacaaacaaacaaaaacccaaaaaaatttaaaaacaacaaaaaaagaaaacagaaacaagaaacccacaaaaacttcaaaccgcggttcttttgtgtggtttaaactttgacctcagcagtctccaaagcaagacgatgatgacaaaggcggaaaaaaaaaatgtatatttttaagtatttgtccttggtgttagctccttcctaaaaaacaaaaggagcaaaggaaaaaaacaaatccagagaagtgttgctggaatggagactacttactttgtctgtgaacccccccattcctctgcccccgccttctctagccctgctgcccttcccccaacctgtcctccaaggctaggggcttaatatttatttatttatgtaattgcagggtgccagtggcttctcctgaacagaggtcctttggatcatagccgggtaggggagggaggcaggcatctttggggttatggtcttttgatcagcttagctaccctggctccgggtattagcccaccatggccggccaccatcccttctcaaggccaaggccctagggcagagtgagcactgtccttgtaaagatctgactggctccaccctctcggtgtggctgtcctctacagactcacttgaatgcccaggtggagccctggtaagtagtgggccagggtgggggccctggagtgacctgccttccctccaggcccattgaggtagctcttttggttgtcagacccctgtgttggcagcccctcccctcccctccccgatcccttccctgtctcttcttgtggtagcgggttagtgtttccgtgtttttaacttcaatctgcttgttcattgtacaatgtgcttcttttaaggccccgtttttgtaacttgtgtcattcatctgaaccacaaaatcaaaaaaataaaaaactaaaaactgtacagagagaactgatgtctggtgtcccttggcctcccgagtcctgagaagttaaatcagggtggcggggggaggggaagactgctctgttaaaatacaggatcaagaagaacgctgcatggctctgtgtgcccagggtttgaaaggctgaagaaagaggactgactgccttgagcaccaagctcataagctacttggtaagtacaaggccaacataggcctaagaatgtcttcagtgaagccgggcact

SEQ ID NO: 32239 - DNA, 1136 bp, Mus musculus
cccagagccacctaccaaatggtcttttccacaaggtaaaagagaaaggacccgaacaaccttacaccaaatactcagtagcttcatccaaaggatgtacagagttttcagcgttgcgctcaacagaatgtgtgtcccttctacgtgtttcctccccccccagccccccagctctccccaacagggcagggggtctcgctttaacccctccccccgccacccccagtctggggagagttcagaggaaggcctgggaatgggcttttttgtcctctgcccctttctttctccctttgaagggtgggctaggccattttttgccgagttccagctctcaaaagcccctcctgagctcccccatcacctttctgctctggagtctacctcctccccagactgtgggaaggtggtcggttcaagcaaagggggatacagtgagggcaaccaagttgtctttcttcccatcctgtctgtcagtttccctgaaaaaaaaaatcatattccagtgcctatccgtgggatcttcacgttctttgacattaaccagaaaccaaaaagattaactcgcctcgctctgcccaccctacaccccctatgatactggcagatacctctcctgtccccttccctccccaccttccaatgcacacacgcacacaccccagtggtgggctcctccggatggcatctccatcagaaccacatggtggtgacatcactatgacctgtggttccccatgcaagtggctaccactcccacgagacctccacgagtattggctggaccctgtatttgcctagctctggacaaatctcaacagtggacagaggagatgctactgggagccaccatgccctcctaccatggaggccaacaaagttttgaaccaaaaaaaaaaaaccaaaccaaacaaacaaacacacacaaaacccaacaaaaaacaaaaacagaaaaccaaacaaacaataaattaaaactagaaaaaagaatttatagatatatatatagatatatatatatatgggaaagaagatgtggactcttcaagacaagaatgagccgcaagatggagccaagccctgcagggtgatccaggcctttggttgccggggcggatggaacgatggacgcttct

SEQ ID NO: 32240 - DNA, 2324 bp, Mus musculus
ctggggattgctcaccttgcccattcatctaaccaacctgggctctgcctgccgcacatacagatatcccactctcatcaccttcccctgctccctggagtgagacagacttgcctttgggccttttaacccagactatcacacatgggctttgtggccacatcaggtcaagggaagctgtttcatacagagctaggaccagaaccagccactttctcgtgaagggaagacgaggacgagggctgatgggaagatggttcacaaactgcgccaataaaactgccctggaaagggcacaggtgggcgtccaggctctccggtactttttgttcgtcagcaaggggaaagggctggagaagagcaagatgctagctcatctgaacaggcatctccattccttgggcctctttttccttaaccatcacaggaaataaggccctggcatcgacgcccagcctgttcacacatgcactgtagggttctgtatgctcatggaggggaaatctttctaagttttatgtgtgcttgtgcaccacgtgtgttctggcctcctcggaggccaaagaacagggtgttagatgccttggaactagagttagagccagtcaagtcactgtgaggctgctgggtcctccggaagaacagccagtgattctaaccactgagccgcttctccagccattttcaggtgttcgtaacgagcccgtacactgagtgtagtgcccatggatggccaagttgtgagatcgccctggaactcaagttcccagaagtcgtgagctgcctgacatggcagcttggaaccgaaccctggtcccctggaagaggactccaggatttttagccctctcagtgagaggaattgattatttccaaaactgttggagccctgggaatggggaactggaaaggagaggcagccaggggttctctgcctgcaattccttcccccgaggctcccaaccctccctctctgactttgggtttcagagtccaaagctaaagcactacttgccactatgtggcccaaggggaatgtgtgaggcctctcctgccttctcccctcagaaggcaaagactcgagtgtttctcacacgaaatcaagtcttccatccttagggcctaaggagcaaggactggagagatgggggtgggtgggtgggtagattccaagggctgccctcttctgcgtcaagaagtgttcttgcccatgcctaagtgctcttcctggacccctaatggttggtggacagggaagaaatggcagacgtaggggttgagttctgtccaggagtggaggtgggtcccaccggcctctgtgtgtcctcagaacctgctcttactgcctcagagcaaagttctactaggtggtctgatggcaggctgcattgtgtgaggtcagtaaagcagtgccctgaagggtgagcggttgcaggcaggctggaccagtgaggggaggcttgcttaagtagtcctttcctgtctggcccgggaagagcataggcttgcttttattagtttgttgagaactgggtcctactctgtatctctgaaacacataatgtggatcaggctgacctcagaggtccaactgcctctgccccagagctctgggatatgcccttaggccttcttaccacagtttagctctgaggctctcccagcgtgagttttaagtgtacctggaggtgaagctgccacactccttggcccaggactggctctgttcaagccttgaggtagctccccttttccctcagctacagtctgaggcttctggctgggcagatttcctgctccaggccagttctttccatgcctctctcagacagcctctcctgcctgttaacttccaccctacctacacttcaccctatcggctttcatcacgatgtgcaccagggggaagttaacctaggtaggaggaaagggacctgtgcaggtggagtgctcccataagtctgtcgtggcacaagcccaaggagttgcccgggcgcacctgcaaccttccacggtgcatgctctgtggatccctcctgggcttgtcagagagttttgggtaccaaagaggtctagtagactccccagaagtggcttacaccagcaccatgaaggcaacgcaagagcttcaaaagttcagagtcaggatttgagggagggggcaatatcttaccactgagataggaccctgttggggcttgacgacagtggcccatcactccacagaggaacagagctgagggcttgccctggaatgaggagttccccagaatgattccagtatgtgggggctggggggcaggggcaaaacggtccttaccaag

SEQ ID NO: 32241 - DNA, 2009 bp, Mus musculus
gtcataggggtaactgcagcagcatttcctcatgtgggggccaggcccagtgtcaggcatcctcaagcttcagaaattggggcctggcttcctaagtcttccatgtgactgcagcaggcattaaaattcagaaaccaagggtttacaacagttgagctgaggccatggggcagccagcagggacagtggcataatatgggtcaacagtgttgagtgggaagcagtgggcttgagttgagctctgccctgccttcccgtcctaggtgtacatgtaccagctcttccggagcttggcctacatccactcccaaggtgtgtgtcaccgtgacatcaagccccagaatttgcttgtggaccctgacactgctgtcctcaagctctgcgattttggcaggtaggtctgtcctgtagcctgtggggtgcctgaaggcatgaaagaacctccagcttgcttccatgcttaaccctgcctggctcttcccacagtgcaaagcagctggttcggggggagcccaatgtgtcctacatctgctctcggtactaccgtgctccagaactcatctttggagccacagattacacctcgtccatcggtcagtcaggggagggagtgatgggcatagtgattaggctctaccagttgtccttcactggtgttccaggctgaggaggctggagctgctgcaccttgttagagccgctaaccaagagaaagctgctagcagcttcccaggggctcaacaggggccacggcagggctgggatttcaagtctgacttggctacagagttcacctccacttagaaactcccagtcagcctccggtctcagtaggagggaaggggctgacagtaatcagaactgttcccataagggtatggcctgctcccagggcctgccttgttctgtttctgagcgtagcattcccttcttccaggcttaaggggaaggctgaaatgagagcatgtacaggaaagtagggtgaaggagtgtgtcagcctgaggggctggtgaggccctcagatgggaacgtgtaccagtgcaggtcacagtacacagtagggagggctgagcaggccacaggccaggtggtgagcagctagctcaggatagaaagctttcttgtggctcagagcacacaggtgccagtgggcagggtcaggccatgtgctagtctagagaagtaaagaaggcgtcaaagggttcattgggatcccttgtcaccgagggcgtgggggccataagcacacctagactgaagagcacagcctgagccagtgctgctgcggtgtgtgtggggatcaccatgaggagcagtgtgcttacctctacccttccccttcagatgtgtggtcggctggctgtgtacttgctgagctacttctcggccagcccatcttccctggggacagtggggtggaccagcttgtggagatcatcaaggtgagttcgagggcagggccagagccagggaaagcaggggtgggcccgaggaaaggggctttgtctcaaaccctcactttacaggtactaggaacgccaaccagggaacaaatccgagagatgaaccctaactatacggagttcaagttcccccagatcaaagctcacccttggacaaaggtaggggcagaaatgtgaacttgcacagcatggctgaagggtgggtccccttggagaccaactactctggggacctggcttaaaatcatggtttgcagagtggacagatggctcagtggttaagagcacatgttactcttacacaggatctgggttcaatttccagcactcacatggtggctcacaaccacctgtaagcctagttccagggggtccttactggcatgcatgtggttaacacagatgtgcacaggcaaaacattcacatacatcaagtaaacagattgaaaatcaattaccaagggggtagtctctgaagttatccagggaggcagtcaacattttgtgattgtgaagtttatagaattttaaaagttgagaactca

SEQ ID NO: 32242 - DNA, 1880 bp, Mus musculus
gtcatacagaggtgtcccaggcaaagaaatgtagctggagactctagtgtgctcctggttacttgatttctcggctgttgggtaccctttatgcatgagacccagccttgtgtcatggtgcctgggtcctgtggagggtggcttgatggcccgatggtgttttatgcccacagctattattacaacaagcgcattctacacaagaccaaggggaaacggttcacctacaagttcaacttcaacaaactggtgctggtcaattaccctttcatcgatatggggctggctggtgagtgtgtggcctgcgtgtcagaagagggtgaagaggtggggttttctgtgttcagaggagaccagagaacatgatgcctactctcccttcttttgtcagggggtgcagttccccaaagcgccccaccagtgccatcaggcggcagccatttccgcttccctccctcaacaccctctgaggtgctgtcccccactgaggatccccgatctccaccggcttgttcttcatcatcctcttctctcttctctgctgtggttgcccgacgcctgggccgaggctcagtcagtgactgtagtgatggcacctcagagctggaggagcctctgggagaggaccccagggcacgaccacctggccctccggagctgggtgccttccgagggccccccctggcccgcctcccgcatgaccctggtgtcttccgtgtctatcctcggccccggggtggtcctgaacccctgagtcccttccctgtgtcacctttggctgggcctggctcccttctaccccctcagctctccccagctctgcccatgactcccacccacctggcctacacaccctcacccacgctgagtcctatgtaccccagtggtggtgggggccctagtggctcagggggaggttcccacttctccttcagtcctgaggacatgaaacggtacctgcaggcccacacccaaagcgtctacaactaccacctcagtccccgcgccttcctgcactacccagggctggtggtgccccagcctcagcgccctgacaagtgcccactgccgcccatggcaccggagaccccgccggtcccctcctcagcctcgtcttcctcttcctcctcttcatccccgttcaagtttaagctgcagccacccccgctaggacgccggcagcgggcagctggagagaaggctctaggaggcactgacaagagcagtggtggcagtggctcgggtggactggctgagggggcaggtgcagtagctcccccaccgccaccaccccagattaaggtggagcccatctcagaaggagagtcggaggaggtggaggtgactgacatcagtgacgaagatgaggaagatggggaggtgttcaagactccccgtgccccgcctgcaccccccaagccagagcccggagaggcaccgggggtggcccagtgcatgccccttaaactgcgctttaagcggcgctggagtgaagactgtcgcctggaggggggcgggtgcctgtctgggggccctgaagatgagggtgaggacaagaaggtgcgtggggacgtgggccctggggagtctgggggaccccttaccccacgacgggtgagctctgacctccagcacgccacagcccaactctccctggagcaccgagattcctgagagctgtgggcacgggcccacccccacccacccaccaccccactccctgagcttttgctgccttaaccgccccgtccccgcctcccccccccccccccccccagtcccggaggtgaggacagctctctttagtctcttccctgcctcctccctttctcctcccccacattttgtataaaactgaattttttttttaatggtagggt

SEQ ID NO: 32243 - DNA, 1186 bp, Mus musculus
ttatgcattgggaaaggtggtttctgaaggaggaaaaggaccacttttggatttcagattgggggttgaggcttcggggagactgaatctcgcacagagtcttgcttgctttctgtttgaattggaccccgcccatttttaaccatataccttggtcttccttctatagtggctcccgggcccctgatctgcctccccccttccgtgccttcctcccctttccctcctcccacccctccattaccggctgcctagtgctgaattattgatggcccctgattacccgggggtttgggaaatgacaacaaccgcagcccccccaccccaggctgcccaccccctccagggaccaagtcagcccgccaccaacctccacccaaggttaatgctgggggcgggccagcaggtgggctgagagttagccaaggatgagaaggcagaagaggcaagaagatgacagtcctgagcctgcctgggctgtctgggctgggttccctccatccaggtcctaagggtggacttgaggagggcattattggctcagagggtccagtgctgtgggggttgggggggctctcagacagtctgggtttcactctcaagggaagacagaagcctctgtgtgtgcaagcgctgacctcatcgtcaaccagccaccccacccggcctggtccttttaagaaaaaaaaaatactctccagtcctgggtgggagtaggagcttctataacctgagagaaagatcatacatgtttctgaggggagggccacagaagcagaggggcactgctagctctgaatggaagttggggtacacatagggggctgtgtccccatcctgctggccacgtgtacccttttctgcccctcaccctccctcactggcagccctgcccgccatcctggcttggtgcctggccccctggcactggccccgggacccgccgccgttggtttcctgtttctcccggtgtcgctggagccgactccagcttcccctcctcccagctcctgtctaggcccctcacgcagatgcccatacggttactctcagatttgggtcttaatctggctgaggaaaagggctttcctgatggtggaagactgaggggtggggcaggacataaaaactccagtaggagccagagcccccaccttggcatcttgaccccaggcaactccctgtc

SEQ ID NO: 32244 - DNA, 1181 bp, Mus musculus
cccctgggaacctggggccttgctgaggaagcaccctgcaggcccagaggaggagcaggcagagcctgggcccgctttgcctccttgtccttcttccgtggagcccaagcaacctgaggatgctgaggtctccaacatcagctttggtagcaacctggggactcgctgcgaggagggggaggagaagcacccaccatccctgggcacccctgtcctgctcccactgcctccaccccagctcctgtcaccacccccgaagtccccagcctttggtggccctggccgccctagtgagcagccttcgccctgccaggaagggagccagggtggcagccgcagtagcagtgtggcctcactggagaagggagctgcaccagcagcccgtgctcgcacgccattgacagccgcccagcagaagtacaagaagggcgacgtggtctgcacgcccaatggcatccgaaagaagttcaatggcaagcagtggcgccggctgtgctctcgggatggctgcatgaaggagtcccagcggcgcgggtactgctcgcgccacttgtccatgagaaccaaagagatggagggcctggcagacagtgggccaggtgggactgggcggcctgcgggtgtggcagcccgggaaggaagcactgagtttgactggggcgatgagacttcgagggacagtgaggccagcagtgtggcagcccggggagactcccgcccacgtctagtggcgcctgctgacctgtcacgcttcgagtttgatgagtgtgaggcggctgtgatgttggtgtcacttggcagctcccgctcaggcacaccttccttctctccggtctctacacagtcgcccttctctccagccccctctccctcaccctcgccgctctttggcttccgccctgccaatttcagccccataaatgcctcacctgtcatccaacgcactgctgttcgcagccgccacctgagcgccagcacccctaaggcaggcgtgctgacaccaccagacctgggcccccacccaccgccacctgcccctcgtgagcgccattcctctggcatcctacccaccttccagaccaacctaacctttactgtgcccattagccctgggcggaggaagacagaactgctgccccatccagggacattgggggcctccggagcaggaggtgggggag

SEQ ID NO: 32245 - DNA, 1156 bp, Mus musculus
tctttctcctaatggttctgtatggcctactctctcagtgatgagtgtctctacctgttcatcatctagattctcctcctctcagtctctgaactgacttatctccagctcagatctctgctcttgcctggcctatagtgtaggcctcagccctccctgccttctggggtcatagcttaccctagcctgtgggcactttcacccacagattatccagctgactcctgtgcctgtgagcacacctagtggcctggtaccacccctgagcccagctacaatgccgggacccacatcacagcctcagaaggtcctgttgccctcttccacaaggtgagtccagttaagcctctttcctcactctaggccagaccaggggtggagtagggccagcccacctcacctcacttcactcctcccctttcctctcctgtggcagaatcacctatgtacagtcagcaggtgggcacactctgcctctaggcaccagttctgcatgcagtcagactggaacagtgacctcatatgggcccaccagctctgtagctctgggcttcacatctttggggcccagtggtcctgcctttgtacagcctctgctctcaggtgagaagtggccttgggatttggggtggggttgagatagctccagatcctaacttggttccctgccccttctgtcttcctcccagcaggccaagctcctttgctggctcctggccaggtgggcgtgtcacctgtgcctagtccccagttgcctcctgcctgtacagcctctggaggtcctgtcataacagcattttaccctggcagccctgcacccacttcagcacccctgggcccaccttcccaagctccgccaagcctggtctacactgtagccaccagtaccactccacctgctgctaccattctgcccaagggcccaccagcctctgccactgccactccagcccctactagtcctttccctagcgccacaggtaggtgtcagggcagctcaggggcagggtttgtgcaagctgggaaatgcagggaatgggcttgagtgggcctggctcagtagatgctttttttcctttaccggcaggctccatgacctacagcttagtggctcccaaagctcagcgacccagcccaaaagctccccagaaagtaa

SEQ ID NO: 32246 - DNA, 1064 bp, Mus musculus
acctggcactaaaggccctgagactgtaagtatctagctgactgtggaactctaatactggtctctcttcttgccacttggtcttttccttccaccatgtctgtgtgtatctcctacctgtctgctgtacccattccattctacttgagatctgtgttctgggtatcctggccttcaggggccaagggtttttgtctcatcttttctctctcttaatcttgttcctggctattggctcatgatctcccctaccccactcctctctctctcttaacactggcacatctaagctcagtgatcttgcctgtccccacctcaggccagcaaattccccagctcatcttcagactggcgagttcctgggctgggcctggagagtcgtggggagcctcctacccctcccagcccagctccagccacaggccccagtggaagcagcagtggcagcagcgagggcagtagtgggagggcagctggggacacacccgagcgcaaggaagtcactagttctggcaagaagatgaaggtgcggcccccacccctgaagaagacctttgactctgtggacaagtgagcaggggctgggatcttggcagagtgcctagggttggttgggagaaggggcagctacaggcagagacaaaagaggtgaccctgctggccccccagcagggtcctgtcagaagtggactttgaagagcggtttgctgagctgccggagtttagaccagaggaggtgctgccctcacccaccctgcagtctctggccacctcgcctcgggctatcctcggctcctaccgaaagaagaggaagaattccacgggtaggcagctctggctcctaaataggttgggggcaggcctgaggccacctctgctaaatctgagcctgcttgtttgactagacctagactcagcacctgaagatcccacctcacccaagcgcaagatgaggagacgttcgagctgcagctcagagcccaacacccccaagagtgccaagtgcgagggggacatcttcacctttgaccgcacaggtgccagtgtttaggagactgggcttt

SEQ ID NO: 32247 - DNA, 1235 bp, Mus musculus
tccccagcccaggccacagcagccttccaggcccgctacgcagacatcttcccatccaaggtgtgtctgcaattaaagatccgagaggtccgccagaagatcatgcaggcagccactcccacagagcagccccctggggctgaagcccccctccctggaccaccccctactggcatggctgctactcctgtccccactcccagccctgctgggggccctgaccccacctctccaggctcggactctggcactgcccaagttgccccgccactgcctccacccccagagcctgggcctggacagcctggctgggagggggctccccagccctcaccacctccctctggcccttccacagctgccacaggcaggtgaggggcccttgttaaagaccccaggacccacagtacccccccctcaggatatggacagtatatagatggcaggaattgggggccagacagtgggatagttaccgcctccccaggaagccatttgtcctttccagttcggcgcggaatgtggcctgttcccttgtatatatattccctccctgtgctgggggcagcaggggcagataccctccactgagctcttgtagataacctgaagtgtgtgaccttcagagcttttcacttgtactttatgcagaatggctcctgtgagggctgcaagctggagggtagtatgagccttgggccacagggagaagatgcctgtggagtagtggggagttcatgcacccccctttttccccagaggggctggactcaggttagtttggggtgggggggttcctgcactttgccacaggcatggggaggattctccccaccctctgccctcccaacttgggttgtactttctaagaaggtgattccccctaccattgtccccattcccagaacaaaacatgttgatcatgtgcaatatttcttactgtgccgagaagccgcaatgaccgagattaaagctgtttaacacacgtgtgggctgctggcttgtttaagtactacttaacacactcctatctagctccaggtggacatgggtcagttccacacggccccatcattacctgttagcaccaagggacttaactttgtgtggtcagacagccagagcagtctggggactgtctacctatccaataggcagcagcctgatcaagtacagactgagaccttgcactgtgagaagggcagttcatggctattgggccactgaatcagttt

SEQ ID NO: 32248 - DNA, 1144 bp, Mus musculus
aacagtggcagggaccgttcgcctgttgcccaagggaatgcaaggtaatttgaatgttgaaaaaaatctcagaaagttgccaggtgttcctgcattaaattaagctttatcgcttctagctaagacatttccacctctgaaagagcccactggcattatgtctttaatgagtaactctgcaaacaggctgctgccacctgcaagattcttagcatgtcctccctagtttcacatccttaaactgttttacagctggcagtttcctgggggttggggggtggtgaaggtggacagtttggtccagagatgctgatctgacaacttactattggtgtgcctcctcagggcctgcttccgagaggccagcaccccaacccacttcgagagaaaaaccgacaggtaaacgagctggttcgggcagcactggctggctacccccgagcccacttcttagatgcagaccctgggtttgtgcattctgatggcaccataagtcaccatgacatgtatgattacctacacctgagccgcctggggtacacacctgtctgccgggccctgcactccttgcttcttcgtctcttggcccaagatcagggccaaggcatccctctgccagagacagcatcctaagcatctttccttcccttgatattaaatgcttcttctcctcttcctgttttctgctttatggttaggcatgtctgagtaccagttgttactcaaggtgtttctatttgtacctacaagatattttggggttttttctttgtttttcgagacagggtttctctgtatagccctggctgtcctggaactcactctgtagaccaggctggcctcgaactcagaaatccgcctgcctctgcctcccaagtgctgggattaaaggagtgcgccaccactcctggcagatattttggttcttgaagtcagttgaatttcagtagtgtgctttgggcaaattctggttgaaaccagtttgccattattacccagttaggatcagtgtccgtcagtaatctctggaacagtatccaaacagtatcaaatatctcaccccacaagctgtcccctcaggaagttgtcccagctgatatatgctaacttcctggtgctctggattttttagatgttacatgca

SEQ ID NO: 32249 - DNA, 1196 bp, Mus musculus
acgagtgccgcttggtctcgcctgcccctcccccctgcgttgggcccccgtggccgcaaggggtcccggcgggaagcggcagacgagcccactttgcggcctccatcgggggaggggagcgaggattccttcctacgtgacggtttctagtctgcgaaaggaggcggcgtctgggctcggccttcgccctacgcgcgagcgagcgcggcaggacggtccattgtgttggcccgagaggtaggggtgggcgtggcggatccacgtcctcgcggagctttcccgggcggactccactctcatccccagggggctgcggtgctgaggatgagtggggaaggggagaacccggccagcaagcccacgcctgtgcaagacgtgcagggtgacgggcgctggatgtctctggtgagtgaccgcgcgtggtccccagggttaggggcttggggggcgtgtatgtctatagaactgcttcgtgacatcctcctcctcacctaggtgggcagcctggtttgggttgtttggggttgttccgcctgaggcagcggggtggggcggggcctggagcgtgcgtgcctttgactctttctggctttctctgcagcaccatcggtttgtagcggacagcaaagacaaggaacccgaagtagtctttatcggggactccttggttcagctaatgcaccaatgtgaggtgagggtccacccgtttcctccttcctcatccaggcatgcaccctcactggcacttcaagcccagaacctgataagacaagataaggggtacagaaatgcccgtggtagcaggaatctaagaaccccatgtacatgtctgctgagaatgaagtgtgtgccctgagtttgtcgggttgggtttgtctctgtcgagttaaattgaggcgttccttcaagattgtgtcaggtgagggcttttcattgtttgtttaaggtggggcacagcccctgttgggtttactcgaagttgtaatagctttacagaaagtgaaggttgattgtaatggtattctgcaaagactttatcagtaataaagtccctaagacgtttagctacaatggctttcccccccaccccacaatgaggttcagttgtattgccattagctctgtgtatacttaaagcagacaggatcttcataaaatgaacgtaacttctgtgaattttggttaaagtgaagcag

SEQ ID NO: 32250 - DNA, 1155 bp, Mus musculus
gatatgtttattctatttgatatgtatgactgtttgtctgtaattatgtatgtgtacacgtgcccacagaggtatacacatacagaaggaggcatcacatcccctagacttggagttacagatagttgtgggtgctagaaaccaaaccccggtcctctccaagagcaagaaatgttcttaatcactgagtcatctctccagcccccacctcttttcctgttcttttttctgttgtctgtacttctgtccctgtctttgctgtctgattctcctgtgtgtctctctctcttctctgtctttatctgctccctttttccctgtcctttctgaatgtccctcccgaccagtctttcagggggtctcttctttgtgcttcctgctttctacttctcagaacaccccatctttcttcaggtccagcctttgtggggtccccgatggaggagtctgtggcccatgcagtggcagcagttggtagccgcctgtacatctctggaggatttgggggagtagccttgggccgcctgctggcattgaccttgccccccgacccctgccgtctgctgccttcacctgaagcttgtaatcagtctggggcctgcacctggtgccatggtgcttgcctgtctggggaccaggcccacaggtaaccatagtgactgacagtccatggcacagtgcacactggtgtcctctgagggcgttagggagtgagctggacttggggggtcttgaagttggactgtcaggttctgcctcacacatggggaagagaatgattatcagaagtgggggtgctgggaggactccagtctgaaccctgcttgtacctcagtgtctccccttctggagaaactgggttggaacttgcttttccatgtatggtatagtttagaccagcaaagattgagagtggtgctgcacccaggatatctgtatgggaagacactgagaccagaagggcagctcagaaaaggcttctagtacctggctgggaccaggctctgaccaaatctgcagcctcctcgactgcaggagcacagatgcccctgaaaaccaactagtcccttggttaactcattcgtctgcccgggtgccatgatggaagcctacttaggggttctgtttgtcccaagataggcagcggagcgagtc

SEQ ID NO: 32251 - DNA, 1193 bp, Mus musculus
gaacaagatgggggcggttctgaggtgggactcagaggtggtgggaagggcccaggtgtctgggatagtcatgaagagatctcctgggtaaaggcctgtgtcctctggggtcagggctaacgtgtggacgtcccggggcctcctgggccttcctgtcttgcccccctgaggacgagtgtgcaaatgggcaccatgactgcaatgagacccagaactgccatgaccagccccacggctacgagtgcagctgcaagacaggctacaccatggacaagtgaggctcagtcggggtgacacaagtcatgtggaaggaaacagcccaggctcatgggcgggggcgcctatctgtgagacgggagggcagttggcagacccagtgtgtaggggaggggggtgagggacaaaatagctagaggagccaggaaagaatgagtctctggaggagcatagtgggggcggggccagcggcctccaggccagcagcctactgaaagagagtgggacagtgttggaaggctgggcccctgccctcatcactgctcgtccctgcagtgtgactggcgtctgccgccctgtgtgcgcccagggctgtgtgaacggatcctgtgtggagcctgatcactgccgctgtcactttggctttgttggccgcaactgctccacagagtgtcgctgcaaccgccacagtgagtgtgccggcgttggagcacaggaccactgcctgctgtgccggaaccacaccaaggtatgggacccgccacccagcccctcaggccctggccgaacccgagcccctgagtctgcttagaagaggccttttattgtttttttgaagtctattttggtggtcctgggatggaacccagggcatttgacatgctaggcaagtgctgtaccactgagtcacaccccagccctcgtgctgaggcatcatcttaaggttaattcccagtcccaagaagccatggcagggaaggggtgggagaaccctattctggggagatgtgaaaagactttgggggctgtgtagtagtggacagaatagctggggagcctgggtgtgtggacacctttgctacttgggacttaagggctagggcaagtgagtgaagggagggcctaagccgcagcccagccctgtgcccccagcccagccggcaggggcagaccaggtgcccagccctgtgccccca

SEQ ID NO: 32252 - DNA, 2925 bp, Mus musculus
tccatgagccaaagcgccgggccctgggtcctggccgcaccgtgctgtttggcgtccaacccaagttcaccaatgtggacattcgcctgacactagacgtgaccttcggcgctgtggacctctatgtctccacctcctatgacacttttgtggtccgagtggcccctgacacaggcgtccacactgtgcacatccagccacctccacctcccccacctcccccgcctcctgctgatggtgtacctcgggtggctgcggacctaggaggattggggactggaagtgggtcaggatctccggtggagccacgggtccgggaggtgtggccacggggcctgattacctacgtcacagtgacggaaccctcggcagtgctggtggtccgcagtgtgagggacaggctggtgatcacctatccccatgagcaccacgccctcaaatccagccgcttctacctgctgctgctgggtgtaggagaccccaacgggcctggtgccaacggttcagcagactcacagggcctgctcttcttccggcaagaccaggcccacattgacctgttcgtcttcttctctgtcttcttttcctgcttcttcctcttcctctcactctgtgtgctcctctggaaggccaagcaggctctggaccagcgacaagagcagcgccgccacctgcaggagatgaccaagatggccagccgcccctttgccaaggtcactgtctgcttccctccagaccctgcaggcccagcacctgcatggaagccagctgggctccctcctcctgccttccgccgctctgagcctttcctagcacccctgttgctgacaggagccgggggtccctggggacccatgggaggcgggtgctgcccaccagccctccctgccaccacagctggcctacgagctggacccatcacccttgagcccacagaagatggcatggctggtgtggccactctgctgctccagctgcctgggggtcctcatgctcccaatggggcctgccttgggtcagccctcgtcactctgcgtcataggctccatgagtactgtgggggcagcgggggtgctggaggcagtggacacgggggtggtggaggccggaagggactgttgagtcaggacaatctcactagcatgtccctttgacctgtcaagggccctcttccacagctaccatgttgcctgatggggccactctgaactagggatcccctggacagtcttcagaaaccactggctcccttttcccagggtccccccctttgttctgcatttagcaactatttattactttgtgcccagtacagttgtgggtacaaagcaaagcaggaggtgagaggaggttccctcatctggtggggattgagttcttgtggaaggagacatgtgcccacatgcacacacacatacacacagtgtggcactgaggtaaagttgatgaagcatttggagaaactgggctgagaaaggtgacagacggagggaagacctttgggaaacaaattcaagagtcgagggaactgtaaggctgaagggcccgaggctggaagcggtttgtcttatcacgagaaccagagacctggccactgcaacccagatcaagtgtcggctgagctgggttcttagtctcagggcagtgggcagcggttggacacttctgtggtggtaaatgaggggcttcagctctggggagaagagtgggctggtgggcacagaagacgctgcaggtggttaactgggcaggaggaaggtgagtggcaggatgtgacagtggtgcagatgttagagtagggaagaggacatatccagaacggccactttatgtcctgggccatgggtggacagtgaggttgttactaatctggggcaggctggggcaggctggggcttgtgggcttccaggtgtgactgcgggctcatacaggagggaatctagtgccctgtggtgagtttagcactggcaaaagcaggcagctactgagaggacaggacagtgcagctgcccgctgtaggagcagtgagctgctgccgggctagaccagggccaccagcggaacctggagatgtaggcttatttaaaggcagcctcagaggcaaattctttgcctgagatgcctcacatctcatcctggcaggtgtgggctgggagaccctggaggggccatcatttggctttttcttgagtctctgggactctgcacagaggccacctacacctggatctcctttttggacttaagagctctctcctcccccagtcctaggcagctgcctgagcttgggactcttgctttcccaagactccaacttctagccgctgttttggtcctggcgtgggggttggacccagcctctttcccttgctgcagttaccctgtctgatgtgatcctgctaatgtgtgcatgtcagcatgggtcacatctctatgataggagggcaactgaggcaaagaataaagtgtggagaagacttgtgcatcgtaacttcatctgtgcagaggagggagggatgggctctgggtgagtggaacatgtgtctttgtcctggccccacctccaagccgtgtatcctgagcctggctctgccccttcttggcaatggcagggttccacaacaggatctctcattccccagaagagagatggcggggacaatgggcagggacgtctttgagcctttctttgtccctgccacagtttggctcagggagaatcagacagtctgtgtcccagtgattgtcattagacaagaaacccccctggggcacagaacacagaaaccattgtttaaaccggaggaattgagcacggagaactggtggtgctggtgagggcagaagctgcagggccctggcagctgggtgtggatgagtatcctctgaagtaaactcagcattaaagccctggaatgccaaag

SEQ ID NO: 32253 - DNA, 1195 bp, Mus musculus
caactctgggcatcttgtgaactgggtaaacgtggatggctctatcccactcctcctatgacactaatgcaatgggtccagaccagactggggagggggagccaattcatgaactgatgatgggtcccctcccccccttcttccccctccacctgctagaaatcacaaagccttattcatgtgcactgatatctttcttcctcccctagatctggctccttctgacaactctcctaacaaggtgagcactgccacttttgctggctgtttgtgctacaaaatgtctctgaggaaacttgggatatctgtattgttttgatttctttgtttgttgagacaggatctcaccatgcagccttggcaacctttgaactatgtaaccaaagttggccttgaactgtggccatacacttgccttagcctttcatgtgctgggatgacaagtgtgtgctaccacaccaagctgagaaaagtattcttgaagagacacaactgtgaaatccagtatgggtctctactcctcaacactgcacagaaagacagactggtcaatgggtcccatgagtctactacaagagtgtgtgttggaattatctctgccctgtggttaatttctggctatgactcctagaattccatggctcttgtcaaggaactaactctgtgatcctcaagtttggtcacctagacaatgggcattctgcctacctcaaaaagaggacaaaagaatacagcaagttggcttgtgcacagcccggcccacgcagggcagcacatcatactctctcctccagtctagacctgctctgacctcaaagcagggcttccattctaatgggtctgagatcctcttccttcattttataacaattttaccaagatttcatcatttaagcctttcaacagagtacacacatagaccaaagagtgctttaagtcataaggacactttcacagtgggaactttcacaaacctgtcctcctccccagacacacattgctgtcacatttcctacagagggcaaaggcagtctgacagtgcacatcctcgcacacatctggctttcattctgctctgtagcccatctggatgtctgactgtgagtgacaggagccctctcccaccgctgcagcaaggtgaggctcaggcctgtggtgctgagtcactgatcaactctcatcctttcaggtggat

SEQ ID NO: 32254 - DNA, 1140 bp, Mus musculus
attcaaatagcagcaccgctaggccaacacgctatctgcttctaaccaccttgcgacaaagacgcataaatgagtaaggtggcaatttttagtctctaaaattgctccggtcgtctgcttctagttgctcctaattcaggcaactaaaaggacaacttaacttgaaccttcagggttcaggacccggagccctgagcaaaatgggccctctccaagtccctccccctgttccctgttgtccaatggctatgccagaattgggaggtggaggtgggcgggaccagattgttagtaaacgctgagccacgtgctagggccaactcgggcgtgccctagacgggcgcatgcgcaataggtacgcggccggtagaactgcgcgcgccgctaagcggaagctacggtgggagccgcagcgcgcgtggtcagcggctatggagggcgcaaagcgtgcagacgccaatttactcactgacaccggaacagagtccagcccccgaagtccagtctgcagtctccggcactttgcttgtgagcaaaacctgctgtcccggccggatggatctgcttcttttcttcaaggtacgagcctcaccaagtttaactcagcgcgcgccatcctcaccgaagaagggtttttgaagagcggttactgtgtagtatgtaaccaagtacgcccgcctccttgaacttatttctagatgttgagtatacccacctcccgtctcgagaagaaatgagttggccagcctggtaaatccctctcagaggagatcgagagcaagaccactctcataagagtgactatcccagaataggtatttcaccaaggcagatattacccttctctagatttctttctttcttttatctttctttcaagacttattttatttatataagagcactgtagctgtcttcagacacaccagaagagggcatcagatcccgttacagatggctgtgagccaccatgtggttgctgggaattcaactcaggacctttggaagagcagtcagtgctcataaccactgagccatctctccagctccccttgactagatttcttgggtttttgttgttgttgttgttgttgttgttttcactttgttgttgaactcactttgtagaccaggctggcc

SEQ ID NO: 32255 - DNA, 1635 bp, Mus musculus
ctctggctctctgggtccccctccccaggcctggcagccaagggcatcagaagccttccctgtgggtggaggttaggggaacccaggtggcaccagcctctgctgctcctttttggacactagctgggagtgccggcagaggcagggctgggtaccacagggccagcttgagtgtgggaggaacttgaagagggggactctcccctaccaaccccccctttccagccacagttttccttttcctcacttcctccacctccacctcccttccctctccctctccctctccctctccctcgcctgtttacactccccaaatacgcacaggctgttatcatgggtcttgagtcatcacacacagacacacagcctgccccagtgtccctgcccccagctggccacagggcccgccccacagagccccctgctgccctgggctaatgaaagccagatggctgcctgtgactcagccatggcctgtgggaacccagacgccctaccttcccatgccccacacccggcccctgcgtccccagcagacagaagcaacctgctcctgtggggatggaggccagcgtgtctgggcctgagaatccaaactgctgtggcactgaatggcaaatggctgcattctgctctggccatacctgaaggaacctaaaactgctttgtaaagccaaggtcctgaccctgggtcttggctctgccctctgtatcaagtaaactcacccagtggggtagaaggtgttctcttaaactgttgaaagatcctcaacagctcagcctgggccaggcctgactgacacctcctaacagacctggaaacaagactgttggtcgccacttgtctcaaaggatggaaagaacccagaagtagccatttgcatcttgagaccacctggtctcccatgcagaaccaagactggaacacacttggccagtgtgcctccatgtgtcctcattggacagcggtggagatccgaagacagacttcctcccatctcgggggactgtagaaggtgcaggtgttgtggtacacagtatggtggcaggtggtggactgttatacccctacccttacctccccagaggacgcagtgagtccccagctgggatcccaccacactggacaggagccaggagtgctcttttgggaagttgtggcttaggtatttttcacagttgaccagtgttctgtccgatcattaaacttatttaagatagaaactgccatccattcatctgttatgtaactttctaaaagagctgagctgcacagccattgagtcaggatctggagttagtcaaatggctcagatgagcctgcaaatgagagacagaggtggggccagccaccaggacagggattagatgaggagacaggaagaaaggtggagacagaggagggggaagaggcggcaaaagcacaccccgcttgctcgagcagcccccacggtggctggcgccactgcttctgatctggatcctggggatggggtgggcggagaggctgagtcagggagggagagcccctctttgggcatccggcccccacctccatgtctcctgtttgtcctgccctggacaggtctctgctggctgctgccatgcaccagtgacacccccacctctctg

SEQ ID NO: 32256 - DNA, 1388 bp, Mus musculus
gaggctactcgggcagcacacaggggggcacaagcacacagtagccggtgctggagccttcagaggctcgtgccggctgcttctaatagcacctgccttggcccctttttcccctctgagtcctgtggtgctggggacagagttatcccagggctgcctctctctagcccactttttccagaggagcttctctcttcatacaggccaggcattttcctctctggattccaacaggcaacagtgagcttttcttttatctttgtccctccacttcctcctcccctgccttcttagctaaagaagcctcccttgtgaggccacagtgactggggaggagccttgcctgtctgcccctccctactctgctttttagccccttggcttcccagactctcatgcagttggttgtaaattcttccaggagctgtttttctgtctacttttcaggatttaaaaaaaatttttttcaaaaactttaaaaaaaaaaaaagtttaagaagcaaattgcagagggaggaagcattgactttttttggtaattatgcttttttttttttttttttaatttttagaatttgtctgtttttactgtgggtcagccgttgatacttcatcaaataaccatttctttgctgagttcaggtaaccgaggaagagccacaccctcgaaacaacaaaatcacctttaacctaactttttatatgatgtctcagttccccgtaactttgcacacaagcgtctgttcagttggattgtaactgctttttgtacttggagagagtgtgactattgaacttgaaaccttttactccaggagtcgtggtagtttctggtgggcataagcgggtgagagggtgaagggaaggtgggggtggggccagcttccctttagaccctaaagttcctccaccaccaccaccaccaccacctccacctccaccaccacctccacctccattgctcttccaggtgccagacctgcaatgttttacagtggtccttttgattactctcacttcccgaatgttctaaccggaccttagcaaaccgcacttattacaagatgttttaccctgttttgttttgttttctttcaataaatgacatggcacctcttatcaggaaggaagcagggttgaaaccctgaagtgttactgcagttggcctttaattgggatgggaacctttgaaggggaaatgcctcgatcatttatttaaacaaagtgggtctgtacttcacataacccagatgctccttgtgcagggacagacaggtgagagctgtaagaatgagactatgctggcgcaggcccctctccgggtgtgttgcccaacctaccctaaggtccagcctggatgctgctctcagggtggccctgtaccgcca

SEQ ID NO: 32257 - DNA, 1201 bp, Mus musculus
ttataaaaagaatgctgtgtccagtgtccttttaagcttacattgacatacttgaacccctgggatgatctgaggtactgcatacaaagcacttaactctcatgtgcacttaaactctcatgtttgtatggtgcctgctatgcaagtgctttcttcagggaaagttcatttcccctgccacaagtattgaaactgcaaaggggagttgtatctgggaggccctgccatcacaaaaggctcttgggagcgacttgagctcctgttctagcaaccaagtcatctttatatctgtctatccatccatcctatctaggcaagatctcactggcctaggctgccctcagcctcactgtgtaacttaagctggcctcaactcatggcaatcttcctcagtgctgagattaagggcatggaccaccattccagctccatcactgttaattgcctgatacactaacttcctacattgcctcataacccaccagctttaagagaattgatcctgagcattcttgtgttctgtcgtcagatcaatgaggaaatctccgtgaagcatcttccatctacagagcccgacccccacgttgtccgtattggctggtccttggactcttgcagcactcagctaggtaagactgtcagccaggcagtcctcactaaagagtgatagcccctgactctggattctcaggactcctaagctgctcttaacagtattgattcaacacacacctactgggggtggggggtgggggggcaggtgcacctgttaattttgtgttactgcctggctttaggcagactaaattcaactgaaacctatcggaaacaactcttttgggttttttttcccccagagttaattcttcaacgttgtcttttaccagagagtccaaagttcaactgttccctttatttgaaaccatttctaccctcacaccatactgaaataaacgtgtaaaccctgctctttataattttctgtccagagtagaacctagaatgaaagtggaagaagcaggggctgccaggctcagtgactgtcttttgcacattgcttttggtttttatgcatgctcaaaagggatcatgttgtgaacttttatgtactctggtttcttttaatatataatgggccaaattttggaaataagtatggtttcttggccagtgcataattttccattgtgtagcaatttcc

SEQ ID NO: 32258 - DNA, 1170 bp, Mus musculus
gttggctttcgccagaatatccaggaggagagtcctagaaattcatttctcatgagcagctttttggcatttctgcctcacaagctgactccaccagagtgccctgacaaatacaattgctgatattctacaagaagaaagaaaactggagaagcaaaatggccgattacagaacggagacgtggacaacgaggataacaacagcacaccagaccctacgtgggtccacgagatttttcagggaacattaactaatgaaaccaggtgtcttacttgtgaaactataagcagcaaagatgaagattttctagacctttctgttgatcaaaacacatcagttactcactgcttaagagggttcagtaacagaaactctgtgcagtgaatataagtactactgtgaagagtgcagtagcaagcagaaagcacacaagcggatgaaagttaagaaacttcctatgatcctggctctgtacctgaagaggtttaagtatatggaccagcttcaccgatacacaaagctttcttactgcgtggtgtttcctttagaactctgtctgtttaacacttcaggagatgcaaccaaccctgacagaatgtatgacctggtcactgttgtggttcactgtggaagtggtcccaacagaggccattatattgcaatagttaagagtcatgatttctggttgttatttgatgaagacattgtagaaaaattgatgcccaagctattgaagaattctatggattgacatctgatatctccaagaactcggaatcgggtacatccttttctatcagtctcgggactgagaggagcaacagaggggaggagcttctgcaagtttctctggttgtttcagaaaggatcgaacagatattcaagaagagagagcacgcagacagacagacaggcagacaggcaggcagacagacagacgcaggacgttcagggcagtagctcactttgcatacaataaagcaaagactgtggattaacatgcccttccggttacagtagttgaatttttttgctcaggaatcattctgtctgtgcagttcacacaaggaagtgaaatcagagataccagctctcctgtaaagcagctgccagctgccaacacattttctgtagtaattacaccaatgatgatttgagtttttcgggag

SEQ ID NO: 32259 - DNA, 1188 bp, Mus musculus
tgtctgttccttgttccaaacaggaattaatttgtgtattgcagaatatttatatttggcccattgaataccatcattttaaaataaaattgataattactatcctaaagataagttgaagattgtttttatgcatgcttttgtactttctataaattcatgcatgcatgcatcccatttactgtatttaaaaacagcccttctatgggagaaaagtatatgtgaattggatcacatgcttattcttttgagtttcctcctgcttcagcacagttaattaaatcgtgtgccgtagatgatcttttaaaatgttgaataatcaagctttaatttgtatatttatcaatatatatctcagagcttacaattgcttaaaattgattcatccctcagatgctataaatcctcaaatttgcaattgtttatgcatatacaactcataagaaaaaatgctgttactttaagaaggctgtttttggacagttaagaatttgttctgggttgcctggaaaagattcccaggatttgtttttgtgttatagagatttacaaaaagctttagctgataaaggattacagatggcttctgaaaagatacaaactcgggatccttttaattattagggttttagacttgctaatcaagctgtttttccctagaagatagttattctcagagacaacttaaggattttgaatgattttcaaaaattgtcaggtgatattaattggctttgccactatttaaagcttactacatgggaattgaaacctttatttgatattcttaaagggagtcctgttccttcctcccctagatctttaacctcagaaggattgctggccttacaagtggaaaaagctactgaagagcaatttgtcacttatatagattactctttgcctttacatctgttaatttttaatacgattcatatgcctacaggattgttatgacaaaagtctcctctaatgtgaatacatttgagggtttctcctaaacataatatcttgcaatattatgaaacagtagctcagatgattatcctcggaagggagccagatattatttttcagccttacagcataggtcaagacacttggctgaagtagcacagtacagatttgttgcttgctcaaatagggtttaaaggaactatagacagccactaccctcaagataggttg

SEQ ID NO: 32260 - DNA, 1234 bp, Mus musculus
atttagtgcattcccatgcacactatttaaatcatacctttattttcaaaatttgaaatttaaatgtcaaagaatttaataaatactttatagtatcttaaaaggatctacttattggcttatagattgatcctaaaacagctaccttattaggaaagggaaaaacaggttctctccacagaacgctgcaaaagcatattggttaattcgtgtgacaagctggcaggtaagttgactcagtgtcctgattgaaatgactaagaaactaaattagattcatgttttagatccatccttgcttgccatttttccggtttagactagccttttaactttatggcaatagtacatcagagactgtatattctgacttagtgagattagtcatttaatagagtcataatgatttttctcttttcttcagtgtgaccagtcattctaactcaatcttagactggtcgaatattcagtccaatattagagattcctatattcttaattacctagcaaagttaattcagagcacatcccccacttccagagagtctctggccttctgagcttaagcgttgctaatttgcaactgaataaagtacctggacttccccaaagaggatgtgcattgctactttctcattgcctagatcttgtttttttttttttttttttttcaagcaggtcaatcaacatcctctggcctgacagaagcgggtgaacatcccccgcccccgagggcgtatatccacgcccctgagggcgtacattcccgccctcgagagcatacaggtggcaactgttatattcatttcaaggacattccagcaccgtggttttcggtctaagttaaaatttaggtttaccaagagggctaaaaaaggcagatatttctaatactaaaagagattggtttttattctgatagacaggcttagtcccttagctggcctctggttttccacccttgctgttactgcaaggtccccttagttcctcaggctgtgggaataacagagatgaggaggatgacttccagctcctattttagccaaaagccacaggtgtgggtcgtgacagcacccatgggaggaatcaggtcaatttccacccaagccaaggttaaaagcccactcatctacggatgagaaaatcatttgatcacctcagttaagcatggccttattaaacttaattaatgggggggggggagaggttagagactgtactgttggaaggg

SEQ ID NO: 32261 - DNA, 1209 bp, Mus musculus
aaaaggccctactgatggccagccttggcctttgcctgacctaaccaagcctttcactctatgtaaaagagagatcaggggaagccagaagagtccttactcagactttgggactttgaaaaaggccagtggcttacctatccaggaagttagaccctgttgccagcaggtggttttcttgcctgaaagctattgctgccatgtctctgtttgtcaagtatgctgataagctcactctgggacagcaaataactgtagtggcaccccacactcttgagagcattatctgaaagccccctgactgatggatgaggaccaacgttcctgcgacacattatcagagcttttttgttgactgaacgagtgatcttcgctcccccgctgtcctcaagtgaccctactgcccgagacttcacctactcatcactgcgctgacactctggcagaagaaactggtactcgaaatgatctgaaggatcagatcagccttggcctgagagtttgagctggtacacggatggcagtagcctcacggttgaaggtaagcagaagacggggacagcagtctggtggtggacagaaagcaagtgatccaggccagcagccttcctgagggacgtcggcccagaaagctgaacttgtggctttgatataagctctaaaaatggcaaaagaaaagtctacactgacagcagatatgcttttgccactgtacggagcaatatacagacaaagagggctattgacatctgcagagaaagatctaagatgctgtggctaaaggaaatcagatggcagatctaactgccatacaggtggcctaaggagcaatgatcctggcagtcaaggagcctaaagattattatgatgtcagagagaccagctttagatacacccctgagcactatcaagttatggacaaattaggacaggtaaaggaaaccctgtatgaaatagtagaaacagaaaaaggaaaactagtcttcccatgggaagaagaatgcaaatatgttaccaacttactttacttgacccacttgggggcaaaaaaaaatattaaaaggtgtggttaggtcctttgactactatgttacaggactctctgacttggcagaagaaatagtcaaaagctgcaaggcctgtgctatgaataatgcaggatactccatgtatatactcctgagaagaggctcaggggcgactggccta

SEQ ID NO: 32262 - DNA, 1207 bp, Mus musculus
gaggctagaaaaatagcccggaagccaacggcggtctacacagctacaaaatgagatcgacatgggattccctttgactcgccccagttggaactgcaacatggctaaaggtaggaaaagcttgaaaatctatcgccaggctccggtctccaaggtgcctcaagacgggcccactaatttggctaaggtaagaggtaatgcaggggccgattgaacctccctcggtgttccttgaaaggcttatggaagccttcaggcggttcactccctttgatcttaccttggaagcccagaaggcctcagtggccatggcctttcataaggcagtcagctcccgatatcagaaagaaacttcagagattaaaaggtgtattatgagagggagacagtcattcaatctagtaaaagaggcagagaaagtgtgtgtgtgagagagagagaggcgggaggcagaagaaagaaaaaacaggagggatcttagacaagagagaaagttgactaaaatcttggccacagtgataaaaaaaaaaagacaagatctagacaggaaacctggacaactgaagactgagcctcagctaaagaggctcagctgtgtcagactgaagtgacttatttgggatacacccttcgaggtggaaagcagtggctaaaagaagccagaaaaagactgtaactcagatccccaccccaactacaccaaggcaagtaagagaattcttgggtactgctggcttctacagactctagatacctgggttggcgactttagctgcccagttgtacccctaatcaaggaaggggaggtgtttgtgtggaccccatatcaccagaaagcctttaaagaggttaaaaaggccctactgatggccagcctatgcctgacctaaccaagcctttcactctttatgtgaaagagagagcaggggtcaccagaggagtccttactcagactttgggactttgaaaaaggccagggacttacctatccaagaagttacaccctgttgccagcgggtggttttcttgcttgaaagctattgctgccataatctgcttgtcaaggatgctgataagctcactctgggacagcaaataactgtagtggcatcccacactcttgaaagcattaccaacgctcctgtgacacatcagagctttttgttgtctaaatgagtgaccttcgcttcattccacctactgtccc

SEQ ID NO: 32263 - DNA, 1198 bp, Mus musculus
cagctgaggtggctctagaatggcagaaaagtcattctgactgcccaatttttcaggtacgccatcactgtctggtattttgatgccaaggaacgggcagcagccagagacaagtatcagctaggtacgtgctttcttcctttgtccttcctagtccctgtgtgctgccaggtccttagcctttcttacccccttgggtgctgagagtggttcccagggcctttgccacactaggccagcactgccgccagcccgctcccacaggtctttctcaccagtccctttgcccagttcttgcctactttcctggtatcccctacctgagacccattttttttttttttctgttaatgttctccccatcttcgcaggtttcttttggcttctttgtcccttcctagtgattcacaatttcttgtcttcctctcatcctcagcatcgggacagaaaggtgttcaagtaccagtatcacagccaactacacctacctaatggccagccccagagctgcgtggaccagcagcagctcctgcctcagtgcccgctcctttcctgccactgctgctgcttctggcttgcctctgtactgtgtggtgtggagggcactaagtatcactgaggagcaacaaggagagacctctgctgccccgtgagcgagcggtgctgggttttgacctgggcagtggccagtgtggctggcggtcatgactggtggctgtgtctggtccgttgagtgtagagctgagaagaggcaggatttggggttgaggtgagtcatggcctcttgctggaaaggtgtgttggggtgtgggtgtcatctcaccctcgtccccactcctccggcctggaatgtgaagtgactccccagcccctttggctgtggcagtgtatggactgggctgccactgtctgggcagagtagggtgccatgacgagcatgggtatggaggttctgccagccaagaaataaaagtttacctcagagctgcacacacttgtattcctctctgtaaagagatttacacatacagttagggcaggtaaggatatcagggccactgagatcaccagtgaagcccaagctcagcgggccaccaagcggagctggaaggctgggggcacattacccagaccagtacactgtgggttaaggttgatgttggcaggacttcccacagggagcagggagaacttctgc

SEQ ID NO: 32264 - DNA, 1107 bp, Mus musculus
gattaaaggggtgcaccaccactgcccggcaggatctcactttgtagctcaggttggtcttaaattcaccatcctactgcctgtacctctccagtcccgaatatcatgtgtgagtcaccgcctggcaagggccatggtagttaggtaccgaaatgctcctgtacagatgcaaacctgtacagggctgtgtttggagaatgagtcccccacataacctgcagagggacaacagagtcagacagtgcacggtctggaaaataaaaataaaaataaaagagtccaggcagacaaaggccaggaagacgtctagagaccagcttcggaccctccaggtcacaatgcccttctctttcagctcacctgttcttctggaccagccctgcccgaaggctggggctcagaaccaggccccaagaggccaggccccaatctgccccagtctcagaaaagttactccatcccccatcccccttcgctggcctggtggggcctggctgtggggcaagattgagccacaggggaaaggggaccccatacctgctgctgcttcctctgccttggctaactctagtccccctgagccccaaaccctacctgaagaactcccaaagcttgagaccagggccgtttggccccaacttcctgcctggccccgctgttgcaagtctgttatttattacctggaggcctgttccatcctgtcctggtcctccataaagcattgtttacacctgtgtttcggcctctgtcattctgagatgaggaaaccgaagtggtctctaatggaagctatgaataggcctctgcatgaggagcccctgtttgtgggtggtgggacttggtttgtgggacaagttggggtaggtacatcctggctcacgtactcattgaggacagagttcgtcattgtatacatgtccttgctttttcctacacacagcccccctttttgacacagggccttgttatagcctagactaacctggaatttgaggtctccctgcctcagcctcccatgagctgggattacaatgtacccatcccaggttgtgtacatgcttcatggtagtggcagtacacgatccatcaaaggtggtgtgtgcagcg

SEQ ID NO: 32265 - DNA, 1214 bp, Mus musculus
tctgttgtgtgctaagcccaggtgaggcctctggggagacagcagtaggtaaaacagaccaaaaccaaccaaacaaaaatttctgtttgtgtagtactacattgtcttgggagaagacagaccacagattaaatattcatgtaaatgacatagtagttgggggcagactgtggagaaaaacagtctgataaggaggataggatgaggaatgccctttgaaacagggcaccgaagaaggtgacatttgagcaaaaacgtagagcaggggagtcagagaaagcagatgaaaacagtgcagagaccctggcataggtcctgcgcggtgcggccagagtagggtctgtgtgtgcactagggtacagcatgaggtgggggactgagcagtcagtattgacagccctggggcagtctctcattataccttgtatctatagtagtcatagggaactaccaagcagggcagaagatggagaggctcagactttgtgcatcacaggcttcctctgtctggataggaggagactgtggagcaggaggcattgctgggtgccagtgaaggagctgctggggactgctgtgaggagggggtaggatactaggtatggcgttcaggtgataagtgcttgcctagcatgtgtgccagaagcacaggctcccatactgagcactgggtaggctggtggtaatggtggtagtgtgccttcaggaagtggccttaactatggagtgagttggaggccacccttttggggataggagaaataggcctacagccgggggtgggggtggggtgggggggtagaggtaggtgctgaaaagtggctggtttctctcgtccttgttctctttctccaggcttgctccctttagtggcagtcagtggcactgtctaaagctcagatctgaccatggctcctggggtccatggggctgggctgaagttgctgagcctggtgtgttgcttggccctctgcagggcctgggccctatcactggctccacagggccccttacacctttccctactcccttcactcttccagtcacagaaagttctttctgtttctttggctctttttttttttcaggccatgttttcttcccctttgccctggtaacctcctcccggaagctttgctggtttttccatgcatggtccagaccccagggcagacgtgcaggaccctgtagggtttggtcccctccccacctct

SEQ ID NO: 32266 - DNA, 1334 bp, Mus musculus
tggtacctgctggtggggtagaggctggcctctgtggccaggccctgctgctcagaccacaggagggaagccattagctggggctgggacacctgcattgaacttaactctatcaacattagaatgcttcagcttcttcccctaatgtgacattttcagtccagttagtttcatttgatgagagtatcttgaaggccgcctgcccggaaatctttcactagatcaccccatatatggagtcacaagcttgaccactgtccaaagtctaaactagttaccttcagaatcaagcattcctttgactaagggagacttggttttgtggagggtttgttttttaaagcatggtctctgccttgcaggtggtagcacatattctaaacccagcactcgaaggtgcagcagcggctctcaacctgtgggccatgcagccgtacttgtactactgtgtttcttccaccccttcaacctcctaatggtagacaggagagaaaaggatggaggggaaaggggccagcattatccttcaactacttgctgctgattggggcgtcaagttccttggggggaaatttgatctttgctgtcaggatatctaatgtcttcttcctcttttttcttttcccttaagatttatttatttattcatttcatgtatgtgagtaaactgtagctgtcttcagagataccagaagatggcattggatcccattacagatggttatgagccactatgtggttgctgggaattgaattcaggtcctctggaagagcagccagtgctcttaactgctgagccatcttttcagcctccctaaatttattccttttgttttgttttgttttgtttttttggtttttttttttttttttttttttgagacagggtttcgctgtgtagccctggctgccctggaactcactctgtagaccaggttggtctcaaactcagaaatctgcctgcctctgcctcccgagtgctgggattaaaggcacctaatttattcttgtttcttctttgttcacaactacttaacaaaccacaaccaacaacccctcaacacccaggaccctggacatttatttatataacatctgaaaagcccccagaattcccaaggtcacagtctcagaaactatttgcagatggcaaaatcatacccctgctacagcatgaagcaaatcccagctgctgtggacagcccatattccacacctgggattaaaatgaaaacatactcccataatatttctatgtttttcaaagaaaccaaaatttttgctacagagtcatgacccctttgggtgtcaaaagaccctttcacagggattgc

SEQ ID NO: 32267 - DNA, 1156 bp, Mus musculus
atcagaaaaaatatatatttactttatgattcataatagtagcaagattatagttataaagtaatgatgaaaataactttatggtttggggtcaccacaacatgaggttattattcaagggttgcagcattacaaaggttgagaaccactgagatagaggtagctgatctgtgagtttggaaccagcctggtctacatagcaacatctaagccagccagggctacatagtgagaacctgcctcaaaagcaaaacagcagtcttactatgtagccctagatggcctagaactccctatgcagtaggccaggttggcctttgcttcctgtgtcctgggattaaaggcctgttcctacatgcctagcctagaaggctcttggtagtaactcagaccctagtcgtggccctcccacctgaatgtgacatccactggtctttctttgggggaattgttaaagacactgtcagttcacagagcaggacttagcccagcttccttctccttggcacactcagactaccccgtctacctgaccgctgtgctggcctttcagatactgagactgaggtgccaacgacagccttgagctaaatgatgatcactctccttgagctggcaagatggcttaatgggtaaaggtgcttgtcaagccagatgacccagggccccgagcgacagaacaagaaccgatccccacaggctgccctctcacctccattcacattcacaaaattcaaatgtaataaaaagatgttttaaaccttactccccctaacttctccatcttagctccaatatcatttcctcttcaaagagctcctgggatgcctcccttccacacagtgaggaggagaggaatacgatgtttgtttgggttttttttttttttttttaaagacagattttgtcatgttcgttatgcagtccaggttaaccttgaacatgctacatcctgtccaaagctgcgatggtggtacaggcctgtaaccccagcatttggaacacagaagccagctaacagtccatgctcatcatcaactccatgacaagtgcagggccaacttgaactatgtaagactcttacataggcagtgcagtgtgtgcctcttctagtgtatcagctcttcaggactgtatggaaagtgacaggcacccg

SEQ ID NO: 32268 - DNA, 1180 bp, Mus musculus
ttctcactatgtagcccaggctagcctaaactcacttgaactcttgcctcagcctctcagttactgggatatccagcctgctctaccacaccccctcttttggtttttcttctctcctcttcttccttctttgtctttctctccctccctctctcagcctatctacctatcttaaatgtccttctctcaaattactccatgtgtctcccttctttgctttgggcccccaaatctctttacccattttcacttcctacaaaaaaaaaaaaaagtccctaaacttggagacttcatttaaacacacctgtgatcctagctacacaagagatggatgaaggaggactacaagttttgggccagcctgacacccccccccccatccccaaaacaaaacaaaaacaaaaaccctaaactaatacccagggaagagaatcaactaccccattacacagaaccctggggagactggagtcgggcctgtgtgagagggcccgggtgccctgatacatcctatcattgcctatagatgacaatctaggagtgtgctggcaggaagtgggacctgatctcgtctgcagtcgcccacgactagaccggcaggccacctacaccgagtgctgctgtctctatggtgaagcctggggtatggactgcgctctctgtcctgcccaggactcaggtactgcacagctctacactgcccccagaggacctcttggcatccttacatgtgctgcaacctctcccaaaatcttgatcacaattctacagacttctaagtgtcagcagctgaaatctcaaggccagagtcagcagcgtccgtagccccaaccccgtcagctctgaggtctctcatcttaattaaattcctggtttctagacccaccatacacaacctgtgagacactccacttcaaactctgggcccttagatcccaacagcagttgccctcgtgcactagtctgtcctgcaaactctctggtaatagctcctacagctgccaacaggcattaccttgggccctctccacaccaataccaagactccaacacagccccaaagatctctggtccctccttttagctctgtatgaacaagagcccaaaaccccagtcttgattcttcgccccccccccccatcccagagattcaagctgcttccaggcacctttgacccct

SEQ ID NO: 32269 - DNA, 2202 bp, Mus musculus
aatacatttctgcaccctcactgtttcctggccctaagtgtggcccatgaccctaaattctattgtgccattttatcttagccaaaacaaaacaagaaacacctacagttctgaccagttttattctggttcaccatccatctgcctcccttcttaaaatcttttccctggaatttggttgggtgcatgacccttgaccccaacactcacccctgacatcagtctgtaaccccttactccagctgacttgaacacattagttgagcagaatcatagtacctcaactcatctcttaccctacctagtttctgatccccagtgccaacctagagtctctttccctgatgccaggaaccctggtagagatcagatacccagatccacagaacttaatcctggagtactctgtcctttgtttaagaccctttccaatcattcccaccaacgcttttctccagtgaatcccttctgagcccctaacccactcttacagatgtggatgaatgcagttcgggcaccccttgtggtctccatggccagtgcacaaatactaaaggctccttccactgcagctgctcgacaggttaccgggcgccatctggtcaacctgggccttgtgcaggtaagctagctaaccagcaggagagactgggagtagtgcctggattcttgagcacagctcattagagatgtaaaatggactaagaaagattttcagagaaacatagtcttcaaggttgtaacttgggtgttggggctacaacattatgggtagggcttacttggagggggaccaacagtacaatcctgactcttgcgtaccttagacataaatgagtgtctggaaggcgacttctgcttcccccacggagagtgcctcaacactgatggctcctttacctgtacctgtgcccctggctaccggcctggacctcgtggagcatcttgtctgggtcagtccccaggccgtacctgagcgtggaaagagtgggctttcagcaggaaagggaggagcaagggaaagagggcagaaaaggaactctggatctttgagggtttggggaatctacatggatcactgaggggtagcttttttgaggcctggaggcggcaatcaaagaggaactggatgtgtcaggaagttggaagctgacagctggatagtgattgacaggggcctccgactggaggcggggcttacaagcaaaggtggggcctgaaacagattgggtgaggtcttcctttgaggctttgggacttggagggttgggacgggggaactgaaggggtgtggcctaggatattaagcagaggaggaggtgggcctgggtttcggatgccctgtcctgcagacgtggacgagtgcagcgaagaggatctttgccagagcggcatctgtaccaacactgacggctccttcgagtgcatctgtcctcctggacaccgcgctggccctgaccttgcctcctgccttggtgagaggcctcctccccccacaccttcctgtttcctcccccaccccttttcttatttatttctccctcctgaccctcctactccctctttgtctcacctgtttccttcatatgacctccctgcctattcctcagacattgacgagtgtcgtgaacggggacctgccctgtgcgggtctcagcgctgtgaaaattctcctggttcctaccgctgtgtgcgggactgcgatccaggttaccaccccggccctgagggcacctgtgatggtaagacagatcccctaaaacctgtgacaggttgtgggagcccgctcccctgggaatcaggagagagatgctctgtctccaaaacctggaaggagaggtcccacggctaacacttcccgttctcccctcagtgttttctggggtaagaaattagcccctgcttatgcacatgatttcttatgtgcaagggagctttcttatcaggagtcagggcaagctagaagccctccccttactgagccattttaatatatttagagggacggggtgcaggatgaatcagtattttctgtaacccatgaaacaaaactattatgggctgtatttcccttcctctgactcaggaaaatctcacttcctaagaacttaatcattaattataaaaagttcaataagcagcctgctagtgcagacatcgagggcacagcaaagaaggaccaaacaacacccctgccctcac

SEQ ID NO: 32270 - DNA, 2101 bp, Mus musculus
tcttctggtgtgtctgaagacagctacagtgtacttacatatataataaataagtaaatctgggcgcaggcgcgaccggggcggggggcgggctgcgaagagaatctcggcgatcctcagttgctgctgcatcctctgcccatcgccatggctgcctacaagctggtgctgatccggcatggcgagagcgcctggaacctggagaaccgcttcagcggctggtacgacgccgacctgagcccggcgggccacgaggaggcgaagcgcggcgggcaggcgttgcgagatgctggctatgaatttgacatctgcttcacctctgtgcagaagagagcaatccggaccctctggacagtcctggatgccattgaccagatgtggttgccagtggtcaggacttggcgcctcaatgagcgacactatggcggtctgacaggtctcaacaaagcagaaactgctgctaagcatggtgaggcccaggtaaagatctggagacgatcttatgatgtcccaccgcctcccatggagcctgatcaccccttctacagcaacatcagcaaggatcgcaggtacgcagaccttactgaagaccagctcccctcctgtgagagcctgaaggacactattgccagagcactgcccttctggaatgaagaaattgtcccccagatcaaagaggggaaaagggtcttgattgccgcccacggcaacagccttcggggcatcgttaagcatctggagggtctctcagaagaggccatcatggagctgaacctgcccacgggcatccctatcgtctatgaactggacaagaacttgaagcccatcaagcccatgcagttcctgggagacgaggagaccgtgcgcaaagccatggaagctgtggctgctcagggcaaggtgaagaagtgaaggcgaagaggcagactcctaccccgacaccctccctgcctgttcctgcctcctgcaccctccccagcacctgccacactgactatgtctttaggattttaagtttaagttgtagctgcagatgggggcctgtggctcccgttttcattgtagtattttatcccctgcacccactcccttcatagaatctagtcagaataacgcctttgggggtgcaggttctcggaccacatcgagggacagctccctgtaccaggagagttgagagatagtaactatagtttttcttaggtctttgtttactaagggtctgcttaggaagaattcagggaggaactgtgctgtggtgtgaccaatgaaaagctgcagtccagttttgtccctggaacctgtcctgcactcttcctgcagttaggtaactgggggcatagtcattccagtggagagtggaagtaacctcatggtgatttttaaccctaatttctctctgaccctaaaggagctgctggccctagaaggttgggatcaatcttgtcaagtctatgttacacttacttttacaaaaaaaagtatatatacatattatcagcacacaaaagcaactctgaggttgctagtgacatttgaaacagtcctgtgtggtcaccagaaaataagccattcctcatatcagtgggataaactccttgtacctcttgctgtgtttggatcccttggccttgttttgtagaggtgaagtacccctggatcatgtccgagtttttgtctttcactgtctgaatcatgttccagctgcttgaccctaccgtgtgggttcagagctcgtttgggcgtaacaactaagtctctttccagatcagtataataaaggagtgatgtgcaataaaaaaaaaaaaaaaaaaaataagtaaatctgaaagaaagaaagaaagaaagaaagaaaggaaggaaggaaggaaggaaggaaggaagaaagaaggaaagaacctacaagctgtcctctgactggtatgtgtatatgcacttgagtacaggtacacggcaacaaaacaaaaccccaaaatctcccacctgacctggatgtggtagttacataagatcctgtctcaaaggatagggtggtagagtgtgggtgtgtgcctatctcatacaaaaccctggattcaatccctggtattagggggaaaaa

SEQ ID NO: 32271 - DNA, 1154 bp, Mus musculus
tcggttccatcctcagggagctagatacatccatggatgagatggagccgcctctgaatccagcagcttcctcgagtccccagaatgagatcgtgtcccaggctgatcctgtattcttagaagctctgagctcaaggtacctgggagactctggcctggatgacttctttctggacattgatacatctgcggtggaaaaggacgttgcacttccacccccggagccgccgcacagcctcttctgtagcccaggatcctgggagtggaatgaactggaccacatcatggaaatcatcctgggatcctaaagctgatgggattcttccgggcgtcagcctcagtgcgctgggccttagatgggactcttgtatgtgtgcgtggcggaggcgctagacagagactgtgtggcctcctttcctcctatgtcaggattccacaaactgtcctgcatgtgtgcgtgtctggttgccacagccttccgtgaaggtgcgtcttcctcaattaatttatctcttccgaatgccttaaggagactctatttcagggagtctagattcctcgcttacacatttcttctgcctccagttcccactgtccttatgaccactagggtctcagggaagataaaactggacctgtcaaggggtgatggaggggctggtctccggacagactcaacctcttggcaggaccccagtaccagcagcctcctgattcataaccaggccggaccatgtgcaatagggcagaagtctaccagctccatgctgtgctacttaagaggaaagaggaggtagggtttgcagaggcgtatgtttgttggttggttggttggttggttggtttggggggattttttgagtgaaatttgttgttgttgttgttgttcttgtttttttgtttttgtttttttctaataaaagcattttggaaatattggaattgtaattaaatctgtaaacatctctggggtgatctggggaagagcctgctaagtttctccaatacttaacatcctttccttaacaaaagtagagcagccgggcggtggtggcgcatgcctttaatccaggcacttgggaggcagaggcagttggatttctgagttccaggccagcctggtctacagagtgagttccaggacagccaggact

SEQ ID NO: 32272 - DNA, 1185 bp, Mus musculus
acaccttccagatgtacagctcccgaaagtcccagagatgaagctcccgaaggtgcccgagatggccgtgcccgatgtacaccttccagatgtacagctcccgaaagttccagagatgaagctaccagagatgaagctcccgaaggtgccggagatggccgtgccggatgtacgactcccggaagttcagctgcccaaagtgtctgaggtgaagctcccaaagatgcctgagatggccgtgcctgatgtccacctcccggagctacaacttcccaaaatgtccgaggtgaagctcccaaagatgcccgagatggccgtgcccgatgttcgcctcccggaagttcagctgcccaaagtgtcagagatgaaactccctaagatgccagagatgaccatgcccgacattcgcctcccagaagttcagttgcccaaagtgcctgacattaaacttcctgaaatgaagcttccagaaataaaactccccaaagtgcctgacatggcagtgcctgatgtcccccttccagagctgcagctgcccaaagtgtcggacattcggctgcctgaaatgcaagtgtcacaggtcccagaggtgcagcttcccaagatgccagagatgaagttgtccaaggttcctgaggtacagaggaaatctgcaggggcggagcaggcaaaagggactgaatttagtttcaagttgcccaagatgaccatgcccaagttggggaaagtgggcaagcctggggaggcaagtattgaggttccagacaaactcatgacacttccctgtctgcagccagaggtgggcactgaggcatcccatgttggtgtcccttccctctctctcccctctgtggagcttgacttgcctggggccctgggcctggagggacaagtccaagaagctgtcccaggcaaagtggagaagccagagggccccagggtagcagtgggtgttggagaggtgggctttcgtgtgccctctgtggagattgtcactcctcagctgcccacagttgaagttgagaaagagcagctagagatggtggagatgaaagtcaaaccctcttccaagttctctctgcccaaattcggactttcagggcccaaagctgtcaagggagaggtggaggggcctgggcgagccaccaagctgaaggtttccaagtttaccatctcacttcccaa

SEQ ID NO: 32273 - DNA, 1113 bp, Mus musculus
aggtgtccaccactgggcaggtggttgcagagggccaggagagtgtgcagagggtgtccacactaggtatctctttgccccaggtggaattggccagctttggggaggcaggccctgagatcgtagccccttctgcagagggcacagcaggctctagggtccaggtgccacaggtgatgctggagctacctggaacccaggtggcagggggtgatctgttagtgggtgagggcatcttcaagatgcccacagtgacagtgccccagctagagctggatgtggggctgggccatgaagcccaggctggtgaagcagccaagagtgagggtgggataaagttgaagttgcccacactggggaccggaagcagaggagagggcgttgagccccagggccccgaggcccagcgcaccttccacctctcattgcccgatgtggaactcacgtcaccagtgagtagccacgctgagtaccaggtagttgagggtgatggggatggtgggcacaaactcaaggttcggctgcccctgtttggtctggcaaaggccaaggaagggatagaagttggagaaaaggctaagagtccaaagctcaggctaccccgagtgggcttcagccagagtgagtcggtctccggagaaggctctccaagtcctgaggaggaggaagaaggcagtggggaaggggcttccagtcgccggggtagggtaagggtccgcctgcctcgggtaggcttggcttccccttctaaagtctctaagggacaggagggtgatgcaacctccaagtccccagttggggagaagtcacccaaattccgttttcctagggtgtccttaagccccaaggcccggagtgggagtagggaccgggaagaaggtggattcagggtccgactgcccagtgtgggattttcagaaacagcagttccaggttccaccaggattgagggaacccaggctgctgccatctgaagccccaggacagctgtggattccccctcttgtctttccattccccagcctagccccccattttgtgtgtgacattactagcactaatcctcagagggcttgaaggtgggtaactgactcaggcaggagccagtggcct

SEQ ID NO: 32274 - DNA, 1210 bp, Mus musculus
tttggagataccattcacatgccatcctaccatcccaggacttctcagagacaccccacctgcaccttgagcccccacctcaccatcctcctctcccctgcagaaactgtttgtggtccctacggatgagtcccaggcccgaatcccctatgcccgtgtcaaccacaacaagtacatggtgactgaacgtgcctcatacattggtaagtgcccccagtaccatatcaaaggaaaggcctgggcactagggtctggccacccatcagaccctcactccaccccttgctcccaggaacctccaactggtctggaagctacttcacggagacagcaggcacctccctgctggtgacacagaacgggcatggtggcttgcgcagtcagctggaggctgttttcctgagagactgggaatccccatacagccacgatctcgacacctcagccaacagtgtgggcaatgcctgccgcctgctttgaggctcagcccgacggacaggtcaaagccttccaggcctccttggactcagctctgggtcctggttactgtccccatgcccttgcctctgtctatcccgtgtggctctgtactctccactatactcctgctgctacctccaccgccactggcctgacactctggcccctgtggacctagcagagctggggattgggccccaaagaagtgggggtgcatgctgggcccagacctttggcccacccccaaagggccaagattataagtaaataattgtctgtatagcctgtgcttaactgagtggtatgagatggtatgtttgttaggggggagggggtatggacttctgctggtgacagcatgcagtgcgcacgaaggctggcgtgggctgggcatgcagtgtgtgaccgcactggcaagcatgggctgagcatgcgtagaaccagcatgtttgtaccgagtatgctccacagagcagtgcgggtagaaccactgctgaatgccatttacggccgttggggatgggaatgggaggtgggtgggtgggggtgggggtgggggggaatgagggcggggccaagtggcagctggactaacatatctgaacaccggagcatgtgcgtatgtgaacaacacagcatgtgcgaagtctgaatttattcctaccagtgtgtttacacttaacatgtccagagcatgagcgagcgagcgcatggcctgtccatcacagac

SEQ ID NO: 32275 - DNA, 1149 bp, Mus musculus
cacagtactgactgagccatctccccagctggggacatgaacttttaagatggtctctttccttttatgtgtgtgtgtatttaccagcctgtccatactttgcaccatgtacatacctgacgcacttggagcccaggcatgttggagatggagttacaggtggttgtgccttgctcccagagtgctgggaactaaactgggtcttctacaggcgcaaaccatgtcctaagcaccgagtcatgtctccggcccccagaaacggattttttaaatcatagggagaagaagcttggcacctgggaggtggagacaggaaaattgtgaattcatggccatcttgactaattcaggagatctagcttcaccatgggacccaaccaaccaaccaacatggcgttaggagctgaaattgagtttagcagtggtgacttcaaggccctagacttctggtttagtatagcggaggccttccaaggagagactggttatgtctacttcacagcagtgcctcactccccattcatcacacattggactaacctgagttcaagtcctggccctgccttacatgctgtgtgttcccaggctgaccattctctttctatctctgactttatttcctctttttgctcattttccttcctcccaggatcatcatgggaagccactgaggtatgcttacctcagtccctggcacagagtgaacactcgtgagcacctgctccatgggcttcagaatcggagagaacttgcttttcaatctcagaaaggtcagttgctacatgtgacacttgacaagtccctgttccttgctgagtgagtcatgtgtgactttttaattgatgggaatggagctaataatggtcttccctgcgaggctgttgcaaggcatctttgtgatgctctggcctggcggctacttggtacttgatttgtgccatgtcctgacggtctcagagctctctattgtctgttggcgctagattcagagcttgctgtctagctaaggacagccttgagcttctttctgctcatgatgcctctgtctcccaggtgctgggactgtgggatgtgtacctggtgagtatggtgctgagactgtgggatgtgtacctggtgtgtatggtgctgagactgtgggatgtgtac

SEQ ID NO: 32276 - DNA, 1215 bp, Mus musculus
gttcaaatcccagtaaccacagggtggctcacaaccatctgtaatgggatctgatattctcttctggtgtgtctgaagacagctacagtgtactcatatacaataaataaaaaatcttaaaacaaacaaacaaaaaccaacccgtcttttagagggggagggggagggggaggcaaagaaacaaagattcaagggaagcagcttggagcttggttagcagagtttgcctggaattgcacaagcttccatccccagcactacataagctgcgcatggtggcagcacaacctgttaattccagcactggggaagaggaggcaggagagttaggagttcaaggtcaccttcagatacatagtgaggccagcctaagctctactagaccttgtctcaaaaaactcccattaaaggctgtctggactcagtctgcccagcaacctgaggacatgggtgttttagtattgaaccgtcagccaggtgagggcacatttcttatttctgccctgagggtctaaggcatcccaggtgctaggaacaggctagcacctgcctgtgctgagtgcccagaaagtacttggtagaggtatagtactacaaatgtacagataaggaaactgaggcactgagcattgacttgccaaagtcctgaaggcaggaaatggcacagtgggtgcttctgcatgaggctgtccctgctaaggccgacgggccggctcctgaacctggctgtcccctgctaaggcagacgggccggctcctgaacctggctgtcccctgctaaggccggtgggccggctcctgaacctggctgtcccctgctaaggccgatgggccggctcctgaacctggctgtcccctgctaaggccggtgggccggctcctgaacctggctgtcccctgctaaggccgatgggccggctcctgaacctggctgtcccctgctaaggccgatgggccggctcctgaacctggctgtcccctgctaaggccgatgggccggctcctgaacctggctgtcccctgctaaggccgatgggccggctcctgaacctggctgtcccctgctaaggccggtgggccggctcctgaacctggctgtcccctgctaaggccgatgggccggctcctgaacctggctgtcccctgctaaggccggtgggccggctcctgaacctggctgtccctgctaaggccgatgggccggctcctgaacct

SEQ ID NO: 32277 - DNA, 2632 bp, Mus musculus
gtttccccagcacttcatcctaggctgaggtacaagactgaggatagtgtctgaggctcatagactctctgctaagtaagtggccaaggaaggggctgggctggggctcagtggtagaaagagcactttccagctgtgttgtgtataaggccatgagttctatctgaggtgtgagagaatgaacagctaaaatgacttggggagcttgccagtgctccccctgcccttgccagtgcactcctgtctctgtcttcacagagccatggctcttcagcttccagggctcccatggtcagagctgtttccttcctgagtcccttggcatagtcaggtcttccttttggtgccctagtctctggtccccttcagtggtgctgtcaccattacataggatgtcactgaactgtcatctgacttcttagaggccagcccagagcaggtagcatgctgagggagtaagtgagtctgtcttttctctgccctctacagcccacaggagttttcagccgcttaggggccaccccagagatggatgaggatctggcctgggacagtgacaatgacagcagcagtagctctgtcctgcagtatgctggggtcctgaagaaactaggacgaggcccaaccaaggccagtgcccaaccagcactgactgtcaaagccaaggccacaagctctgcaaccaccacagctaccactccaaagctgcggcgcctggcacttccctctcgccctgggctggagaagaagccggattccctgcccaaagtcagcatccttcagagactgggcaaggctgccgttgtgtccgaggcacaggacagccaggtcacaagcaccaagagtaagtcctcagctgaggtcaagttcgccattaaaaggactctggtagggccccgggggagcagctccagcgagagccttggtgcccagatggaccatgcaggcactgtgagcgtgttcaaaagactgggccaaaggactttctagccacatgcagggtggggtgcagcagggaatggcaggccagctcctgctttcatcccttcagcctttcttgagggcacacctgccctcccacggagctctagaaggcacaaggcttggctctctccagcatttagctggttccaagcactcgggaacacagccatttttcctggtttttgatgttcccgcagcctgatggtgcctgctttgggacttcccttcttccctgccctctgtcctctgcacagtaactgtggccttggcatagttcccttttctacctcttccccaagccaagggacctgtttctttcatgcagtccaccctgatagcagcatctgttgtgaccctcctgttgtgaccgccccaccacaaaggtgtcacctggggggtctcccccaggcccgccctgcgccttccctccctcttctcccccttccccgcctgctgtgctgtctctctccctctcttccctcttttcatttctcttctgttttctgtccctgtggcaaggcccgaccgtccgctgcatcctgcctgaccctcctgcacctctggcctcccagcggccccctcgtcgacggtggcggcgaacctgtaaagactgttagctgccttccattcccaggctggagggacttccccagacctggcctgcagccggggcacctccgtttccctgccctgaccgtctttttctttgatgggtggtgggcaacagacatgggaaggggcgggtgctgaggaaaggtgactgctgttttaatatatttttgtgactttgagactgtttccttccttcctcctccttcagtggagtcacaggtctgtggctcacacggaccctgtggggcagtaggcactggtgaaagactgggactgaaggggatgatggcgacagttctcatggtgaggcctcctcctccccttcaaactgcagtgcctgtcactacggtgtcccatcaatgtcaccattctgccactctgcctgttggtagcttgcttttattttgagacaggatctcactctgtagccctggcttccctggaacttgctatgtagatcaggctggcctccaactctgaagagccccgcttccctctgcctcccaagccccaagtgctggattaaaggcgtgcaccacagccagctgcttgccttcttttgttttttgaaacccaaggtggctcaaacttgctgtatagttgaggaagacttagaacgtctctctttacaaataaatttattttgtgtgtataaatgttttgtgtctgtgtatgtattaggcacataagtgcatgatgctcatggagacttggaaaaagatgttggataccctgagactaaagttgaggacagttttgagacactttgtggattctgggaacaaatcttgtatcctctgtaagcatcaaatgcatttaaccattgagcccatgctttgagtttttaatcctctgatctaggccgtgagatttctcacattagaggcctgtgccacaatgtcagggctttatgtgtgccggagactaggtccaggcctatgtgagcattctgctagcttccaccgctcccacccccctttttgagacggtgttactatgtcacacaggttagcctcaaagtcaagattctcttgcc

SEQ ID NO: 32278 - DNA, 1706 bp, Mus musculus
ttggaggcacgccagcggaggacacatctagaagttcccctcactcccagcacctcagctgccttccatgctgtcctctgggcaatcttatctgctgccaccccacctggggcacaaaagcagtaatgtccagggacaggcagaagcctttggaagctgaggggtctgggtttgcttctatggagaatggatcttcaagggggatccaggagcaggagctgccttcctcttcctcccaagctactctcttgattctcaataaagcaggaggaatgttcgggggcagccctcctgcccacagcccagtgccttaccagggcttccttctagccagccttgcctcccgctcggcccctttggatggctccgttctctgcctggggcagagggaagccaaccttggctgttacacatctcacaccaagacagtattgggccccttggacttgactggggtctgaggggacagagatggggataggtgtctgatacacaatggggtggagtctgcctcatctccagggcacctgttctggagccttaaagtgaatgtttgagttagagttgtgtcagtgctgtgggtgcgggtgtgcacctgacctagcagtgagcatcccaggctcctgggatgctggtgcccacagctgtatgcagcacttgtgtgagtgggctcaggctcagccccagcctgagtgtttgatcccacggggtgcagtgagtgcaggcgatgtgcctgctgctctggccatgtctctccctcctcaatagctctgggtttttggaaatgagttctcctggttttgctctcccaccacacccccagaataggtggatttcagaaaggcagtagggtggggtggttgggatggttatgggggtcatctgttttttactttgtatgtgtgtatgtttatctgagagttttcgcccatccctgctggcctttccttactcctcgtatttgtacggtacaagcaataaagacactcatttcagaccagggcccagtccacatttccttagccaccccttctgtcctggtactggagtgccagagtagcatgcaccatttattacctgctctgccttattctgaggtccatggagccatggggatggaagagatggccgtgagaaagtgggtggtggatcccggctgcagagagcggcgctgcagaggaaaaggtggctgggtggtttctgttgggtagggatggctcggacccttagaagctgccagattgggggcagcagtgctgagcggctctaaacaggaagcacgagcgctgtggcagcagaggggtggttcattcacttggcctctgagccctaaacagcttctgtgtggaaccaggaagccttagtgtccccaaatgccatcataaaatctgtgacttaacagggcttgtgactcccagcaggaacacccggacatttgattacagctgcactggtctaggactgaaccccatgctgaacctgtgggttgtggggctcactggggtacttgctcctttcccatacccaggtgccaggcacacagggcctggtgcagatggatttgttccaggatttactagaagacggggcaccacaagcatggcgatctgagaactggaaagcgggctgtgggaaagcaaggccagtttagacacctgtcccaactgcagagaagactgcgtgcggcccaggttgggtgtcccgta

SEQ ID NO: 32279 - DNA, 1196 bp, Mus musculus
aacgtgcccccttctccctactccaccccgtcctacctcaaggtgcctctgcccgccgagccttctccttgtgttcaggcgccttgggagccgccggctgtcaccccttcccggccaggacacggagctcgtaggcgctgcgacctggcgctgctaagctgtgccacgctgctgagtgcggtgggcctgggcgccgacgtggccgaggcacgggccggggacggtgaggagcagcggcgctggctggacagtctcttcttcccgcgccccggccgcttccctcgcggtctcagcccaaccgggcgccccggaggtcgccgcgaagacacagccccaggcttgggtctggcaccctcggccaccctggtgtcattatcctctgtatcggattgtaactctacgcgctcattgctgcgctctgacagtgacgaggctgcccctgccgccccctccccgccgccttctccgctcgcgccctcacccagcaccaatcctctcgtggacgtggagttggagagcttcaagaaggacccccggcagtcacttacgcccacccacgtcactgccgcccacgctgtgagccgtggacacaggcggacgccatcagatggggctttgagacaacgggagcctctggagctcaccaaccacggtgagtggggcctgtccaagcaatctttcacagactactgacccgtgtttccttctgagccaccccagccgtcattgccgggccccttgtgggtcttggggatgcctgagataggataaattgggcaatgtcaatataatgtctgcgaggacagggtaggtgacatgatggcaagtggaagcattggtagccatcagcactgtcctctctgcttattagccagcagtatggtcaggagggcgtggtcgggaattacttgtgcccttcaggccctgggttctgggttacagccactgtagtcaggtttgaatctctcagccccagccatgcgctgtttcgatcactccagagatgcaggctaggagtagcagcacacactgtgaacccagtactcggggtcaggagtttatggtcagcctgggccacactcagagtttgagaccagcctgggctacatgagactctgtccctaagatggaaagatgaactggggtacagctcctttggtagaagaattgtctaacatgttgagtgtgatccccaa

SEQ ID NO: 32280 - DNA, 1193 bp, Mus musculus
catgtgctggtcaactgggctgtgcaggtggctcggggcatgaactatctacacaatgatgcccctgtgcccatcattcaccgggacctcaagtccatcaacagtaagtggtatcctctctcccaaaactcttccgctgaatcttatgaggccaagcccagatcgttggaaagggcaatggacagcagatggcactgcatggggcaagcagggccaggtgaagggggactttggttgtattaataagaaaagggaagctcagaaaggtctctttcattcagtaggtcaatgatggtgtatccatggcactatgacagtccctgtgttcattgccacttgcagagtctgtcctcatgatgcccacaacctgatcgtggcattggagtctaccaggcagagatggacagagctggcttagttgaagccagggcttcccaagcctgtcacaaaggttaacctttgtggtcttgtcattggcagagcgattgttctgtgcactttatgttgtttggtggccttagggctctatgcacaagaggtcattagtactctgcaaccctgctcccaactatcaaaaccagaaatgtctccaaacacttccttgtgtgccttgggataggggtgggatggggcaaatcaaaactgttctctagatgctgctggctctccagcagagtggagcagatgaaggcgttgggaagagagtggctgatagaaaacacttccaggctgctttgcccggcacaggttctacaaagctggctgactggttggttgagtcagcaatgggccaagcagatgggaagggtccctagaaatcgatcatatctagaccaaaagtatctcagggcatcaacaaatattagtgggcccgctattaagttaggccatctccaagcaacaagacaccatggtttctttccctgagagtcctcatcgatgagacatttctttctttctttctttctttctttctttctttctttctttctttctagatcattctggcatgtgctagatactcctaggtatacaactgggaagactttgcctccttgggctctcccatccttgctgagcctcatttcatatctttcatttttgtcttttaaattgatggcctcagccttgcatttggtattcacaaggccagagcatgtgcagggggctccacagcaaatgaggcctgcact

SEQ ID NO: 32281 - DNA, 1237 bp, Mus musculus
aacatatcacacagtaatatacaaatacacaggctacaaaatggttaagaaagggttaaagaagtttcaaagaggctacactgaagtccatacggtgtatattagaggctgatggagagtctggagagaccagaaaaccctgtgagaaactacaggtgttacagtgaaaaagagtaattcttctgtgtctgtaggcagcagcttctgccctggaggtcatctccagcctggggcgggggggcagggctgtgtcctgatcactttcctacagtgaatggtgttgctacggtggtactggctgtagtggtaggcatgagctagatggcccaaagaagaattttacagatgaggactgataggatttctgattcttgcacaaaagagcaagatcttctggatcttctgtgagaattctattggccaagtgatggtttagtccttctgaaacagtttccatgaattgactagtgacttcctctggtaggaggcatcccactggtatcttaagacctgtgtcctcttccagctgctggcttggaaaaagttatgcccaaacatcatccagatttgattttctgccgcaagcaggctggtgtgtctatcagaagactgtgtgaaaatgtgacagcaagtgtgtgatctgtgatttctatgtgcgtccctgcaccttgatttgcatatgtgatgatgtaagaccccctttcgggggcccctactctagtctcgggagagagagcacacccaaagaaacacgagaatccttcttgctgtaaacacatgaggtagtttaatgacagagctccaggtcgaaacgtatctcactcaggagacagtggatttgaccccgaggctcgaaagctaggggtttttatggggtaaagggcttaggggtgggggagaatatgtgcaggtcagggtgtcagagttctgtgagttgttaactcagttcagatagccctgttatgtcctcacattcttctttatcttttatggtaaagctgtccccaggaatgctttaacgacggggcatgcccgggtttgtttttctttgttctcagccccaggcatcctcttggctcacaaacaaccagcaatttctgagtactttatatgacttacaggtcttgaaatttcatctttctttcaatgagtataactgtggatcatatcagggccggtgtgtgatctgtggcggtcccagagtctctgatgcctactactgtaaagagtgaaccat

SEQ ID NO: 32282 - DNA, 1152 bp, Mus musculus
ctaggaagtctcctgacaaccttttcccagcattctaacagtctagattgactgtcccaggatgctgccaaacgtgactggaaacaaagttgttctatcctccctacagggtcaggacacagaatactgatagttaaactgtgaggggccctacatgaagaacctgactctgccattgttccattggcagcaacaacaaagccctggtggctctaatgtctaggagaaaaagctggatgcctacaattcagagtcctttgctttaaggattgaagctaggtgtggtgacttttgcctgtaattccagaatatgagaggatgaggtaggagaattaccaggcatttaaggcaagcccgggtttcatgtatgaaatccaggatatcttggaaaagaaaagcaaaataaatacacaagcctaaaggctcagggatctacagacaagagaaggcaggaagattgcaagagccaaagggtgtcttcaaggaaatactgacttccagacacaacagatgcacattatgaactctcaagagtccatgcagtgtgtgcaggttcaaggaagacagtctcaacaatggggggtggggggaaccatgggctcccacccctaaccagtgaactatctgtaattgacacctgctagcaaataaaaatcaggtgtctccaatgctgtctcactgggtgtatcaacacctcagggcccacacaaaataaacttggtggtatttttgtgacctttttgtttattttgcattgcttggtcaattttgattttgtcttattggtcttttgcttgtgcatttctgcacacacacaaaccccctcacacatacaaacagtgacaccacacacatgaaaaatggagaaaaaagagaagggaatgaacagcatggaatcaataagtgtcattgtcacaggtcatccagaacttcatggggtttaaagggagctcagcattgatgcagatggaaggcagcaacccaggctgtttaattactacaggcacacttaagattccttagactgaggtatgtctgacttgaggttttatattgctgtgacaagacaatgaccacagcaactcttaagtggggcttgcttacagttgggaggtttagcccattatcattgtgttgggaagcatggcagca

SEQ ID NO: 32283 - DNA, 1155 bp, Mus musculus
atattggggaattcatactggtgagaaattgtgaatgtaagaaatgtaagaaaatgtttagatttagttcagccttcagtgcacattggagaattctgaggtggaaatttctgggttttgggggggactcgattgtgtcatgtgatatcgttttgaaaactgtcttatgagaggatgttatgcagagaacagacacatggtgtttttctggaagcttcctggtaaaagggcatgtaatgtttggctggagaggaaatgtgatgtttggaaaagtataactcaacagagagtgaatgacactctggctttggtttgccttgccactctttgctggtctttgttggactttgctgacactggacttcactgatgatgctgtgacattggttcttgccttctttgatgatcattgcttattgtgactttgtagagagaaatgcaccaaagaacttgtattctaatggcttcttgctgcttctgaggactggggctaattagcagagccttttggttcctgctggatgggcctgccatccaagtggattgagctgctgctgctgattcatatgaactgagctgctgatatcctgacagtgaaaattgtaattgcccaaagaactatttctaaacaggtccacatctggctttgccctatttaccttttcctttttactacctctggtggctggtgaactagaagggaggttaaagtgtgtaaaaacccttattaaaatagattttgaaaattctaaggtggggctggcgagatggctcagtgggtaagagcactgactgctcttccgaaggtcctgagttcaaatcccagcaaccacatggtggctcaacaaccacccaagtaatgagatctaacgccttcgtctggtgtgtcagaagacagccacagtgtacttatgtataataacaaataaatctttgggctggagcgagcagggactgagtgagtggagttgactggagcaagcggggttgactggagcgagtagaggtcctaaaaattcaatcccaacaaccaaatgaaggctcacaaccatctgtacagctatagtgtactcacatacatttaaaaaaatctttaaaaaaagtaagaaaaatattctaagcttacagaattcatattggtatgaagccctatca

SEQ ID NO: 32284 - DNA, 1169 bp, Mus musculus
ttggaaaactcaaaactcatcattctgtggaaagagtagagaaactgcctccaagctgagctggttgggggttctgttgtggggaacactgatggaatgcagccaggatagaatggatttttcccttttgtccagtattgaccaaggagggaattttctctaagacttctttagatgaattagacagctgcttagaaggttgcctttttcacccagtttacactatctattaggaaaagaaagttataaaacttagatggatttaaaggcagaaataggcccagttcctggatgtggcctaaaaggaaacaacaacaaactgaaagacaagatcctttggataaactgaaagccatcatcctcttctctattgatgagactcggttagggtacagatacccagcaaaatgttggtgtcttgccctccttcagaagaatatctcttagctgaaagttgtgctcccaatcaaagatacatcttttagattgccaaccaaaaatcctgaaggcgagggcaaaatcacctcccaccccaggattagttcaacaccaacgtcagctaaacagttaagccactcctgaccagaatgaacaataccaagtagccctggaaagatgattgggaaattgcagtctgtcttgcctggcttatcaagacagacacacaacacaattctcctgtctgtgatgaaacctgggacttctggtcatcgactccagaatctgaaataaaaagaaaaaaaaattattaagagagtcctgcctctaccctgtggtctcaaccccatacattctcatgagtctgatttgcctagagaagtaggcagatattgccttggacctgaaagatgtgttctccagcctctcattgttagagctaagtcaattcatctttgctttggagtggacggaccaagaaggaggttatagagggtaacttagatggaccaggttgcctcagggatttgacaatttttccaaccctctttgatgagagtgttggaaacttgtgtttccaatcttaggtcaactaagtattaaccccttgctcttccaccaggggtttgcagggcccatactcttataatatataaagacctcctagcctctaaaactaacagaaattaaaagggccacggagggactcctgcaacagttatagaacttgg

SEQ ID NO: 32285 - DNA, 2668 bp, Mus musculus
gccaccagagatttcataatggtgagaaggtaaagagtgtggagaggcctttcatcttaagagccataaaataatttattcaggtcagaaatgtttgaatgcaaggaatgtgggaagtccttcaagcttgttttcactcttgtttggcatagggttattcatgctgctgtgaaacaatatgaatgtaatgagtgtgggaaaacctttaattgttcaaatctcatgcaacatcagaaaattgactctgatgagagactcatttagtgtaaggactgtgaaaaggccttcactgttctggctcagcttactaggcaccagaacattcatgctggaaagaagtcctttgaatgtgagtagtgctggtcagccttcagacttagtgccaacttattcaatctcagagaattcatactgatgtgcatccctatcattgcaaggaatgtggaaaagctttgttagtggtccaagtcttagaattcatgagagaactcacagttgtgattcacactcatgagagaccttatcagtgttaagaatgtataaaggcctttagtcaaaaatgaagctggttgggctctagagttcatattagtagaagccttatgaatataaagaatgtgaaaaggcctttagcaataattctaagctacctgtatattagaaaacttatactggtgagaaaccctatgaatataagaagtatgggaaaacatttagaattagttcatcctcccatgcacattggagaattcataccagtgtaaaaccttgtcactgtaaagaatgtggaaataacttcaattggagatcaagtcttcttcaacataaaagaatccatgctggtgtgaaaccttttgaatacaaggaatgtagaaacataacagaaatagcaaagctcttaaagctcttcagagaggacaggtagatctgaaaccctataaatgcaaaggctgtgaaagcccttattgtcaatgatgagcttacacaatatcagaaaatccatgatcatcaggagtcctgtgcatgtaaggaatgtggacaagcctttgtatgaaaatttcactgaagatcagagcactcatattcttaagtctatgactgaaaagattgtgggaagaactttaggatgccttttggtttggtcaacgtcatagtattcatatattcctagtgggacaaaccctttgaaaatgtgaatgtgggaagtctattcagaggaagtactctgttgagaatgtctttaaatgtcataaatacaggggagccagcattattttgatttactctcttgttagttgtataatcttaatttatcaatcattagtcagccaggacagtcaacttagggagggcagttattggaactaggtttacctgcgatgacttcattgtcaccattcacatcccactgctcttgtgatattagactggatgtttactttgtttttgtataatttgttaatggctagcacagcaccagccaaagctgtaacaacagagttataatagataataaaatccttgcgagtatttggtcagtactcatgttctgtaaagtggcctctacagtgttcttgctttcatcaacattactgcaactcttatgaaaagataattgtactttagatggtttaggaaagccacgtgcattcattcattgttaaattttaaataacttcattctgggtacatctaataaatgaaggaacattaaaggatttgaattgtgagtccattaaatatttgtgtagagattttaaaaatacagtcattgatgaataagtactttctaaggggttaaaccatttttaaaaattaaaactgattatttttgccctctgcccacatctgaagataaactacacatttgtgataagacaaggaagtctacaggatcctccatctcttagtcttgctgaggtcatttcaggtttggctagaatttccttgatggagaatctcatggaatattacccaactctgttctaggatatggaggtcaaaatgtctctgataatttatcctggcatatgttaaatggcctgtgtccagctacctgcttatcttggcttcttttaaacttcctgcttggacaaaagctccccctgcagctgttgagcaaggtaatagaatgtgggttttgctctaaatgcttggaggtatacttgggtcccaaataactgaatgtactcagagctggctggagttatttttcagttggccatatactgtctgagtggtgttctcataacaaccaaaatagccaaattgaaactacttagaaaaatacatgtatgaagttttctatgcttatgggaaacttgaaatagtcaagaactcacctctgtatcattacttagatttaaagttgttaacaatttctatgctgattgtatttctctttatatatagggtatttggggtttgtcttagggtttcattgctgtgaagaaatgccatgactgaggcaactcttaaacagaaaaattggagctggcttatagtttcagagattcagtctattatcatcatagtgcaaacatggcagtctccagacaaatatggtactgaaaggaggtttctacatcataatctgaaggcagccaggaggaggatctcctttgccctgggcagagcttaagcataggacctcatagaccacagtcac

SEQ ID NO: 32286 - DNA, 1183 bp, Mus musculus
tagcttttcggtttggggtctggaccaggtggaggatgatgtatgggggccccgtggcctaggtatgttcgtggccaagggaccagtggactcactgtgcttgggacgtgaacggtgaggcgttaagtattggttgtggtttggctgagtgacctttggctttaacgtgagttgggaatctgacatgaaagcttttgggggggggaggggaagaactgggtaatgagactctgaatgtgactctgactttaaaatccatgggacttttagaacctcttgaggggactgggatgctaaggttcggtatggagctgctgcaaaactttcatgatgagttttgtttaaggggcctactattagcaatctacataggggactgagcagctcctgtatctattgagagatagtgaatgatgtcaggtactggagacataggtgacttggtggcgaaataggaagaacgctttcgctgatttcacgagatgattctctgcttccaacaccaagttgtctttaccgtctacaggatgagattccagcactgtccgtgtctcggccgcagaccggcctgtcctttctgggacccgaacctgaagacctggaggacctgtacagccgctacaaggtgtgttcaaccctaagctggctcctgcatacctcccatcccccatcacatacgcccccccccccacctcccactgtggtacggcaaggctgcagccaaccctttgccctccctgtgcgtgcagaagctgcagcaggagctggagttcctggaagtgcaggaggagtatatcaaggacgagcagaagaacctgaagaaggaattcctccacgcccaggaggaggtgaagcggatccagagcatccccttggtcatcggtcagttcttggaagctgtggatcagaacacagccatcgtgggctccaccacaggtgagtggtgaggcaggctgggagcaaggcagggtgatagaatggccagagtactgaccgatccagaagtggatacatactttattttctgaatgtctctttctgcctctcaattcacgtgtgtgcgtgtagtttcaccatccaagtgtgatggtgtacgcctttaacctcagcacttgaggaggcggagggacaagaggatctttgtgtgtttgaggtcagcctggtctacctagtatgtttcccg

SEQ ID NO: 32287 - DNA, 1057 bp, Mus musculus
aactgcagtgacctttccaaatttggggataatgtgggcaaataaagttacttttctaaggtcacacaactaggaagtaggctcaggttgctgtgcatgtgtgcgtgcattcgtgtgtgtgtgtgtgtgtgtgtgtgtgtgtgtgtgtgtgtgtgtgtgtgtgtgtgtgtgagagagagagagagagagagagagagagagagagagagagagagagagagagatctagttgtcaattgaacaaggtgtatttgagcctggaggcatgagcagggctggttcctgcggaccctgtgaggactgtgggatgggcatgggtgttgtctatactgtggttgagcaccagtgcccagcgccaggctgactgactagctgatacctccttggtatttgcagggtactcttgagaagttcaggcaggtgaaagtctgtggcatcctcctcattggtcttctgccctcaccatcccccatgtaaccaaagagactctgagcacctattttccctccctactgagaatccctctggactccatctcactcagggtaaaagtccatcctttccatgaccactgggtgggtcttcaccatccaccctcatcacctgtctgaattagttgacgctccctctgctccagccgcaatgggctcagcctttgcacgtggtattctgtgcctggatcatttctctgtagacagcccagactcactgcctgactgctcttctgaattacacttctaacatccctgatcattcttcctttaactttttccttgtatcagttatattgtgtggcacatgttaaaatttatcttgtcaactgtctccccttctgggaggccttgaacttcttggaagcaagtatttgggtcactttatgctttatctcccactttgaagaatatgtaacaccccctcaggctcactgtcagatgagtactttcaagagtagatcctgattccagtctcctgggatgtcccacatccccttctatatagtgaacgttgctgaatactccagtggtgaacaatgtggaaacacaacagagaagaaagg

SEQ ID NO: 32288 - DNA, 1805 bp, Mus musculus
ttcttgttactgggaagccatgatgtcctagtgaactgttgctcctgttcgttgattcttcagatcacagtgccattttgtgagcactgttgggggatgccagtgctacagcagacaagtgccctgccattccaaagcctgcatcccagaggcaagaggaatgttagcaaagagccatggatactgagagtcggagggccggagacaggagagctctataaggggggcatctttgaggaaaacgttaaagaactaggccaaagggaaggaaaacatccccgctaggaaaagaaagctagagagaacagaaattggacaagagtgaagaggaccaggacaaagtccatgaggagatgtcataagggcttgactctggcactgaataacatggaaagcaacagcctctttgagcactgagctctgaggtgtgggcagaggttggaagcatcccagtggctagtccagctggtgttgatgcatgtggtttgttttgaccttagtggtagcagaagaggtggtcagttaggtgtgggatggaacagcagcctgagtgtaggaaggaggaacgatgctggcctatgaatgggaaagagcagcaggtataggcacatttgacaatggtcaccgtattgctactgtgaaatccctgagaggtcgccgaaggggaagacggagcccaggactggaaagccacattaacctctgtgtaggatgactagtgtggagctttctgggtctgaatagtgttgaattcagaactccctacctcttcttggttggtcctgagctttgaaagcaagagaagtccctcctgggagtagagcttgagtcagaacctgggacagcacctgactctctggctgctagactgaggctggcccctgcctcagcatctactgcttcctctttctgagcaggtggttagctgctcttggggaaaactcttgccccagctctgtgtggccttcctgtcttgctccctgctactcttccactcttggtcccacttcagctaaccagggttgaattgcaagggccaggagttcaggtctgcagtggctgatgtatatctactgcaaagggctctgtgaccccgagtctcagttacaatgtactgacagttggtcaaagatttgaacctgtttttttttttgttgttgttgttgtttctttttgtttggttattttttttggtttttttttgggggggggttgtttttggcaggggaggtcctcttatgtgtgtgaatctgagaagtggtaggcatgcctgtagaacatagtctagcaggctctgagctgagaaaggctcacagttaggtcaggagcatttcttcccacatgtgttcctgtgacccagatatagtgatggcaggcctggccagcctctgccttcaccaaacacacgagccagtgggaaggcaggctgtctgcagacagtggtcaaggctgagatgggcaaacagacttgagtgagtcatggtggcaagatctttaggttgcaaagggctatgggaacctggaggccatgcctggcccagtccgaggtatctgagataggagatgggagtgaggcgtacaggagtcagatggtggctggggaccactgaagcccagtcagtagggaggaaactgtcattcagtaattttaggtttgtagaaaagtgtcagagattgtgcagaaactgtccccagatgtaccccgctcccctggtgtcagtgtcagatgtaccccgctcccctggtgtcagtgtcttctaggacatacccaccaaagctaggacatccgcgcctgctcccgtttt

SEQ ID NO: 32289 - DNA, 1286 bp, Mus musculus
tccagcacaatagcctgctttctgttactatagcaaagtacctgagactaggtcatgtataaagagctcagttcagacttgaggtagatgccaccatgtctgaaaggggtcagcagtaagacaggcagccagacagtgaggaaaggccaggcttgcttttgtataatgctcatggggactaactggagtctcatagagagcacacccccagtgacatcgttacggtgaagatgaagcttccagtaaatgcccctctgagcactgttcacaccttccagggctaatatacagtaattggcagactcagaggacactggggctgtgacactgtcccctgcccctgagtgtcaccactgctggcactcctcaccagtggctctggcctgtgacattctaataagaattattgtatttttgttgttgttagtttatttctatagtggctgtgttggcatgaactcaaggtgtccatttcgtagctgtctgacccagtgttgctctgactgttttgtccaagctgctgctgccttccgggcaggctcctgcatcctccctgttttctctccttgtgttttctctgtgcccctgcaccgtgtcacagattcatgggcttttttccaggcagctctgatcccttctactggagaacagtgttagactcaggtctaggcatggggtgtgccactacttcctgtcctagctggtgctgcctagggtatcactcatctgtagcctcccacacgcacatctctgtatccctctgttcatgcctctgactcaggtcagcacctaggagccacacagattcctgcttccttgggaccttctagatggcaagcaaactcctttgtgtgcttttcgttcttgtctggtcatcttggcagaagctagcagcatgaccaggcctgcatgtgaagcacttctctctgcagccagactttgcctgccattctgctgaccccagagacagcatctagcaagtcccagtgtttcaccatttacttactgtctgggagctctcctcgctcgcctcaacttctagcagtctcacaatcacagtcttgtttcctacctgtgctggtatgtctcctcgtctcctcctactctcgaggcttgtgaaacaccctctgcccctggtagtccttgggctgtcagctctgtatgctgcctcaccctgccctctctcagagtgacccttgagtggccaccggctcacccagcctgtccacaggggcttgcatctcccttctgccactctgcctcacccattgccgtcctcccactcc

SEQ ID NO: 32290 - DNA, 1122 bp, Mus musculus
gggcacctgggcgctacacagtgagacctgtctgaaaaaaaaaagagagaaggcaaggctggggagcccagctttacctcagactcactgtagtttgaccttgacccctgactctcctgcttccacctcccagcctgctgggtctccaggcctgcgcctatgaccaggctcaagcctttttcagatagaaaggcaggcatcctgggcctctgggcgtgcctttaaccactttcttccttggagctctggtttttttttttgacttctccctttaggaagagcttcagtgccttccttcaccagcggctaaaactttcctttgtcttcagttgtcctgaagaaaaaggaattcttcatttcagggaagtttaaacacctaaaagcagaaagccctaatatactcctgtcctaatataaatcctgctgtcatctttaactgctgacttcacccctccccaacccctctgcttgctgtcctagcaaactcaagtatgtctaataaaggggctttttattttattttttcctttttgagactgtctcagtgtagccctggctgatctaaaacttcctctgtagaccaggctagtcttgaactcacagagcttccacctgcctctgcctcccaagtgctgagattaacagtgtgtcccaccaggcctggctactggaagggctttttaaggaaaggctcaccatgatgtgattctttgacccaagttactcatctgctggccagctgagtcccttcctagtcctcggttccctttctcctacttttctttgcatggtgtcgtgtcgccctggagatcttcctgtaaccttacactcagggcctgtctcctcgactctctgctgaaagtgatccttcttaaagatgggccaggttgtttggcagtcatgtcccctggagtaggacatttaatctgcccgtggcggcttgccacggttgtggcctcttcccttatttggcttcgtttctggatccctgtccactccggccaggtcaggcctcctggggtgcacctcgcttgctcgctctctcgcccgctgtaactttgtgcagagcacacagcatccatactagtcaaagggagcatgaatgatggccgttgcctgctg

SEQ ID NO: 32291 - DNA, 1116 bp, Mus musculus
cgcccagatgtgtctttctctccttcttctagtcttttggctcgattaaaagctctcaaaatagtaagaaaagaggtctgggaacagctaaaagaaacctatgttgctggtgacacacaggtgccgcactagtttgaagtaggagatgcagtcctggtgaggagacaccgagcagggaacctagagcagaggtggaagggaccctacttggtgctactgacaatgcccaccgcggtcaaagtggaaggaatccccacttgggtccacgcatcccatgtcaagagagcaccccctggagtcagccatgatgagtggactttggagaagactactaacccttttaagttgtgcctgcttcgtaggagcgatcccaaaggacttcaacccccacagtccttcctgttcaacaaatgtggggggtactcaatgaggggggtagggctgtatggacaatcgccgaggtacaccctctgtggacttggtggcctgatcttttctctgacatctgtaagttggctataggagcccctcctggatgggacttggaggggtactctgacattcagagggcacctttaacaccccctccatacgtagaaaaacattcgagagacccatggggtggttgctctaaccaaagggatagaagcatgcttcgaacccatcccttctatgtctgccccgggccccaccgaagtaagtccctcaatccaacaaggctgacttcttttgcaagagctagggttgcgagacttcaggtacagcccgctggaagccctcctcgagctgggactatattagagtaacagccaactattccctagcgtcttatataactggaggatttgacctagacgagtgtactcactggtgccatccgctctgtgtcaccttcactgaaccagggaaaagagctctgggatggacaaaagggtatacctgaggtcttaggatttacaaggaaagatatgatgaggatgattgttcactatcagattaaaaatagagaccccctacaatcctttaggcccccccaaccaagtccacacccctcacccatactattgctcagcctactctggtgattgcagacccccttaatatggccgctatcac

SEQ ID NO: 32292 - DNA, 1213 bp, Mus musculus
aacagaaccagcagccatacttcctgctcttggggaacaggacaaaaactgaccctgactgaagtatctgcaaggagtccaggtctctgtataggcaccccaccttccacccacaaacacctatgcggataaattcagtccgtgtccaggatggaagctaattactatcttgtaccttccccggttggctggtgggcttgcaatacaggacttactccctgtgtatcaactaaggtttttaattcatctcgtgatttttgtgtcatgatccagctgttaccccgcttatattatcaccctgcatccagtttagaagaaagctatgctggccggcggtcaaaaagagaaccaattactttgaccctggctgcattcatgggaataggtatggcagtaggagtggggacaggagtgtcagctttgatagaaggaagacagggaatttagtctttgaggaatgctgtcaatgaaaacctagtggcaatagagaagtccattgacgctttagaaaaatctttgacctccctgtctgaggtagttttgcagaacaggagaggtcttgatttgttgttcctaaaggaaggaggactgtgtgctgcccttaaagaagaatgctgcttctatgcagatcatacaggagtagttagaaactctatgcagaaactgagagaaagattagagcgaaggaaacaggaacaggatgctcagtagagcatgctcagtagagatgaggcttgctgagatttaacacggacacactaggtaggcagacagggaagaaaaaagggtggaaattgtcctctggatgctttggagtcatgatttggagtttgcttgtgttttgtgtgtatgtgcacacatagccactgatttaacaaggagtatttgtagggctgggcacacgcctttaatcccagaacttaggaggcagaggcaggcagatttctgagttcgaggccagcctggtctacaaagtgagttccaggacagtcaaggctatacagagaaaccctggtctcgaaaaaaaaaaacaaaaacaaaacaaacaaacaaaaatccaaggtgtatttgtttaaggagacatcttaattaggattttattactgtgaacagacaccaagaccaatgcaagttttataaaggacatttaattgggtgttggggtcggcctgtggctctcatgtccaggttccagcctgggaggcaaccggag

SEQ ID NO: 32293 - DNA, 1241 bp, Mus musculus
gtccagggcgggcggcctggcggcgatgccgtacatgcgcttccgccaccccctcagcgtcttgggcatcaattaccagcagttcctgcgccactacctggagaactacccgatcgcccccggccggatccaggagctggaggagcgccggcggcgcttcgtggaggcctgccgagccagggaggcagccttcgacatagagtacctgcgtaacccccagagggtggattttgacattttaacgtttaccatagccctgactgcatcagaggtgatcaatcctctaatagaagaactgggttgcgataagttcatccacagagagtgaagagtcggactgcggggagggcacggcaccaagacctccgcatccaagtgaaaccccatcctgcaacttggttttaagaaatcaaacggatcttgagaggcagcgcttcctcagagggaggaaaagcgtcagaaaattgggggtggggagggaaagcatcgtagactcctaccgtttcttgagtttatgatcagttgaaatttcttgtgttatggaaaaggtccatcctcgtggcttcgttaataagtaaaggacggttttgtaaaactgtaaagacttaaaattgccagtagtagagcccacgacgaagaagactcgaagagaaagctggttttaggacgaggtttctgtggagaacttgaccttgtcagagcaggcaaagtcttcacgtcagcgtcaacaagcgtgtatagtgtaagagggattttgtgtctcagacattgtgaatggcgaacaacataaatattgtatatagtatgtgataaatcgtgtttccaaacataccaattttctgggattttattttccatttttcaaaagttttttttttccgtcattgctttgtaattaatctattcctaagtcccaagactatgaaggattgagagtcttctgtccttctctccttgtccccatgcctcatgcagcctctgaaggcagtttccgtccttgtttccttttttatacacattttatttctcagcagagttgacagattttggtttggatattgtgatttcttatgaagataccgtgaagaaccttcccgaccagtatatttactccttagggctatattttgtggttatgctgttatgaaccaggaatatactggtggacggtgggctttttcccatcggtttctcctggcagtatggcgccacctctggtaggttggcgcctgcgcacacca

SEQ ID NO: 32294 - DNA, 1115 bp, Mus musculus
gttgcgtttgctctttccttagacttaaacggagcagttacagggcaaaagcattgctgtttgtcttaaggattccctgccctctttgtgcctctgtctacttccattcaccaaggaactctgggcctctttctccacaacagtcttggctttgggaaaaactcacactaagagcactgactgctattctgaaggtcctgagttcaagtcccagcaacaacatggtggctcacaaccatccataatgagatctgatgccttcttctggggtatctgaagacagctacagtgtacttacatataataaatattttaaaggggggggggcagtcggagatgggtgtgatggcacacccctgtaacctcaatgctaaatactctggaggctgagacaagctggtccagagcttaggccagggatggcaggcggcacatgacctcaatccctgcacacagcagcaagcagatctctatgagtttgaggccaacctggtgtacccaagttccagaaccaccttggttccatagtgagatcttcaaacgataaaaagtctagagcagcctgtgcaattgagcagagaactagaaaacgtgctcagtgggtaaacggtttgccaagaagcctggtggtcccgggaaccatgtgaagctgcaagggctggcccctccagaggtgtcagtcactctccacatgcgcattaccacacagtaaacctttaactcacccacccctctgaagtaggtcacggatggtttctcagccttgacggcatttgatgcttctgtcctgcagggatgtttgtagctgtacaggctcaacccttgctgcttcctgcctgatgcacaatggccttgccacacgagtatagttgacagctccagtctcagactcagaaagctagggcaggatggttgagtttggggctagcctgacacttcattgtgagacccccatctggggggaaaaatgttggccactgtgaatggtaaaagggacatgctgacatcagccttcactgggacacttgcagctctgggagcaccgggtcttcagagacttgtactctcccctattttgacagggagaggggttcaagacagggtcactgggtaac

SEQ ID NO: 32295 - DNA, 1398 bp, Mus musculus
gcttctggggttgtaagtggcttccgtgaggctgtgcttgggactgtcgtagaacctgtttctttggctagccaagcatcgaaacgtagtgaccaggcccctattagacgtgtgttgttaggttctcccttatgtcttggtgactcatggtataaattcaggctttgacaagggcctgtctgtaattcctggcttgaagtgagtcttgtagcctggtgcaggcttggggtatgaattgatcccaccagatagagcccatgctctctccagagacccctggcttaggtgtccatgtgaccagcttcccagtttctcagaagcctgaggttaccctccataacctgtatctgggagtctttgcaaggcacgtccttgagtgtctgtctgtctgtccactctgcggccagcagggtggggagctgatcctctcactcacttccaggacatctcctgtctgaatcgggacccagcccgagtagtagtcgtggactgcaagaaggaagctttccgcctccagcccttcaacggtgttgccctgcggccctgggatggcaactcagatgaccgggtcttgctggacctgtctgccttcctcaagagtgagacttaccttagtgtctggtccagaacccttgaccctgaagacaatggcagacacttgattttggcttgtcattagtataaaactgagcaattggggtggaagagatttatgagtatcctggagccttctggaactttctgagctatccaggcatttctcgtgggggttatttggtcatgtttggaggaaccctctcagcactgacaacattcaggatgtgctgaccctaccctgggtcatgctaaggcctgactaactagtaccccctttacctgttgtgcctacagccattgcactgaaccaagtggaggacgtccggacggtgctggagcactatgctctagaggatgacccactggaggcattcaaacagcggcagagccggcttgagcaggttaggctctagtccctactgggcactttggacttttgcaccgtcttcttggctttggcctctcggtggggctctcacacagcctgccttgcagggctgctctgagggctctgcagcatgggctagaggcagaaaatagtgagcacttaagataagtccatggccttgggtggtcctgagacctttcatggtagactgtgtgcgtagagcttgtgcacagggatctgtggacgcttggcctcgggcatgttagtcctgcacccctggggctaagagttgctctttccacgctctggatctaacgggtggactcgggttctatactgggcctgagtatgacggcaggcaggcttctgagttgacccttgtctttttctgtccctcatccccaggaggagca

SEQ ID NO: 32296 - DNA, 1794 bp, Mus musculus
aacccaccccatccccacaagcatatgggggaaccccgaatccccaaacacccggctacccagacccatcatccccccaggtcaatccacagtacaatccacagacaccagggacgccagccatgtgagtccatcagggctgagcccgaaaagccctgcacgcagctacccattgccccacctcctgaccctttctgccaagaataacacccttttcttctgtctacaggtacaacacagaccagttctccccctacgctgccccctctccacaggggtcttaccagcccagccccagcccccagagctaccaccaagtggcaccaagtccagcaggctatcagaacacccattccccagccagctatcacccgacaccgtcacctatggcctatcaggtataccatgtcacagaaggaccctgcttgggttggccaggcccagtgactattccagacactcactcctgtcttccttcaggctagtcccagcccaagccctgttggctacagtccaatgacccctggagcaccttctcctggaggttacaatccccacacaccgggctcaggcattgagcagaactctagcgactgggtgaccactgatatccaggtgaaggttcgagacacctatctggacacacaaatagtggggcagacaggcgtcatccgcagtgtcacggtaagtgtggccctaggaggtagacatgtgtacccctctaccccccagcctttgtagttatttttatctctgttgctgtggatggaaccctaggcctcacacatgctaggctagtgcctaccactgaactacatccccaacttattgttatagttttagatttaactttacaactataatgcatggtaagctgtgatggacaagcagatgtggaaggctggggtgtctgaggcagctggagggtgggcagtaagagcaggctgtccgtccttctgcagggaggcatgtgctccgtgtacctgaaggacagtgagaaggtggtcagcatctccagtgaacatctggagcccatcacgcccaccaagaacaacaaggtagagatggggccttgggaggataccggagggaatgacagggctgctgctgggcctgacactggctgtcgcctccaggtgaaggtgattctgggtgaggaccgagaggctaccggggtcctactgagcattgatggtgaggatggcatcatccgcatggacctagaggaccagcagatcaagattctaaacctccgcttcctagggaagctcctggaagcctgacgcccaagtgtgcagtgcagacatggagccagcagcccctctggccttgtttggcctagcatggaaccctgagtctggagcaagccagggcaatcactctgtatttccttttcctccttccctgatactctaggagtcagagcagagtctgaggaatgttcctgccttcttctgcagccccagcttgactttgtgttcaggtctttcaataaagagaagctgtttgaaaagtgtgtgtacgaagagttttcttggtcttaagtatagatatgaagttggggaaataaccagatcttaagtaagtttctccatctagaaaaataatgcttctggaactccaaagggctcttcagagtctgttgcggacaggagaaagatgattagggctggcctttgtcattcaggcctgtcacccaagctacttagacctggggaggacgatcacaggttcatgtcttatctgagcaagtctcactgagggcaacaagcccctttactgcagtgcttctta

SEQ ID NO: 32297 - DNA, 1382 bp, Mus musculus
taatggtagtgttgatgttaatgccactagacccccgtgcttagtctaatccaagtctgtcaggtgactaaaaaggacagtctgtcagtttatttgaacgattggtgtgtgtaccctgtgttgtgaattgggccaacaccagtgatggaggtggctctaggcctgccactcggggagcttctggatagactggtcctaggtattggacaaatttgatccaaagagaagatggaatgaccactgtgagaacagtggacctgtctgaccttgcttcctgtttggggaagttcatagttgcctgtcactccatgattccagctcctcggtgtctcaggccctcttctggtctctatgggcacatatacatgggactctgaggggcacagggatcctaggataggctgcctccttgattctggtgatggtgggaaccacacaaagggagatgatgaatgtccatggagagtggttaagtcagggtatgacttaactccctaaccccatattttcccatttctctagttactggagcctgttttgcttctgggcaaggagcgatttgctggtgtggatattcgggtccgtgtgaagggtggtggacatgtggcccaaatttatggtaagtctcaggatctaagcctatgggtgtgaggcagctcctggaaggactgggtcttcactaagctttttggtcattgtgtcttgcagccatccgacagtccatctcaaaggccctggtagcttattaccaaaaatgtgagtgagagctggtctttcatttcatggcgggtgggctatgtggtaggaccaaactaaaggtcttgtctattaatctccagatgtggatgaagcctccaagaaggagatcaaagatatcctcatccaatacgatcggaccctgcttgtagctgacccccgtcgctgcgaatccaaaaagtttggaggtcctggtgcccgtgcccgataccagaaatcctaccgataagcccatctcaaggatcggggtttacctttgtaataaacatcctaggattttaacgttcctgtttttgtgttggtctctttttgtagtattagtgtggttggacagtgcaagaaactcccttagtaagtggcactaaggagtaatggctgccttccagagcatttgagctctgtttttgtgtgtatacgcttgcttgcttatttatttatttatttttacttttttgtttgtttttttttttgtttttcgagacagggtttctctgtgtagccctgactgtcctggaactcactttgtagaccaggctggccttgaactcagaaatccatctgcctctgcctccggagtgctgggataaaaggtgtacgccaccatgcctggcccctatttttttttt

SEQ ID NO: 32298 - DNA, 1191 bp, Mus musculus
cacctccagctgcttgggaggctgaaatgaggaccccatgagcccaggagtttgggggcaacctaggctacaaagtcaagcaccttcctccagatagacctgaaatccatgtccccagtatccatctctgtccatttcctctcaggtatcttacacatcatcaactcctaccctacactcctgttcatccatccaactatattcttcatcccacctctgactcattccactctcccatctgaatatatccagtatctacatctgtatctccacccattatttgcccacacatccttccatctgtccatctacccatttcatctacacacctcattactaccaccatttctaatcatcagcacctcacacacccacactgccgtctctccttgatagggttcttccaggtaccataaaacctcaggacctgccgggcgtggtggcgcacaccttaatcccagcactcggcaagcagaggcagacggatttctgagttccaggacagccagggcaacacagagaaaccctgtctcgaaaaacaaaacaccacctcaggacctttccatgctgacaccagggcagattaagatggggttgtgggagctctgttcctcatttggttttcctgggaacacccaggcccccctttcccatgaatattctgactattgtgtccaacctccctacacacaccccacatccctcctcatttgggacctctgtaattcctcagtatactcttgcctcccacagaataattcaagtttgtagtggagacaaagggtattttttgttaaatcctacccccgcccagcagtgctctgcagggcagcataatttaaacaatttgtttgatgacagaatgccagctccttccttcactgtctataatcctcccaagaattctaaggcatccgtccccaggccagggtggtatttggtgtgagacattcctcgaagagctctggctttcctgtctttagccacttctcagaatgagcttagcattcagtaaacatatcctgtcacttctcagggacaccttaacccgtgactcaccagggagtcagtctaatcacacacacacaaggtccagtcctgacctacggggctcaggaatctgattgttagcccttggctaacagccagaggctgtgctttagagcaaacgagcttctggctttaagcttg

SEQ ID NO: 32299 - DNA, 1148 bp, Mus musculus
tatgaacgcctcgggctccgggatgagtgtcctggggctctgggggcagcggcaacgccgcatctggggcggggagagtcgggtcccagatgtggggcggggggcggccgcccaaggcttctcctcccctttgccgccgccgcggctcacatcctgttcccgcctgctggggggaggggccgccttccggcacgccctcccgtaaaggcttttaaaatccccgccccctactctgaataattgcaagcaagcggttccaacggcgagtcaccgcccacattccaagagcctagagccgggaggactttttaccttttacagcaagggcccaggaggcgtgagaatctggaatagtctcacactcttgttcttattggtcgatcggcgggctttatatttgcatatgcaatgttgggccgagccgttcaacaaagtcctgcgactacaactgactgaaggactttgtggcgcgagggtgcggccggagctccagtggcgcaatcggttagcgcgcggtacttatatgtcagtgctaggcgtaagcgatgccgaggttgtgagttcgatcctcacctggagcacttctttttttaactcatctacctcttttctggtgttctctcatcagtttagaagtcttcacattttataatttcaatcaaatgttttggcttgtttgagacagggtctcaccatgtaactctctggctggtctggaagtcattatgtagaccgggctggcctcgaactcacagagagcgcctgccactgcctctgcctctgcctctgcctccctagtactggtattaaagacgtgcgtcactgtacccggaaactacagaatttttgaagaatgaacatttctttgtgaattttttgcaatggtctgtggaacagtcccaaagttgcagtttctattctggtcgccagagggcaataacgtctcttattagatggcctgggcgtcagataaaatccaaatctcagatcccagggatggatggatgcttacaacacactctttatggatatttgtcttctacaggtttctgaacagattttttttttttttttttttttttttactgaccactcactaggaactgtatcctctgtctctgaggacttgactttttactaaggagact

SEQ ID NO: 32300 - DNA, 1172 bp, Mus musculus
tcgcgccaccatggatctctctgccatctacgaggtgagtacctgttagacagcatcccgggatccccgacgcaccaaacttaggcccgggacgcctccgtaccttctcagactagccctggctggctggaaatgagagagggagccagcgagcctagcgcctcggtccagataccggcgatccccttgggacgaaaagctggcacactgctgtcactcgcgtagggcggaagcggcatcacacctgtctagtgcccttcgctgcccatggcgcggtttggtggccaagcaggtgctaaggttgaggtagggggggagttgacagggtaagagttctagagagatctggcctcctgggtcagctttggccggctccttcaagttgtgaaacgagcgcccggtgggcggtcatatggggggggggggagtcctagaggcccaaagttggcgagcagcagtgtgctttgatttgggggggaaccctctctcgatcggggatactgggcttcctagatccttctggattaccttcagtcatgtggaaacactcaaatctctgtagtcaggttctccctggagtttgtgtgagccgggtggggctcaggccgagaacccacaaaccggactggcaagctcgtgaagtgctttacaacaggggcggggcgacgtcaccttaccttttctggtggcctaaccgaaccctgttcctctcagagcctccagtcgatgagccatgacctgtcatccgaccacggaggaaccgaatccctcggaggactttggaacataaactcggactccatcccgtctggggtcacctctcgcctgactggccgctccactagcctggtggagggccgaagctgtggctgggtacccccaccccctggttttgcacctttggctccccgcccaggccctgagctgtcaccctcacctacttcgcctactgcaactcccaccacctcctctcgatacaagaccgagctctgtcggacctactcagaaagcgggcgttgtcgctacggggccaagtgccagtttgctcacggcctgggtgaacttcgccaagccaatcgccaccccaagtacaaaacggaactctgccacaagttctacctccagggccgctgcccctatggctctcgatgccacttcatccacaaccccac

SEQ ID NO: 32301 - DNA, 1230 bp, Mus musculus
ctgtcttctcttcccgacctacgatctctccttcaacaaacagcccctcggcgctcgtccccggagcccgcccgcccgccagccagcccctcttgctccccgcgcagggcccatcacctggagactctccttcagttgcgggatgagcatcttgtagcgctgcacaggatcgaagtcctgctgctgctgctgcaggagcccgctctgggcagaacccaccaactgggtcggttgtggctgttgctggggacccggacccccggcagaacccgggcctgacacaccagacgcagaggaaaccgctgcagcctgtggctggggcgcagccattttcctccgctagaacgccggaaatgcgtcataaatgcgtctgctccggtagctcctcagctttttcagttggctgacctcctagttagccatgccttaccgacagattagccaatgggagaagaggatatgcatttttctccgccctcccaaatccgaggccatgagtggaatatcttttcgccaatcataagaggagttcccccacggctccgccccttcacccacagctcgccaatcactgtgaaggactgaccaaactctatttccctgaaggccttgcggccaggagcgacctgtctagtcttctgcgtcttggtagcagtcggagcgggagctgcaagtctgtgtccgacgctgtctgtgctcttacttcagtcacacccgagcccttctcgtcggcccacttcatcccctttccccgcggagcccggcgtctacgggagcctgtccttggatccggcgtctctcaaagtcggtacgccactcagcgtccgcctgcggccagcgaggacgcctaccgcgccgccgtcgcctggtcgcgatggcgcccaccatccagacccaggcccagagggaagatggccacaggtaggtctcctgtcacctgccgcttcattttgttttgtgagctgcaagctggggactaggccgaggggggctgcttgcgacatcactgattccctcaggtcggcccccgaggtcgcgcagcgctcacccccgatgaaggggcggtcccccctgggctctgcggtcgcttcctggtcccctgctattcaatttcggaattgcaccttgcgggagggagtcagacctcagtctccttcagtgaagcttctggattgctctcctcaggggattgagcatctggcttcatgctttatcaccatcatcaccatc

SEQ ID NO: 32302 - DNA, 2888 bp, Mus musculus
ctcccctcaccaccaccattctcttctctcccactcagactgcccggtacctgggcctgacctggagatcaatcctaccctggagtctctgtgtctgagcatgacagaacacgccttgggtggtgagcatttcctcttcccctgacctagctcccacctacccagcatctccagctctgaacacagcaacttggagccatcctgagggtcccaaggggaggccagactccagggagggcctgcctgggatgacatgctatgtgagtgcctttgctcaggcctcccaccagctcctgaccttcctcccttcctccctttcttaccacagatgggacagacaaaacctccaccatctgacgggacccacagcccagcgcacccataggctccctgggcggcgggcgggggccatcccccaacaggcttctcctcagcagcgagagggtgggctggcgcagctatacattctgatatttttctactcatcctcttaacttttgtttaacattggcacacgccttgctcactcccaggcccattgagggatctcagctgaggccagggacagagagggcagccagaggcaaggactggccagactgcctgccttttccctcccaaatcccccactagccccatcctacccctgcctccttcagactgctgacacctgtccttccccaagagagcagacttcctcagagacaaactgacagtcaccttgcgcaacctgcccttcagacacatgacagtgggggaatgagcagtgtggacagcctgctccaccagtatgtcactggaaaagagcccctctcccttacctcctacctttcatcattcctaccattcctgaagacaggcaccaccttcctcctttttttcttaccctgtttatcagaggttctctacaattaatttcttaggcctatttaagatacatatttatatagttcttaacggtttttctctgatcattccctgtcatttttagaatccctaggcctctctctgagccaggacagtggcagggggggcctgaactttatgaggagagggcagagccccctcctgcagaccctcttgcccttccccatcccagccccggctcccagatgcagaggttgaaggtgggcagccccaggccctcagtgaggtcaggaagtctgttgccttaatgtccctttccccccaccaacataacccttctctgttccccaggtctgtgcaagacttgagggtaggaaccagggaatggggggtgttgggtttttgttttcttgcctaccctctctgtcaaactttcccacccccattatgtcatgacctcatgtaagtggaacactatatcataacccagaggtgcagcccagcctgagtcacataaaccctctactccctgttcttgatgagggctggtgctggggcccaggtggagggagggaatttgggattcaggctgtggggaagccagggtcccctattccaaactcctctttcccctcaacctacaccctcattgggacattctcaagcttttcacacgaaaaggaaaaaaatgttatttttagatacattttatgaataacttttgttatgaatatggctggtaaccattgtgtatgttattaaagatacaaaatgttgggaaaaaacaaaaccaaaaaaaagaaaaaagaaaaaaaaaggaaaaaagaaagccttccctgcactatcagcccatccccccagaccttgcccctacctcctggtctgtggacctcccctgctttgagcccagggagggagaagaagccagggggtagagtggccctggggacctgcctgtggtccccaccacctctcccagtgccgggctgggcggggtgtcaggtgtatttatgtacctcttgcacactcatcaacctatgcaagtccccaccccggccctccaggtttctgtgcctttgatcattccccctcttaactcccaggcttctccggcccctcccactaacagtgggaagtggggtgaaaggccacctgtttggaataagcagggtgtccctctcatgggaccctcgcccccacaagccggtccagtcttgtcttgttcacttcccatcagggtgactgaccctgcctggcactggaaggtgatgagggataccctccccaagagggaggtgagagcttcccacccatctgacagcagagtgcaggacgcaggcggcctcgctctgacaggcaggaccctgaccctcccacccccatgcccctccatggtttcaccctaccctacccacttctgtccccagccccactggcagaatcagctttgagtaactgtacatttttctcgctgttggaaaagacttatttgttgaagtttcgattgttaatggtctgggcttattttggaaaacaaaaaaaacaaaaacaaaataaccaaaaagactcttcatttttcttatgatgcatttcctgggaatccatggggacttgattttgtacttcttgggggggggaaggggggcggcagcggcaagatgatgtgaaggggaacagagactttaggagatgaagtcaagagaagttaggtttattaacagcaaagattgaggggtagtgacaaaagctcacaaaacagacaactagaaaagtgcttccctgccctaaaaatggtgtctgtgctgatctcattagaaagccttgaggctcaatcactgtcactgtcagcctcactggaatcagaggctgctgcttcactgccatcttcctgagctgagtgctcactgccactggggaaggggctggcactccggctacgactcctgctctggctgcggctcctctggccaccaccatcactgccgctgtccgagtcattgtcactgcccctgtgggcctgc

SEQ ID NO: 32303 - DNA, 1279 bp, Mus musculus
agaagagtttggattttgaaggaagccaccaggatctaaaaacaggccgaatttccacatttgaaggttgttgtctagttgagtatggtggcacatgcctgtaattacagcacacaagaagatcactgggtttgaggtcaacctggcaacaaagtgagaaccagtctcaaaaaaccctacctctaaaaacagccagcatggctgctgtaatgcaaggggctataagcagcaagaatgaaagaatctagttaggcatgaaactaatcccagccacagctgctgggcttggatgagtgtgagtaaaagggtggggcacgttcataggccccgggcatcatgctgggaaggtgggtgttcaggcaggaggctgaacagtatctggtagacagctccccttgaagtccagtcccttggctctttcccctttgaggattataagattgatcgggccatggtctttttttttatgctcagataccctatcctgacctcttgcttttccttctctggccaggtctcccctgccaaatccaccctagcccactgaagcgctccatgtcactcatccctacgagcccacaggcccctggtgagtggccgagtccagaggagcttggggcccgggctgctttcaccacgcccgaccacgcacccctctcgccacagagcagtgtggcctcctctggcagtgagcagacggaggagcagggctccagccggaacactttccaggaggatggcagcgggatgaaaggtgcatccaggggacaatactagaaaccctgctctggggcttgggctaggccagaaggacagaaaattgcctgtagctgccacctcagggaggacacaggtttgaaaataatagataaccttcccagccagccagagctcagataattgatagatgagataaatcatggatcccatcctggcagctcagtagatcaatcgggtatcctgttagggaagggtgtctaaaatggcagcttctgactccagcccactgtagtttctaaggctactgctggcttatgcctgacttctgcccacaacctccctctgatcaccagcatccatttcttgacctatcctccatccttttccatagatgtgccctcatggctcaagagcctccgcttgcacaagtatgctgctctgttctcacagatgagctacgaagagatgatgaccctcactgagcagcacctagagtcgcaggtgaatctgagagagcactggggaggtggtgggccagcacagttgcctgctgttccta

SEQ ID NO: 32304 - DNA, 1146 bp, Mus musculus
gccttcgtgggacctactactgaactctggttttgattccatgacttgtaaagccacaccaggacatgtggagcacatgaggctcccaggaacccaggcccctcccctgggcgctgtctgcaggagagaggcggctgcccatcactggaaatctgcatcaggggccactgggacagagacgacactatgagaaaggttgtgtgtgtgtgtgtgtgtgtgtgtgtgtgtgtgtgtgacagagagagagagagagagagagagagagagtgtgtgtgagagagagagagtgtgtgtgagagagagagagcactcgtgcaccaagaaagtccagctcctctgtcctcagcctatctggtgcccagcccctgaccctgagccattgaagggtcaatcatgaatgtttgaagagtggccttttcccagagccccacaccctctttccacaggagaaacatggggcctccccttccccaacctctgcagcaaatgactactgcacccagacagcctccgttttctagaagtctatttatattgtcattttataacactagctgtgtctctgtctcagcctaggaacagatggtccctgacctatggggtggctggcccagggacagggccactttgaagaatcaggctcctgtcccccaccctgccgccagtccctcaagttagttttacaattaaagtattttcttgtttttggtgtgtgtgtgtatgtgtgtggtctatggaggctactgtccagctatgtagtaagggaagtttggggacttggcctggaaacccaggcatcgagggggaggtgctccaccccactccctgcatggggcaagtggccacgccccgtctctggaagcagcctgttggccagagtgctgagtgaggctgccaagtcccagtggcctggggttagtctttgctctttttattttttatttctttgagacagggtttcactacatagtttaggctggcctaaattaactgtgtagctcaggttggcttcagacttgccacactcccctgcctctgtctcctgaatgctgttgagattataagcagccgggcgtggtggcgcacgcctttaatcccagcactggggaggcagaggctggtggatttctgagttcaaggccagcc

SEQ ID NO: 32305 - DNA, 1196 bp, Mus musculus
agtgcttctaaccacgagccatctgtccccactgaatagtcttagacttggattcctatctagaatacggaaacctagtaggccctcttgtgtctctccaggcctagccctcgctccccagctctgggccgcccgttccatggccaccctgaaccagatgcaccgcttaggcccccggaaggaaccccctaagcgtctgggccccacagagggccggccccagctgaagggtgtggtgttgcgcacattcatccgaaagccgaagaagcccaactccgccaaccgcaagtgctgccgagtccgcctcagcacaggcaaagaggctgtctgcttcatccccggggagggccacaccctgcaggagcatcacgtggtcctcgtggagggtggtcgcacccaggacctgcctggggtcaaactcaaagttgtgaggggcaagtatgactgcggccacgtgcaaaagaagaaatgacagtaattcacagtggtctggcactcgatccttggaaacgggttcttcctactcccgggtcttgggctcaaatcttactgtgattcagcaagactgttgttaacctgcaagagtactgaaggtgaattggaaggcagtacccctgtgcgtccatgttcagtgtttgcaggttgacctcatgtgctgggatggggtttgtaataaatatatcttcaggttgtgatgttactcagtgtgcggtgtctgtccccgggtgtggtggcaaatgccaagctgtgcacctcagttccctcttcctaaacaggtcactgacagaggaagtgttctaggtgctgaacgttattaaccgtgtgctccacatggttagtgcacatatgtgtgtggaggtgatgtgggttcttttgtttgggggatgggtgtgtgcatgtgagtgcagatgcccttggaggccaccgttctgggtccccccagggttcggttgtgaactgcctgttgtgggtgctggaaaccaaacgggttttctctgagagcagtttgtgtttctaacctctgagccatctgccagcccctttagcatctgttttattgggcagattggaaggatttagagtaggcattagaggcggctcccccacagcctgtctggtgccaggcatctctacagggggtagagggcaggagaaaagttgttacctggcaggaggcaaggagcctctgaggaact

SEQ ID NO: 32306 - DNA, 1174 bp, Mus musculus
gggacggcagaggtggggctggcaggtgagcagttgcctgggggatgcagggaggacagctccctgcaggggacagacaacaaccctggggactaacatatccagtggtgtaggctgccagaaaccggtactctgactggggttctacttgaaatctcactgacttcctgtgggtaatggcagccctggctgaccccatcctgcctctttctcctcccaggatacttcatggaccactctgtagctttcagggaccttccagtcaggtgatgcccatttcctttaatgctagacccccattggtaggtagcatctaccctgcctgacccaatctcccatcttcctactaggatggtctgtgccagcacctgctaccgggcagagacagacactgggaaggagccttggggactgtaccgagtccatcacttcactaaggtgagtagtgtaggcctggctggcgtgcacaggtcccctccaccacccaggacctcctgacccagtatcctgtcctgttccaggtggagatgtttggggtgacaggccctgggctggagcagagctcgcagctgttggatgagttcctgtctctgcaggtggagatcttgacggagctgggcttgcacttccggtgcggagatgaaactgggtgggactggtaggggttgggggctgggagagtggggttgactgggctggcctaccacctgctcctatcccctaggtgaggcctctgggctgtatagtttctgtctgtgcattattttgttttatatacgagtgtcaagccaggcaatggtggcgcacgcttttaatcccagcacttgggaggcagaggcaggcggatttctgagttcaaggccaacctggtctacaaagtgagttctaggacagccagggctacacagagaaaccctgtctggaaaaaaaacaaaaacaaaaacaaaaaaagagtgtcaaaagcatgggaattaaagctgccacacacacacacacacacacacacacaaccaagctcccagtctttagagtttggtccaagagacctcattgtcctcccgggtaaagcaggggtgcagaagggaggcatcagttatcacaaggcccacttgttctacaggacagacagacagacagctttactgagggctgaggaaggccaccttttacccag

SEQ ID NO: 32307 - DNA, 1501 bp, Mus musculus
ctaagcctctagggggcagatggccacccactcaaggcttttggtgatcgcgtggcagtacattggggtccctcttttcactgtgtgaccttactttttcaggagaactacgatgacccccacaaaacccctgcctccccagttgttcacatcaggggcctgattgacggagtagtggaagctgaccttgtggaagccctgcaagaatttggacccatcaggtacttcttgatgctgggttagagctccttagcatccctgagtgtcactgctgtctggttctgagcagtgctggtcccagggtctgtggctgtatcctgtgacttgtcctcagagagttcactcttgccgtgtttcaagttttagttccttcttcccccatctcttccccacccctggggatctagtcagacctctttattctcctagtgacttcttactgtttgaccagaccagttgcttgctggtctagattccttcttccacaaagttgcccaggcaatgattgattagcactgtgatctgctcagcctggcagtctgttctgatttaggagaggggccaggagggtaactggcttagagtgttgggggtcagggttgagaagagcaagaatcatttcacaaagttgtctggttcccctcccaagagcactgaagcctgccttctctctgcagctatgtggtggtgatgccaaagaagaggcaggcactggtagagtttgaagacgtgctgggggcttgtaatgccgtaaactacgctgcagacaaccagatctacattgccggtcaccctgcatttgtcaattattctaccagccagaagatctctcgcccgggcgactctgatgactcccggagcgtaaacagcgtgcttctgtttaccatcctaaaccccatctactccataaccacggtgtgtgtgaagggaaggcgctcccacctcttctttcccctcttgcccgactccatcatccccagccagccaggccccttccttatcttgcctgtttttatctcttctaggatgttctttacaccatctgtaacccttgtggccctgtccagagaattgtcattttccggaagaacggagttcaggctatggtggaatatccttttctgggaaactggtgtttgtttctcagagtttagcatagagaatgtaaaagaccaggctatgaggcttatagaaacagctgatcagggtatgttctaatgagatactattttgtttaggagtgtgtgcaccccttgtgagagttgggcccagtgcttccttcatgcagctgtgcaagtgagacagctcagctctatccaccgtcctcttccttctttgaggtggatgggtccattctgttagagaggaacttagataaggagcagaaatcaagccgggcagtggtggcgcatgcctttaatcccagcacttgggaggcagaggcagtcctcttttttgagttctgagtttgaggccagcctggtctacagagtgcctggac

SEQ ID NO: 32308 - DNA, 2702 bp, Mus musculus
ggccagacctgctctgggttggttctggtcccctttcacctttgaggaaatggacgactagaaccagagcaggagttagcttgtagctgtcaggggagaggacctgcaactagacatgtgtgctaaatcgcacctttctccctaaggtgaaatttatgaaaagcaagccgggggccgccatggtggaaatggctgatggctatgctgtggaccgagccattactcacctcaacaacaacttcatgtttgggcagaagatgaatgtctggtgggtactgtcatcagaaaagatggacagaggtgtgatttcagttgtgattgagatcagggtgctgacataggcaggaatgggggtggggataggagccatgctcctcttcctctgaagccttgggagaaaggaggttagcttgagtgcagcagtgtgtgttaaaagcactcagcagtatcagataggcgtgaggccagctgagcctctggctgaccctagaggacagacaattcagcatagaacaaagacttcctttcttcctctcagtgtctccaagcaaccagccattatgcctggtcagtcatacgggctagaagatggatcctgcagctataaagacttcagcgagtcaaggaacaatcggttctccactccagagcaggcagctaagaaccgcatccagcaccctagcaatgtactgcacttcttcaatgctcccctcgaggtgactgaggagaacttctttgaggtgggtgttgtgaaaccgatctgtcatgacattggcttcagttgggctcatttgggacacagcaaaagaaagggagggggcagattcttctcgtcttggctgtggttagagcgagcagaggcatagagtgtgtcctggtgtagagctctgcacactgctttcacatcttggccaggcagtcatgattgtggggttgccacaaaggtgatgctttggaacctgggcagagacagcaagaggggcccatgggtgttggccagcaattcagcaacacctatctgctgtcatactgtgggtggccagagttgtggtttgaggaacagtctctcttcttgtgctgcctcatggaggtgtttctgtgagtcccaggctggtggggtacagtccacacaagaccacagttgtctggtctgctttaagtcttccatatggtttctgaattctcttactcgttactctcttgcaccagatctgcgatgaactgggagtgaagcggccaacctctgtcaaagtattttcaggcaaaagtgagtcagacaccacttccctccccgaccccactgcagctgtgggtggtggttgctgggaggagactaaccttgtgtggccctgcctaacccctctgctgtctcctgtttgattcaggcgagcggagctcctctgggctgctggagtgggactcgaagagcgatgccctggagaccttgggcttcctgaaccattaccagatgaaaaacccaagtgagtgtctgtgtgtcctgcagaatctccctagtggcttgatggcttgtctggctacatgccagagccatctttctaccctcaagataggaccctagagattgcctttgtcgcagacacaggcagatgggacttggtcaccaggagagcagtctgatgacatcctcctgggaggccagccaggctgccgggttccacccacctgatagcttgggagttgctctagcttaccgtgggtggtgatgagttagatcctggtaattgacctgcagaggagggcgtgtgggtgcagattgagatgactggtccgggagctccagagggttccagcctgactgacatctgtcctcttgtttccagatggcccgtacccatacactctgaagttgtgcttctccactgcacagcacgcctcctaattggatgctgggaaggaagactccatccgagcaggaaaatgttcctttcctttatgctgttggtttgtttggttttttttttttttttcttgtttttttttttctttttggttttgttttgatttatttttgcagttttttccttttaaatgctaggtcagtagaggcttaaccacaacagaaatgctggaactctggagggggggaggggaactggtatctcccaagattaaccttcactttttaaaatgactgtatgtgtgattttttttttttcctgttcatacatttgtgctgcccatgtatcttggcacatttcaataaaattgtttggaaaataaaactatttgctggggctccaagggtgggttgtctgctttcctctctcccacttagcattccaaagagtggtgggcccagccttaataagggcaggatgagcaatgagcaggaattagagaccagtgcattcttgaaggacactgcccaagctaggtcaggttctactagtgattgaaaggtggggatagttaaccctgttcttcaggtagtcctggccttacgtgtatcatatcaaatgcacaagctcatgcgagtacatggatacggttacactctggactggcagtggcgatgcacacctttaatccctgcactgaggcagaaatgggcagggctgaggtccaggacagccaggcatacacagagaaaacctttttgtcttgaaaacagtggagttggagcacaattgtgctgtcctgtagtccaagtgcttagctctctggagtaggagtagagcttg

SEQ ID NO: 32309 - DNA, 1879 bp, Mus musculus
ctttccccctccccacagggtgatgctgagttcaaccggatcatgagtgtggttgatcccaaccatagtggcctcgtgaccttccaagccttcattgacttcatgtcaagggagaccacagacacagacacagctgatcaggtcatcgcctccttcaaggtcctggcaggagacaaggtaagcacgacccacagaagcattggcggccggtagccaaaacttgagccagcactgggtactaggtcaagtgggtaagacacagtggctcagagtcctgtttatgcccctagaacttcatcactgctgaggaactgcggagagagctgccccccgaccaggccgagtactgcatcgcccgcatggcaccctaccaggggcctgatgctgctcctggcgcccttgactacaagtccttctccacagccctctatggggagagcgacctgtgaggcccttggccaccctgaacagagactcccttggcctcccggaggggctgaggagccctgcccccaccctgactctgtatctatgcaaagagctctttgtggtccttctagggggtcaggcagggaggggctaggcaggcctctctttctcagtcttgtaggggagggaggcttggcaatcagcatttctggtctgctaaatatatacgctgtgctgtgggttcttagccgattggaggggacaacggactcctgtgccccagagataccttcctatcccaggtcccctctgcccctgaggccccttcaaagcctctcacatctaggccaaagccccatgtgccttgtccaggaaccgcctgccctaagaagtccagcagagggcacccagctcccctggaccagattccagtggctcctcccaggagcagaggacctgccatagcccttctctgcctcaggagtggctgcggggcaatcagccccagcccacctggcctctgagtctcagattttctaaggaccaaaaccaacaaaacacaaagaatggaacagaaacaaacaaaaaaatcatttaaaaaaaaaaaaaggaaaaaaaaaacttaaaaaaaaaaagaaaactttaaaaacttaagaccttccagagaattactatttactttattaacttacggatttattatataaatatatatccatctagctgcatatctctgccacctctctcactctcataatgaagacatagctgattcaatgccctccccagtccctcctgattttcccctcgtggcggtgggcagaggtctctggggaccttctgaggtggaggcaggctgctggcctgcctgcctggtcgttaatgggtttctctccactcgcccccttgagtttattctgattgatttttattttcttggtttctggataaaccaccctctggggatgggagaataaaacatgtaatatttttaagaaggactctggtgtcatcttctccctgcatctctgttcatgccccaaggagctggcagtgcccaccagcccagtgcctgtgtgggggttgtgcccctctctaagcagggactgacatgaagaggcttcaaaaggaagggtggcagttctgtttgggatggctccagctcgtaatcccagcacttgtgaggccggccagggttacatagccaccacctttgtgacagtgagtcgggcagcagggtgacctccctcagcttcaaacctatgagaaggtagccacctccgaccactgaagagaaaagaaagatacccttgaggcagaggccctgggatggtgctagagccacactgtccctcgggccagctcacctgtttgtgggtcaggcagacgaccccctcgccgccatccaggtgttggcagcagtggcctgtgtgggagaggccagggtgag

SEQ ID NO: 32310 - DNA, 2297 bp, Mus musculus
tttcttctgacctacacacacagacactaaagtaaataaatgtagaattttagaaaagaacgcactatcccagggactaaagttcaggtctcaggacccacatctgccagctcattgcctgggaccccagttccaataggtccccttccgacctccatgagtacacggggtcaggtggctcagtaagtgaagtatttgttgtgcaagcatgaggatgcatttgtatccctagagcaaatgtagaaatctgcatggtggcacattgcctgtactctcagcctaggtgaggccgggacaagaggatcccatgatgtccaaggtcagggagagaccttgtcacaataaggtggagagggtaggcaccacacaagcctgacaacctgagttcattctcctgcgcccacaaaaagctggatcccctgtaaccctgacccctctaactccccaggagctcttaggccatgtgccctgaaatatgaagcccagaaaccataacactgaaagttgtcctctcctctccacaacacactagtcataataaagtaactatgaggtggggggtgggggtgcacaccttcagtcccagtcctcagagtgtgagggaaggaggactcttgagttccaggccagccagggttttccagtgaggctccgtctaaatggaaaggggaggtagcatcactgaggcagacgctgacatcggtctccaccctccctgagtgtgcttagccaacacagtagcatgcctgctccagtctgtcacctctaccccagggcctgagctccctggggtggagtctgtgcctaccacctgctgggtctcatctctgtctactccacagcgagctggactactatgactcccacaacgtcaacacacggtgccagaagatctgcgaccagtgggataacctgggctctctgacacacagtcgcagggaagccttggaggtgaggaggggtggctcaccaggagcctgatgccccttagtgatgttggcgacttctaggagggggtctttagaggccctcaggtatcgctcaccagctgacctgccttccctgtccccatacctctctgcacactacagaaaacagagaaacagctagagaccatcgaccagctacatttggagtatgccaagcgggctgcacccttcaacaactggatggagagtgccatggaggacctgcaggacatgttcatcgtccacaccatcgaggagatcgaggtccgccccaccacaccctcgagggggtgaccccaccctgcccccagaaaggcaggctgcattcttcactcccattcttccttctagggcctgatctcagcccatgaccagttcaagtccaccctgccagatgctgacagggagcgtgaggccatcctggccatccacaaggaggcccagaggatcgctgagagcaatcacatcaagctgtcgggcagcaatccctacaccactgttaccccccagatcatcaactccaagtgggagaaggtgggccaggctctctgacatgcaagggctgcactgtccaagtggggaagctgtcacctgacttgtgctgtggcacatcccacaggtgcagcagctggtgccaaagagggaccatgcactcctggaggagcagagcaagcagcaatccaatgagcaccttcgccgacagttcgccagccaagccaatatggtggggccgtggatccagaccaagatggaggtaaggctgccccaccccaaacactgaacccaggctatctgtcagctgagagagtcctctggattctcgagtcctagaggtccccatggtccctgtggccttggcagcagattccatagccttggtagatctgatctcagctcttaactggtcagcaccccagttggcctcataggactgcgctgatggaaatggtaatattaagctgatggaagcctggctaaagattggctagagctgattggaccttgactgtccaatctcggtccagtgctgacttgccgtccactcctgtgacatctctggtggtagcattcctacaagaaatgggttttcctcaccactctgtgttagacccctgtgggggctgtagtatatctatgaggacacccctgacaggcatgggatagtgtgtaaggcagccatagtgattctacctgccccactgctcatgtgctcagtgtgccaagtagtggacagccatgggcacggggattctgccaacagccagaggccttgccctccttttgttctttattttcttgtttctaagtagcaaagtagtgttttgtcat

SEQ ID NO: 32311 - DNA, 1159 bp, Mus musculus
tggaggcctgactgccatcctggctggcatttccctcagtaagtagcctgtcgtcccttaacttactagtaggctgcttgggcttttgctctgggcatgtaattagcccggctccaggactaataacagtgtttctcccttccttcaaagggtttggacagccccacccactgtgccaagaaagcgggtggggcgacaagactgggttaggaccaccacccaggagaactggctctaaaaagctggcgcaggcacagctcctgggcccagactccaggcttgtccctttcctgatccccataggcctggctaaaagcccaaggcttctctcagtcaccatgtccacaaatgggtgtctgtaacttttcggccttggtatcaacccttctatcctggttctcttaccagtaagagatactatttagagcatagtagttacactgtgatatctgtctcaggcccgtaaacaccaagtatcagtaagtctgtacagaactgcacaaaacataaatgggcttggagtttccccaagggcaaggaggaaggttccagtactaggctccatcctctgcggtaacaaatgtccattctgctgcacctcggcctgtcagacagctctttgactgttacggtgcctctgccacacctgtagggaaggaggccatgctgaagcaacgggactacgagacagccaccctgtcagacatcaaagctctgatccgaaaacatgaggcctttgaaagtgacctggctgcacaccaggaccgagtggagcagattgctgcaattgctcaggagctcaagtacgtgtgcccctatggcatcatcagcggcgagcttggttctgtccccagctctcaaccctggctcctcctaaacaccgggagagccttacagaatgaaggcttctgcccatgctgtcccagcaccaacaggcagaagggacctaggttctccagcacaggcatgacctcagattctaagggtgcctgtctccccagcctgccaccctgtgtggggagtgctgtacagtgagcctgttgttctgcctgctcctgtccctcctgctcagaatacagtcactgtaagggtttccaggcagccagtgtccctctcttcccctgcccagtcacataaatttgtgcacacagttagtaca

SEQ ID NO: 32312 - DNA, 1099 bp, Mus musculus
atccaagtgaggcaaacataggtaggcctttaccattgtgtcaggtacggtcaaggcctgagcaagagtctcaaggcctgtgagttcaggagtcacagtcccctgacagtatggaaagggaaccagtatgtcttctgggaagggacaatggacttggaccaccctcttcagtctgggcaaagaagactttgagcagaggcataagcagaaagtaggggatagcacagtgcttccaggagtggcccacgttcacagacctctgctgtggggcccccacggaaatcatgggaaatttgggtttgggagcaaggcagccctgagatcagggcttttgtaactctacatcccacttcccgtaagctgaagaggcagtctttcctggcagcgccctgagcacctccacagtagctaacgtggcttcctacgggcccacagcttctagagtggattcggcgcaccatcccctggctggaggaccgggtgcctcagaagaccatccaggaaatgcagcagaagctggaggacttccgagactataggcgtgtgcacaagccgcccaaggtgcaggagaagtgtcagctggagatcaacttcaacacactgcagaccaagctgcggctcagcaaccggcctgccttcatgccctccgagggcaggatggtctccgtgagttgactgccacccacagtttgggacccacagtagggcataaagcttggctgccatcgttgtaaatcagcctttggggcagggatggtgatgagtgcttcacatttcctgactatttcttctgaggttttacactcaaaattctctgcaccactacccagccataccacagtttgtgtggaccatttgaatagtactccaggctaacaagacacctttcaaggtctactcagcagcgtccatccattgatttgcccacctgcccactcacactgagattcattcagttagcccaaaactatcaatgcaaaggatccgagttgagtccccaggatccatgtcaggcagctcacaaccacctgtaactcctgtcccggggggattaagagccattttctggcccctgtagatacccacacacatctctctc

SEQ ID NO: 32313 - DNA, 1179 bp, Mus musculus
catagagatccacctgcctctgcctcttcaccatacccagccctttaaagttagctcctttaaagggccaggtgcacaagacaaatcacactacactgcagggtcactaggaggcagcattgtctagtggtgcagaagactgtgtgggtagtggcaagataattggaaaggaagtgactagtccttagtaggtgatagtatagccagtggactgacagaagacccccttaaccctgagtgcaggctgctcacataaagatggaattttaccatagtagtagtggatgacaagtttgaggtgagaaccagaggcctgggacagtctttggaggagtggttctgtgagctggatcattactaagctggccaatgcagaaaaggcctttgtggctaggaagctttgttcagaggcttagggacagtgccagcaggcttctagaatagtgctatctagactagagcatgctcctagtaaggtaggctgtgccttggggtgaggcaaagagttgggctctcaccaacagccttctttctctttccctttgttctgtgtgcagagattgtggatggcaatgcaaagatgaccctgggaatgatctggaccatcatcctcagatttgccatccaggacatctctgtggaaggtaagacatggcagagagtacctcttcactctcctcggatggaatgaattaagaacaagctctggttttgtctccattctcctccatgcttgcttggagcccatctttcccaccgcccttgctggccccggattacccccgagcagcagtgctctgtggcctctatttcatacaccagcccatactctctccttgaagtagaacagaacgactggcaccattgtacatcttagtgaccgagctacagagcaaactcaggatggagttgggcctggctttttcgttttcacctccacatacctgttttgggtgtgcattctgacgtgcataggccatccaagaacgttgccctttccacttagccactgtgtgtatgcatcacaaaatgagaaaagccatgaggccagtatctggaggggctcctgggtgttggatcaccatggtgaccaagatagatatattcatgtctccataggacttccaatgtgaagacagccaggttacccagaggagaagatggtacttgttggaaaca

SEQ ID NO: 32314 - DNA, 1168 bp, Mus musculus
ccctgtccactgttctgagggtagctgtgtgctctgccccagagtgctcattgctagctagggccaggcttagaaagtgtgtgggcagtacaagctagggggagagtctgccctgtcgctcagccagagcaaacagtttcaccgttttttaatggagccagctgtgagtcagaggtttcagtcgctccctgctggttcctcctagtcctgtaattactgactatagaatctgattttggcttttcttttttaaaattctccccagacaccattctattgttggtgtaggttttacatccttggagtctgagatagaccagatatgtgtgcattggtggggtgactcccaagcctagtgtgtacctcatagcatctctagaccagggatcagccaacacctcttcataggaggctggggcaagattggataattccgagttcctccagttgcctcttggccagggtttctggtcaaaagtctctcctaggttgattggattctttcactctcacttagtgctctctgagcccctgctgtgtgccagcctgaggggagtcattctggggcaacaccagttgaccttggactcaggcaaaagattgatgatgcaggtatggactcctgcattcccctaaggctctaagccctcttgagacagaccctctaaccccaggctcagaggacaggacaccagtgaaagcagtgtttgcaagacacctgtacttggcttctgtatcccctcagggtgagaccacagattgctaaactcatttttctataccctgggctttatgggcccaccctccaggtcagtctgcttctgtaagagaatgctgtgaactggaatcaaaatattccaaaaaaggaaaaggtcactgagtttcagttgcaaaggtgaaaccagtccagttaacagtcctcttgtagttggagagcccagtatctgggtgctgtgagtaccagcaaaaacatgctacctcctgccatctggaggaggaggaatgggatggcttgctctggtccccatgccctgatgtcctggtttgtagcacttgcgcgatatgggaagttccctgagtggcctggaacagaggtatggtgcctgcttagaccacggcccatcaacaccgtctgatttcagccccctcttgtctggatgagcaaggc

SEQ ID NO: 32315 - DNA, 1199 bp, Mus musculus
catcagatctcatggttgtgagccaccacgtggttgctgggaattgaactcagaacctctggaagagcagtcagtgctcttattcgctgatctccccagccctaaataaatgttttgtcttgtttttatttttaaaataaataaatagtattgttaagaaactaagggaacctgtgcctggaggcacaaattctatagtcctggtacttggaagagagtcgggagtattaggagtttacgtcatgatgagtccaagccagccagggctgcatgaaatcctgtctcaaaaaaaaaaaaaaaccaaagccaaaaccaaaaacctacagaaaaacccctatgtgactaggagaaagaggctagtgcgccccctggtggccaagtggagactgagccccagattgctggctttgccctagaggatctcttcttccgagtcctgctgctgtccaggcaggagttggcctagagcagttagcaaagggggcttggcctgctcagccccgattcctctgcctccaaagcccctagtgttagggttcaggccaccaacacctccgcccatgtcacctgcagacaaccagctgaaggtgtggatgagcaagtacggctggagcgctgacgagtcagggcaggtcttcatctgcagccaggaagagagcattaagcccaagaacatcgtggagaagattgactttgacagtaagtggcctggggccgcagactgtagggaagacagtgtcctggtgggagagcagtgctgggtgtgcaaagcacgaggcagagcctgtattcctggactgggaactgtctgccagattccaggttgctggcccagggagagactgtgagggatgctgagtagtctcccctgctggatgtgagccgtccatgttctctctctctctccccccctccctcccaccccccgccctggcattcctctagaccagactggcctcaaactctacctacctctccctcccgagtgctggaattaaagacttgtccactcagggctgtggctctcgatgagtcatttggtcccaccataaggtagttgctcttgttctaacttggaaactattagaactggcacagtgcctgcctcctcgtgtagagagagccaggcgcagagtgaaaggcagtgacagccgttcctgtcacattttgaataaacagtcttatcccaaaagaggaaa

SEQ ID NO: 32316 - DNA, 1638 bp, Mus musculus
ttgcccagctctcccgctcttgtttaagggagttttgctgagagtaaaaacctggaggggtgaaggatgagctgcaaagaggaaacttccaggcacaaagccgcacaaagggcctgaggtaggcaggtctagtgaggagacccttgtggctgaaggagatggaggcaatggaaagtgtacagatgacctgcctgggtgtgtgtgtacacatttaccttctatgatttggttgttggacttcccagccaggcagaggcaggtggatttttttagttcaaggccaacctggtttttcagggccagttccaggactgctagggctacacagagaaaccttgtcttaaaccagagacaggggcgggcaggtgggcaggcaggcaggcaggcagaggcacgatctcctgtacccggattgctcacacctgctgactcagaacttttgatccctcctgtctcagcctccacaacgtcagcactgactggttaatgctgagtgatggtgctagtgttaatactggggcatcctttcttccacagcaagccctggatgagaacatggaccttctggaaggcataactggctttgaagactctgtccgaaaatgtgagtcctgggagcctgggttcccgagggcttaaggcagtgtagcagggacttgggagaagggggattaaaaatgaggcagactgggccttgtgcaatagccaattttatttagagcataagtttatattctgaaagttaagcatggtcatacgagcacagttcccaaagttcaagccatatacagccccgaggataaagctgcgcttggaagtggttttttaataacagaagcagctgtgtgtaatctggagcaagcccttgctgtttactacacctgcgggggacacagaagagccctcagaattctcacacagctccgttcctggattacgtgccagcggcctcttgactgtctttgttttgattctcacagttatctgccacgtggtgggcatcacgtaccagcacatcgaccgctggctgctggccgagatgctcggagacctgactggtgaggcctggtgctgtttctgtcagtctgagaggaaaaggtggttggggcatggggcctcaggcagctcaggggaacccaccgcacctttccgaggttgttacctgccccagagtgtgggtgagggtttggtataggatgttgccttctgtatctccatgagttcaaggccaaccagggctatgtagtgagacactgcctcgaaaacaccctgaccaggtgtagtgctgtcctcctggaattccagttataggaagctggagcaagaagattgtctggaattccaggccagcctgggctatagcatgagcctctgcaccaaccagttaacagatgcacatgtcagacagtggtcctgatgctgaccttggcagtgaataggagagctcaggcccttttcatggatggagcgaagtggaagcatcagcaccttgtagttggtgttgccaagggtagcagggctgctttggagggatggcattcggcctctagaggaggccagtgtggccctcctgcagcaggggcctgcctgtcatgtgtgctgtgcctgcgtgccctggaagcatacacatctctggag

SEQ ID NO: 32317 - DNA, 1194 bp, Mus musculus
ctctgccgaagtcttgatctccagcgcgcactccatgagtaggagcttgtggggagccatataggatcaggggccttcactgtgggtaaatagtgagatgcggtcagagatgaggccgcaccctgaactcttttctctctccttctagaactacttgtcgaggaatttctacacactgcggttcctggccctcttcctggcctttgccatcaacttcatcttactgttttataaggtgtctatcctgtggccacaggccatggagcagggagaagggagggtggtgggggacattccagatttagccttcttaggagagttcagcctagacagctggtgctgatttggggtgccctgtggggctgagtggaggtggctgggcccatatgggacaggtgtctgagtgcattcaagagttagtgcaagacacagagctgcttccctgccagcctcggcacctgccgggcagtacccaggtgtggaagtcccctcagagcacccagcggtgcagcgacttcagagcggtgtgtggaggagaaagtgggcagctgatggaacagaggtagagagggcgaggagccggacctcctgaagctacagggagattcatgtccttgccaggggcttagataaggacacagaggctggctagacacagatggcggtgagccaatgtttaatctctccctgcctctgcctcctggtcctcaaaatgggatcaaaaccacatttgcatctgagacttctgaagacacacaggcctctgcacgttctaggccagctaggcctaccacagagtcagactttatctcaaacagtgagatgaatacaggagaatcaagagtttgaggtcattcttgcctatacagagagtttgaagtccgtctgggccacatgaggcccagttattcattcataaataaataaataaataaataaataaataaacatgaggcccagtcctaaggaaagaaagaaaaaaagaaagaaagaaagaaagaaagaaaggaagaaagaaagaaagcattgcaacagttcctggatctagaaagtgcccttgaggcctggtgtggtggcgtatatccatagtctccatacttgggaagctgtcacagaagataaatagtttgaggctagcctgggctatatagaaaatctcaggcaagcctattctatcaagatactatgttaaaa

SEQ ID NO: 32318 - DNA, 1181 bp, Mus musculus
ttggggctggtttacaggttcagaggttcagtccattatcatcaaggtgggagcatggaagcatctaggcaggcatggtacaggcagacttgagaattctacttcttcatctgaaggctgctagtggaagactcacttccaggcagctaggatgagggtcttaagcccacacacacagtgacacacctactccaacacctcctaatagtgccactccctgggccgagcatacacaaaccatcacgaggcctcttctcatcctggcccatattcctttcccagggacggatgccccagctgtggtcaactgtcttcacatattggcacgctctctagatgccaggtacggctttggggtacgccacccaacccagtccttctatactctctgagtgacattcgtctcaggaatggaaggagaggagcaaggaaggaggggagggaaggagcgggggaccctctgcttctacagctctgcaccccacctcctagaacggtgatgaaatcgggccctgagatcgtaaaggcgggtctgcgctccttcttcgagagtgcctccgaggacattgagaagatggtggagaacctgcggctaggaaaggtgtcgcaggcgcgcacgcaggtgaagggcgtgggccagaacctcacctacaccacggtggctctgctgcccgtcctcaccaccctcttccagcacatcgcccagcaccagttcggagacgatgtcatccgtaaggactcctgacactgagggcaaggggcacggggtggggtgtcagcttgaccggcactgtccatcctgaggttcgtggcagagtcacctggtgttggagcagatgctttcgtgcagtagccaaagcacagttagtaaactgtaggggaccgaaggtgttaactaaaatgtgaattcagaaaccacagtggtggtgcatacctgtaagtaatcccagcactcaagaagctgaggcaggaggatggctgcaagtttgaggctagcctggcctataatagtgagttccaggaccgcctgggctacagagtgaggtcttgacttacaaaaagcataagaaaagcaagggctgagtggtataacactgggctggtatccagcagtgaagggctggaagaaagactcactgagtagctctcctacagagttcacaatgaaaggctaaaagcac

SEQ ID NO: 32319 - DNA, 1240 bp, Mus musculus
gattgggatacgtttctctttgtgtgtgaatcccgtgtggccatgtgcgatttgtttgtattgggtgtttggctacgttcatgtgtggatgggtcccggtatgttttggtttgtttttatattgtctgtgaacacttcttaacccgagacataatcaagttttaggtagctgcttccctgccagcaccctgccccgcccccggatccagaggggtgggagaagatgggggaggtgaaggtggacctggccggcttgccctttgcggagcagtgggaacgggcagccgcgggagggtgctgggcctccctgcactagcccttgctgacagccgcccgcccgctgctcgcccgcccccacagccttggcgaggacttctaccgggaggccatcgagcactgtcgcagctacaacgcgcgcctgtgtgccgagcgcagcctgcgcctgcctttcctcgactcgcagaccggagtggcccagaacaactgctacatctggatggagaagacccaccgcgggcctggtactcgccgcgaggctggggtggggcggggcctgagtccggggacctcactttcacagcctctctcctccaggtttggccccgggacagatctacacttaccccgcccgctgttggaggaagaaacggagactcaacatcctggaggaccccaggctccggccctgcgagtacaagatcggtgggtggagctgtgtcccctgcgcctgctgtggccccaatcaaggccttcagccctccctgctccccggctgaacttcgtctttattatcctgagtgtccctccagcagactatctgtccccggatgtcttgagttactttctttgagtgactgagttgccagctgtacctgctatgtgggtcatggcaagcaggtgtttggaggacatggtgtcatctatgtctagatgtatcaaggctgattgcatgtgcttcccagggagctgggatacacctgtgtctgactgtgtttctttctgtgggtgctgagggctgtctcactgtgtatttgtaagagttagcaacagttctccagctgtgggttgagaccatgcacaacatatttacatttatgatgtataactataaaaaaattacagttatgaagtagcaacgaaataattttctggctgggggggtcaacacaacatgaggaactatattaaatttagggtcacacttttaggaaggttgagagccactcagggcgtctacttg

SEQ ID NO: 32320 - DNA, 1207 bp, Mus musculus
ctgcttacatcaccctgacctaggcccggctctgcttccccaggatctttgggtggtgctatctcctgcctcttggagctcctggcgctccccacccggtgtccccagtggaagggatggggtgaagcccagagtgggggggggcaaggtgttctccctctgcaagtggaatgttaccctgtgggtggctgggtccaacagggtccctcctgtcccccctcttcatcccttgacaaatgggcaccaggcttctgctctcctcaaagccatacccccgcctttgggcgggcatagaggggtagtggatgctagccagcagcacggaaagagcctttttctaaagaaaaagacaaaacgtggaaaaaaaagggaaaaaaattaatatatacaaagagtcctataaagcctggctgggtggagaggcactgttgagtgtctgctggggacctgactttaccagtttcctgaatggcgcctccccacctcatttctggagttgcaatggtctcaactcccatctgaggtgggtaccaccccttcctcagtacccaccgtggatactgcatgtgaactatggttttgaactcttcctcctcctccttgagagccccgccctgcgcccgcgtggtgcctgcctgccaggcctggggcgtgcagccggggaggcgggtggggtgaggcaggcaggcagccagccccctgcagtgagaagcacagattgcaatggactcagttttttttttttttttttttttttttcctttctcccttcccacccctttccttccctacccagccaggctgggctgcctcctgcccccctcgctagccatttgggggtggcaagggggtgtggttgtttctcgtggttgtgtgtgtttgttgttcgggtttttaaaaggggaaattgagactgcaagtgggggaggtggagggtctgggggagtctgcccccaatccaggagtaccccccttgccaccaagtctcctttattgcctgcctctgctgtgaattaacttgttctgtgtattaaactgggcctgacccctctgcccacaactgcttccatctctaacctcttttggggtgtcaccaacatgggaagccaaggggcctcactggggtagaagccactgtggctggcccccacctctttgcccctacaccatgcctccctgtggctttgtcccagctcctccctgtctt

SEQ ID NO: 32321 - DNA, 1942 bp, Mus musculus
ctctatccccagtgaactggctccaggtagcatggacatcaccctccgagtcccccttccacacagcagccaggagcactttcatagagtttaaattattttcctggggccccagaatggacaggacccattagcacccagatccactcctttgagaaaccccatttgtacagctaggactgtttatatgatcttttttatcagcttctctccaagcagccgcaggcccctctgccttggagctactgatctggccagccatgggatcctcctctaggacaactaggccattgccccctacgccagcggctttgaggaacctgaggacagggctgaggcagagccttcaccccctgtatggttgtctttccttttacaagtctccctggccacactccatcccccagtggacaccagccacgctcactgtgctccctggggagcactcacagtgcagcccccagcccccagagattctccaaaggcaataaggggcagctcagtggggcacgctgctcacccaggaaacacaaatccccctccccctttttttccttctttaaaaacaaacagaaaagaatatatatatatatatatatatttattttttcatgtagagttgtgccggaacacgtttgaatggccacagtctgtggatttccccaaaccctgtgggctggaggtcaatgtgaggactcagagggacgtgggggcagcaggcggcacagttggcagcgtagattggacccagagccataacgagatggcccagccctcagaccaggacccatcacttctctttgggcccactaccacacacaacaggcactctgctcccgatgggccaggctgaagggcagggcttgaggaaagggtatccagagctccctgtgacctgcctctgacccccggggaacccctggttgtgagggagcagcctgccatgccctccactcaccatggaatgatggtggcaaaccagaccacccagtgtcctgaaccctggccagctactgtgatgtctgtctcctgatcacctttctaaagggttctccagcccctcccccttcctctcctctcagaacccaacctggagccttcccccttccccccaaccccctcccttcatttctttctttaatgtgtcttctcatatcttcagaccattcgaatcatttgggggacctaatcatgtacattgacagttgtaaattttaatttttgcttttgttctattatttttgtaagaattcctgcaaaaaaaaattatttaatttgaggttgatactctgtgtaatgactggagatagcaggcttttttttccaggttgatttattccatttggatttttgttttaatcattctttattgtcttttcctccccctcttcccatccctgtcttgagatttctggcatgtttcaggaggtttcaaaggaaataaacgtttcatagaaatggctggtgtgttctcctgcagctgcctggaagccagtgctggctccctcctcctaagctcatatcacactcctgctgcacagcatacatttaccagccagccgctttcctaggcacctgaccatcaggatgtaaaatgtgctgaagttaaaacaagctaggtctgcaaggcgagcatggtaacccgagcccttaatcccagcgctcaggaggcaaggtgggaggagctctgtgttctaggccagcttgttggaagtaagttctaggagagttagggctgcactgtgaacctgtcttcaaagggaatgggggatgggcccctttcgccaggtgtgatggttcacacttgtaatcccagcgctctgaggcaggaggatcgccgagagttcaaggccagttgtgtttgtacacatcgggaatctcagaggtgaacgggtgtcaggagtgcaaggtcttccttagctacatagcaagtttgaggcca

SEQ ID NO: 32322 - DNA, 1130 bp, Mus musculus
catcgtcatggacaacctggggccagagcaggagcgcgacacgggggtgcgtgcgtgcggctggcggcccagggcaagcggggagggggcgatgctctctgccgtgcctccagcctttgctgtctgccggccctgttgtgggtggggaatgcaaggagggacagagccaggactcaagccagctggggaaggccctggtgaccatgagtctcatgtttttctcctagagcccaaaaagaaaatggtcctaccccctcttcagatcccagccacaagcagaaagagctcccagaaactacttaggctctcattccccaaagacagtaaggccgaagcggcaggctctatggtccctccattgccctgcctgcccctcatcgtcagtctggcagtctatggaaacctagacagctcttcactgggtattgtggcacacacctgtaacctgcaggagactgaaacaggagggtctcatgatctaggccagcctgggttacgtggtttcctgagaccatatctgaaaagaaaaggcatgtgcaaatgcaatgatgaaatgcttatataagcttactgttggaggataggctcagaagccatgggcataggtcaggggttgggagcccttggggaaatggatgctgggtggacaagaacttgccaaaaatcccctgaggcccaggaccacagcccagcgtgccaatcccttgtcctaccctgtcttgacagcagtccccccagaagagcctgcagcggacactgtcagatgagagcctgtgtagcgggcgccgggaacccagctttgccagccctgccagcctggagcccggcctgcccagcgatgtgctcttcaccagcacctgcaccttcccctccagcacactgcctgcccgccgccagcaccagcacgcccacccacccagcggggcacccagcaccactccagccactggcaatggcttcccagagaagaaatgtgagcctggacatctgggggctgcaggtccccctggggctaggaagttgggcacactgcaggtgggaggcacctggtggtcatatgtggccaggccttgtgagggagggaagggtgcacaagtgctccagggaacctcaaggagtgaatattgctg

SEQ ID NO: 32323 - DNA, 1179 bp, Mus musculus
acctacagaatggacagctcccctccagcaccccggcttcctcaggatccagagccttccatcgactgtccaggagaaggtccaaagatgtagaattccaggatgggtggccccggtcccctggccgggcctttctccctctacgacatcggagcagcagcgagatcaccctcagtgagtgtgatgtagaggaaccaggagacccacgggggacccggcacccaggggtgctgcccctcttccgagagtatggcagcacgtcctccatcgacgtgcagggtgtaccagagcagagtttctttgacatcctcaatgagttccgcagcgagcagccagaggctcggggctcccagaacctcagggagctcctgcaggtggatcctggcgccctctcagggggcagctgtggcaccaagggagacccccgcaatggccagcccaccaaagatagtctccagagtctacagcctctcaaagagaaggagaagagccggaagaaacccgtgcggggcctgggcagtggggacactgtagactcatccatcttcaggaaactgaggagcagtaagcccgagggggaagtggggcggcctctgggagagactgaggaaagtcgaagccccccagaagccagcagaccatgggtctgccagaagagctttgcccattttgatgtgcagagcatgctgtttgacctcaacgaggcagctgccaacagggtgtccgtggcccagaggcgcaacaccaccactggggcctcagcggcctcagcagcctcagccatggtgacgctcacagcatcacgagcccacagcctggggactctggacccagccttcaccagcacggaggatttgaactgcaaagagaacctggagcaggacctgggggacgacaatagcaatgacctgctacttagctgcccgcacttccgcaatgagatcggcggggagcgagagcgcaatgtcagcttctcccgggcctccgtgggttccccggggggcagcagcgaggcccacatggctgagcccaccctgagcacccaccgtacaaatgccagcatctcggtgctggaggtgcccaaggagcagcagaggacacagagccggcccaggcagtacagcatcgagcacgtggacctgggcgctcgctactaccaggactactttgtgggcaaag

SEQ ID NO: 32324 - DNA, 1244 bp, Mus musculus
agccatccagagagagactctgtctgccacccagagtccgtgaaaataggacactatttctcttggacactcttcctcgccgggcatgagagaagcactgcttaaaattatgacaagaaaatattttcccttccaggggtatgagagcagaaggcctgagcaagcaccgtggccttgttacaggatgagaaatggggccagatagatagtcccatggttaagaacatttgatgctcttgcagaggaccagagttgagtctccagcatccatgtcatgcagcttacaacacctgtaactccaacttcaggggatcatctgcgcatgcgtgcgcacacacacacacacacacacacacacacgctcatgctccacacgcacgtgcgcacctgtgtggtggtagggtgcagaatgaaagacttaggaggcctgtgtagtggcatactatgcagctataaaaataggctgaaacccgattggatggccttctgtgggcatggcatgccaccaagtataaaagtgggggggggaaagccgcttccttacttctcagctgggaagggcatgttgaacaatgaggcctgcgcaagctccagcctggctgtggctgggaactgctatctgcctcagaaagcaagtggagagttgtcttttgggaaggcagcgtggtcttctcccctgacacggcctcccacactgttggcagacattgctgggactagaggggtggggactgaagccacagagtctgggtcttcagtgtggtcagaagagaagactggttttaaccagaacactcttaggtgggtgtggttacccagaatccacctctgaaaactcagccctcgtgccaccagtcacagacgcagattcctttgtttgtatgtttttgttttactttgttttggttggggggtgggggggttgttttacccagggtctctctatgcagccctcatctagagcttgcccaggctagcctctaactacatatgatcgttattccttcacaaatgctgagattaaaagcatgtaccaccacttctggtttcctcggttataattatgtaacacctctttacccaagaaaagggaaaaatggaggaggatcaaggttttgtaaagattctagtgccattataccttggaatgctctgaatgtatggaaaaccgcagtgtagttaagttttagactacttgcccagaattccccagtgaggggctgggggcatggcccagtggtaga

SEQ ID NO: 32325 - DNA, 1177 bp, Mus musculus
ccgctgggttctagttttccttttcatatggacaccagttcatattggatcaggggcctgccctactcaggtgtgactcatgcttttattttatgtgtgtggctgttctgcctgtggaggtcagaagagcatgtatgatagtctggaactggagtgatagatggctgtggcctgccatgtaggtgctgggaatcaaacctgggtcctctggaatagcactgagagctcttaactgctgagacatctttccagccctttgtgctttaatttcttttcagtattattattacttttcttgtagtttgttttctgttctttgagacaagggttcactgtgtagccctggctgtcctaaaactgaatatttaaaccagactgggctgaacttacagagatcctcctgcctccatctctaaagacctcatgctaacttgcaaagagctctctctccagctacctagtttccgaatgaggtcacattctaaggaactgcaaagtgtaagacttataacaggaggggctgggggcgtggctcaatggtagagcccctgcctagaatcccccagtgagggctgaaggtggggctcagtggtagtatgcacagggctctcagttcctagtaccacacacacacaattaaaataactaaataaaacatttaatgtgagtgggtattacaaattaaaaccataacagaaaataataacaattagccagttgttgtcccgtatcaggtctgaggttctgataccttcaactttagtaggactcacagccctcattggcttgctgcttctgtttttggcccttccattctgttctccagaaacaaatgcagatccaggtgtggtggcacaccctgtcatcgtcctggcacttggaaggcaggaggacccactaatttaaagccagctgggttacatagcaagatactgtgtcaaaaacaaacataaaaccatgagtgaaggcgtggtttacacatgccccactcgtgagcccttcaggtctctcccatgtcttgccatcagaatcataaccaaactcatggcacaagaaagctgggagatgcctggctgaaccctgtaggtgccgcttcagttggcgctctgcgatgtcgtcgtaatacttcgttttgatctcttggcgggttctgatggcaaattggttgctctgtggt

SEQ ID NO: 32326 - DNA, 1201 bp, Mus musculus
aggctgaggcaggaaagacggtatcatcaccacggacagctcctggtgggcgggcagctcctgttgaggtggaaaggagatgtgccactgcagacaactcctgtgaaggctgccattttgacaggagccaccatttttgacagctccgaggttggggttggggtggggcatctcatcttgaccttaggatagaatggaaaggaggagccttccgcagctttgatagcttttgaggtgtgatgcttaggggctacagaaaggcctttaaaatgtgtggatactttacacaacaccagaaaattcatactagtaaaaaacgtttcaattgtaaaggatttgggaaggcttttattccgcttccatctttgctcaacaccagagaatccacactgataagaaacctcatataagtcattagcatgggaggtcctacagatatggctcaccccttaatgtacatcaaagaattggtgcgtctgtgaaaatctaagcatagagggaacacgaggaagctttgaatgtggcccaatttttttctttcatttcatgacttcatagaaatgcaacaaaaacttctggtgatgttatggcggcttcttgttacttcctcagactcgggccgatcggcagagtgatgtcagacgatacagtggagttttgctaagacagactcatgtgttgttttgctgaggcaagacacatgggtggacatgtggtgtttggaggtagtataaataggactagacagactgtgtggagcttgcatagctagcttggcaacactttattggtcttgagattttgctgatcttcactttgttgagagcagcatggcagagaacttctagtgtccctgctggtcctggtgcagattcagcagagacctggctgtctctgctgtgttgtgccaccgctgctgattagtgtttgctatcctgatgcaactgaactggactgttggtatatatcctgtcaatgcagattggagttgctccaaagaactatttataaacaggtccatttcccctgaatccaaataactttccttttctactacctatggtgggtggtgggttttaagacaggttaaagaatttaagaaaccttattaaaagtaggcttttttttttttttttgaaaaatggaatccagcaggtgatgcccaacgtgacttaggcataatgggtaactctgcttctaa

SEQ ID NO: 32327 - DNA, 1112 bp, Mus musculus
attggaacaaactcataatctgtcaccgtcaccaggtgactctcagtcatgtgaaaagtgcagtctgaaaatacagcttgcttcagtgtggaagaacaacagctctacacactaaagcctggcgtggttcatttgaatagatgttgtcaaattacacaccttcccccccccccccaaagagcaataaatcttagagttgacagcagaattacacattatatacaataatcaatgaatttaaagaagtttctaaaaaccatcaataaaatggataaccggactttaggagctttttccaaatctgatacatagactaggttttcgggggcctagagggacatttgaaagacacaagcacaaccgtcagagctaatgggaagtagagcattcccaggcagaagtatgtttgttcggttggctttggtgggttttattttaagacatggtctttcttaaacttgtggcaatcctcctgcttgaacctactgagtgctgggattagaagtgtgagctaccacactggcttgaacttggagccttgagcctgctcagcttggctctgccctagagccttttattcccggctctctttgttctgaggcaggcagggtcttggctaaatggcctaggcaggctttggtgcccttacattaagcctctcaaatagctggggctatagacctctgttaccaggtacagacagaaagtttgactgctataaaataaggtattctccagatttcaaaatcaggcagcaagcaaaggcagtgaacatggaatttgccagtgggaaattgtgtggtagaatggtcaacataaattgtatcagtaactccaataaccttttgaataggctgattgctgtagttgaaaggaagtgttttttaattttttaaacagattttttttcttcaaaggtttatttattatatgtaagcacactgtagctgtcttcagacacaccagaagaaggcatccgatttcattacagatgtttgtgagccaccatgtggtttctgggatgtgaactcaggacctcctgaagagcagtcagtgctcttaaccgctgaaccatctctccagcccccccccccccgaaaggaagctttttt

SEQ ID NO: 32328 - DNA, 1221 bp, Mus musculus
aaagattacatttggccaaatcccttgcagtactatctggttcccgacatggatgatgaagaaggagaggcagaagatgatgatgacgacgaggatgaggaggaggggttggaagatattgatgaagaaggagatgaggatgaaggtgaagaagatgatgatgagatgaaggggaggaaggagaggaggacgaaggtgaggatgattagcacagaagactgacagattccaaccttctttttttattttctttttattttttaattttctccagtccctgggagcaagttgcagtcctttcctccctgtccctctgtgctcagtcaccctgttttgaggtctcaacatcatggttctcaattaatttggggggaaatatcttgagcaaaatacaacaggaaaagaatctccgtttctgttctaaattcattttttatcctttcttgtctaaatttgtggattccacaccaccatgctctgtgggaaaaaagaaaagccctccagttcccttggctctgctggagggcgctaggcccctgtgtagtagtttatagaattttagcttttcttcttttctctgtatattgggctcagagattacactgcgtctctatgtgaatacagacagttagcatttaccaacatgtatctgtctactttcttttgtttaataaaaagaaaaaaaatgactgtcttagttagggttttcatttctgtgaagagacaccatgatcaaggcaactcttagaaaactcttataagaacaacatttaattggggctggcttacagattcagaggagcatgacaacttccagccaggcatggtccagaggagttgagagttctacatcatgatctgactgcatccaggagaaaacccacccctatagtgatacacttcctccaataaggccacacatactccaacaaggccacagctcctgatactgccacaccctgggccaaacatattcaaaccaccacacttggtcttatatagaccaggctggccttgaactcctgcttgttaaggcctaggtaaaatgttaagacccttggtaactgttacctggctagcctgtcattttctgcttttactaatattataaggaaactttcacatatgtttctgctgttattaggaaactttctaattctaaagctgattacatattctgttatctactgtgcccttggaaaccaatcacaatagaagcca

SEQ ID NO: 32329 - DNA, 1135 bp, Mus musculus
tttttacagggtatctatctgtatatgttgtttcataaaagaaactgggacactatatagaccgcagtgattcccagaatcacctgtataatgcaaggttttatatgcagaagatgatacaggaaaaaccgtgttctcacttcctggcttaattctttgctatctgtactatgtcagagcctttaacctgtttgcttggcagtgcccgttacaaagaactccttttcatctcccctccatttaagggatcatatccttaatttctatagctgatacttatgtttgtttgttttcagaaatcagggatgtttaatgatgttgcttttgacttctctaaggtaagagtggaaacacttcgcctctgctcagagggacttatacagagattatctttgtaaagtatagtaactcagtgtcagttgggaattcatttctgctctttgtatctcaatgcctacattttaaaaatatttattttatgtgtatgagtgtttttcctacacatatgtatgtatgtgtacagcatgcatgtagtgcctgtggagcccagaggggcatcagatcccctggagctggagttacagagggttgtgaaccaccatgtgggtgcaagagcagccaatgctattaacctctgaactctctctctttaaatttctatgttttaagttattcaaaagcatcagttgagcttagtgtctatcttagcactccagaggttgaagcaggaggattgcaagctccacaccagcctggactacataagatgagagaaagaaaatggagaggctgcctgctgggtttagacccgcactggccagtctcttgttcctacactgtagccctcagcatctcatcactctcatttaaaagctatcaaaaatttaagcagggatagcaaatcacaatctaatcaggtaataaaaatatcaaaactgtgacctccactatattcattttctgatttgttagagtctgagttagttattctggtgtatgtttggacatctttaattttaacaactatatgacatgatatttattccccactagagtttgacaatcactgggcttttttaaatcactattagaaattattaggaagagatttgtaatagatataagcatgggggtt

SEQ ID NO: 32330 - DNA, 1101 bp, Mus musculus
ttacagaactgatttgtcacagagtcccaaaacttacatgtttcactatctctaacttcaactcaagaatattacttatacatgataactaagcactcaagataaacctaggaaatgaaaaagacttgaatgtgtagttttgtgaactaatctgaaagtacaaaatagacaacttagaataaaaaacaacacatgatcttgtatcagagatcggtgttcgacccagttttcatctctttttcatcataaaacctaggcaagacaaaaacctcccatacacaaaaatttagtctccattgcagatcaacaagacgaaaatggtgtctgtatgactagaacactttaaaaaatccatcctctctgcttctttcccttcttaacactgtagacagtgaggcagagcacagacggcctcgtgaggggttgggagtggtctctgggtgttactgatggctgagtctgcaagcctgttgatttgtaaacagtcatggtaactctgctttgcctctgtgctttacttaaaagtaaagtagccctcagactggttgatgctctccgagatcactgaataataaaacttcccttaaggacaagaaagagtgttttatctggaaatggatgctgtagataacagaatctcaaggcttgaatgtaaggctctgggggctgggggtttactgagcatgaactacgaaactgaataatcttatttttcaggcagaacatttgatcagcctgcatccctgtgtctcctacagcagacctagtgccaatctaggctgcaatgttagagaaaatggtaggaatgatgcagaacatacacgttcaatagttctcattgcttcaagaaatgtctgggccgggcagtggtggcgcactcctttaatcccagcacttggaaggcagaggcaggcggatttctgagttcgaggccagtctggtctacacagtgagttccaggacagccaggactatgcagagaaaccctgtgtagggagccattctggacttcctgatcagcaggatggaagtcggctccaggtagtaaacaagcccatgtttggtggatggcccgcccttaatccctgattggctgagcaa

SEQ ID NO: 32331 - DNA, 2228 bp, Mus musculus
ttcctcttccaccgcctctgctgggtggtgggcaagaggagaggctgaacatttattaaaagtagtttgagggctggtgagatggctcagtgggtaagagcacccgactgctcttccaaaggtccggagttcaaatcccagcaaccacatggtggctcacaaccatctgtaacaagatctgacgccctcttctggagtgtctgaagacagctacagtgtacttacatataataaataaataaatctttaaaaaaaaagtagtttgcaaaaaattatgcttacagctgagcagtagtggcgcacacctttgatcccagcactcgggaggcagaggcaggtggatttctgagttcaaggccagcctggtctacagagtgagttccaggacagccagggctacacagagaaaccctgtctcagaaacaaacaaacaaacaaacaaaaaattatgcctacagatatcaaatactgtataaaagcattctatgaacaaagagtagagagttttcctctgggctgaaaaaaaaaaaaaagtcccgaaaaatgtggtcaaagttctaactagtgctctaacttatctgggacataacttcccaaagcccagcagccattcctccttcagtttctagggaaggacaaagccccatgagggaaggactatgtaggacaaaatgacatgctagcactgtcacccacaggagagtctcgaaggcaaggcctacttgttcctctatcgtcctcatagccttcctatgtgggagaactcacctgtcccacatagctgaagaaattggctgaagccaatcccagaagccctgacttatactcatgatgtgttgctggaaccaacaaaactgaagcctttcctatgaccaacaaggccatctccgatctggccctggccatccttctgatgttctacccttctgtcctttgtccagccctctccagacacacagctttccttactgtttctcagacactatggataccactttctgattggtgcttttgcttttccttctgcctggaactcacttctcccaggcatcaacatgactcacccttttctttactccttcctacccgtactgctgttgctacagagggactttgctgcaattctttttacctacacagagttctttctggttaccatgtttttcattagcctggtacttactgtagttttaaagatttttattaatgtttttattaattatgattttgctaattgctaattattaattaatccatgtgtctgtgtgcctggaccatgtgtgtgcccgtgcccacagaggccatcagtgggtatcagattccctgaagctggaggccatcagtgggtatcagattccctgaagctggaggccatcagtgggtatcagattccctgaagctggaggtccaggagatttgtgagacagtgatctgggtactggggaatgaacttaggtcctctggaaaagcagtaagggctcttccacagctgagccacgtctctaacctttatccccattcatttttattcttgccatttaccccctacatttcattcttgtctttccacactggattacaagacctaagacagtcagtgcttgtttggtttaccgggatattccagtgctaggacaatgccagaactattatgaatgctctgaaataaacacaagccatattgtacaacctgtaatgtacactgtgactacgcatgtcactcatgctaccacctcattttactgatatggtagctactactatcttcattttactgataagtaaaattgatgttcgagaagtttaagcaaccaattctaattgccttttttttttttaaatttccttcacattttagtgtgtgtgtgtgtgcttttgcttgcaggtagacctgtgcatcacatccatgaaatgcccccaaatggaagagtgttgtcaggtgccctgggactgctggagtttaggatgagttgctatgtaggtcctgggaatcaaacctggatcttctgtgagaactagtgctctagacactgagctatctctcaactgccagttctaactgctaagagtccaaaggaagtatgatttaaatgctggtctttctcaccccagttaacatggcaatgtggacgtgaggatctcacaagacctcacccttgggtaaagagctcctgagagagggagaataagttttcttcagatataaaaccccgacaggttatccaatc

SEQ ID NO: 32332 - DNA, 1099 bp, Mus musculus
atcaaacataatcaaacacatcagtctatgggggccaagcctactcaaactactacattcactctctggccctcataggcttgttcaaatgcatgattgtatgagggccatacctagccataatgtgaaatacatttatttcaatttcaaaagtccccatagtctatcacagtctcgatgctaaaagttcaaaatctcttctcagattatctaatcactttactgtaatcctctataaaaatcagagcagatcacatacctccaacatcacaggatatacattacaaaatgtcatagtgaggaaatactggaccaaagcaagaccaaaaactggctgggcaaactccaaactctgcatctccatgtctgatgtcaaagtgcgcttcagatctccaattcttcttatctttgttgactgcaacaaaattcttgggctggttccactccctgttagcaactttcttcagtagatatctcatgactctggcatctctaaaatcttagggtctccaatgtaacgtttgggatgcacacatgatttctgggctcctccaaagaacttgggtcacttctccagctctgccctttgtagcactctacgctctggttgactctactccactgctgttgctgttcttggtggtaatcccatggcatcttcaatatggtcttctgctgcaattaggtttcaccaatagcctctcataggctcttttcacggtgctgagtttcaagttctttgcacaaccccttcagtcctgggcaatcaactgtaactgaagctgcaccttcaccaatggccttccccggtttctcacagtgtcaagcctcagctgctcttcatgatcccttcttgccttcaaaatcagtaccaactgggtgacgactcttacacattaccaagtccagctgcagcatgagatacaaccttggctctttttggaacacagcttctttgtgctctcaaaacaaccaaccaaacaaacaaacccacttcccagaagacttcacctcagtgatgctggtctcttcttaatcatcactaatttcttagctccagccaaccagcatcaattgtcccagaaccccttttattcac

SEQ ID NO: 32333 - DNA, 1190 bp, Mus musculus
ctgaatctacttacggattcctagcggataccaaaaggtgggagctgggggaggggatgcccacgcaggccacccgagcgtgccttcaaagtaagaagtttcttcctcacttcagttgattttttttttttttttgtagacattcttgtcatagtaccagaaagctgtctgtctcactcgtcagaacctttatcgggataatgccaaccaacagcataaaccatttgaggctagttcaaaaaaaaaaaattgaagcatttatcttcaacatagctcctttcccagttgaaagtagtagaaaaacaaaaggcaatacttgttggaataattgactctcaatttaaaatgtaaggtcccgttgcgtttgggctgcagtcgaagagaaagaagaaaaggaactgtgcacacggtctctcaagccaggggccagcgtgagcaccagagcgctggtggatctcagcagagctttttgagtgtctagctcgattccttgttttctttttaaattattgtgtgtgggggtggtgggggtggtgatggttttgtggattgtgttgaaacacctctgtagaccaggctgggctcagactcatggcctctaaccttctgagtgctgggtttgcaggcatgtgctgccataataccagtttctggatttttaaacagaaaggcgtgtcttggcgatttctgtgccaggtgaaggccaggtacaggtaaaaagctcgcttctagctgttggcatgagttttgcatgggtcctataggaagaaggctgggtattcaaacctgcactgtaattcaggcactgcaggattaagactctggcttcggttttcatatacttcagctctgcagctattcgtttttcaaagcagacacagaaatgcccgtgacatcagcactgtgctgagccagcaacctgaagccctgaggtcatgctttcttccctgctttgtccagcactttatcagtctttctcacgatattctactcacaggcttgagtaaaacgggctaagatgttagatacatggttacccagaatcttgccttagaacaagtcagaacagccttaattaggaattccaatggtgctacttgcatgtcctctgacacatcattccatgggctccccatgtcctctgtgtcactggaaatggtcatagtgcctttaaagtacaccacaccaga

SEQ ID NO: 32334 - DNA, 4402 bp, Mus musculus
ggtgctagaattcatactcaaaagacccgttaggtccagaagtgatggaacacgtgttacaagaaagaaaccttataactccagaaattggagggggctacttgtttcagaatttatcataaggcttttgttgatgaaaaactcttaagttccatgaatgtaaaggaaggaggaatgcctctcagtggcctggagccaaacaagcaggcctcgggattcatagcagggacaagctgaggagggcagtgtgtgtgtccgagagattagcagttggaacctttccacacccacacccgggccagccctccgaggagagaagtcagtcgttatactgcataatctctgtgatacctcaggctgcacttctgctaaaacacagcacactcgccattcatcccactctacgctcatggaatgtttgctactttataaagccatttggactgcggagtgtggaaaggacatgctaactttttacatgtcctcatgattcagggcaggttatttaccaactattcttttcttctgtggggtagcagtgttagccccgtgtttctagttacgctttgaggttgtgtgtagattgtggaatagcatccagctagtatctaaagtgtgccaagtgcagcaggcatgctgttccacgcaatatgagcatctgaagccaaaggtaggagggaggatcacaagttgaggctagcttggagactctctagtaaaacaaacaaacaaacaaaaattataacaaatatagctgctttctttgttattttcataatagtgaacttttacataaactttaacagtcttaaagaggaaagccttatatgtccagtaactggagggacatcttgccttgtccctttgactgttacagaattcttatgaagaaagacttaaagctttcgttcttagtttacccttctgctggtcagaagcgtcagaactggaatgtggtgaggtcagtatgagaaggggctggaggaattgctaaagcctctgagtgaggagtggtgctacacacagcctgtaatcccagccctcgggaggggagcacaggacagggattcaagtccatcctggtctacctagttagttagggggtagcctggacaacatgtgttgcagtctcagaactttcataagcaaaagccatgccatggatctgtgcactagagaactggaaaacagtaaagctttagctaagacccaagcctccatagagagtgttaaatgcctatataaagacatctatatctaaaggtccaataggtgtggtagcgcataccttttatcccagcacttgggaggcagaggcaggcagatttctgagttcgaagccagctagggctatatagagaaaccctgtcttgaaaaaccaaaaaagaaatttgtacactgtgactgaaactatactctgagaaaaatgaccttcccttcatctttgtaaacagtgggggttggaaggtctaggactctgtatttattgtttatacagtactgttacagtgcctagtcctggtaattcccagtgagtattctaagtaacagaagagcaaataactactcagctccaacagaaaagaaactaacaaaattcaacttggcaaaactaaaccttggaataggtgagacgcacacagtgttgtacaggagatgaggctcttatgaaacaaggcttgaatgagcagagcataggttctacctgtcgacagatgttagccatgctcctgcagtgttatggccctgtgattggttctggctgtgcccttggtctcatgtgtgactgactgggcagtagaccatcatgggcttagtaacaagatccaggggcatggtcttcccggctgcagggagcacatctgtgccaccaggtggtgcctgctttctgaggctgagactgccatagaacacacattgtcaccgacattgtggtgtcatggaaccatgacctcgccttctcctggacctacagaataagaaatgcagacactgaaaattaatactcaactctttacagtatacataacactgagaaatttagcatttaaaaatatttttactcagatgtattcagcttcaggaacatattttatgtttgtattctgccttttatagtatatctgacaatgaaaagcattattttccaaattattttcttagccatattattgaaatatatattcaacttcaatttagtaagatgtagtatattttcttagagtatttgatagtgtgtttttatattctgcttttatagtgtatcttaaatcctagaaaagtattttcctgaatgaagttagagccaaggagaagctgcttaaggaactacactcgttcccctaacactgagccacttgacagctgagacaccttctacctcttcaatgtggaaaagggcggcagcatctaaagtcacgtcggttagttgccagtccacggccttagaggactttgtgattacagcagcgtgtagtatcagcagcccagtaattgagcggtgtggtgctttgtgcaaaggactttggttgaagtgctaatgagtgagtgagagaggactctgcagtcactggagactagcagagcctgctgtgaaggtccttgtccttcctcttggtctgctctctcctggagctcatctgccccgccctgcccatcatctcaatgaggagggaaagctgctaattactaaacaggctccggcagagcagttgtgacagaggtcaggcagcatgtgggcatgggtgcaacttgtgtggaggccaggccagcggtcaggctaaggggtcctgcctcaggagcctttggcttcagttttctgatgcagggtctcacaggagctgggatttaccaattaggctcagctaactggccagtgaaccccagggatccacttgcctgtctccgtagcactgaattaaacgcaggtgcacacatcacctggctttattttcgtgtgggttttgggggtgtttggaggtcaggccctcggcttgcacagcaggtgccttactgactggtccagcatcccactggccaaagactttttaaaaggcagaaatgataactgagttttaatctgcactggtatattaataaacctatatagaaattttaactattcttctaagaggagaacttgcacattttataggaattaaataaatagaagttttttagagggtgcttttagtactgatttcagacttggaaggatagctttttaatgttctgctcctatatacatatttgttagacttgacggtcctctgacgagtgtatgcatcaggatgcacctcaaaccaaaaatatcctacaggggtttatttagagaatgacatgtgtacactgttaagtgctgatagtggatgctgcaattccgctctctggttgagatgcacacgcaagcttagacatcttggtaacgggttgggtgaggaagagtgtattgagtgggattgtgcgcacacagggatgcaggctcctttcctcacgtggtaatgtcctaaggggggtgttctcgtcactactcaccgctctaacgatctcaccatagacaagccatgtgtgtgcagcctcttcttcccagcaaatgttagcttcaccatcagcaatgtgagttcgggacacaagcattacctcaggttgctgcctgtttctatagggcagctactttcctgccttagcatagtagaattaaaatgtacttggtgctttattgtttccatgtggagctcaccgccatctcagcaggaaccagtgtgtgtttctcaactgtgttagccagggctgaaaatgtgccttctgtttgcacttcctcgactgctagggaggtggagcatctccctggcctgcaggtcatttgagctttgtttctgtgaattgtacattgctatccgtctcactttgtagcacacctaggagatcatattacacatgggcaatttgttgtcttcatctagaatatgtcatttgccctttttctgtcaaaatacttagccagtgttgttttatgaagggccagaccgagtatttcaggttgggcttttatgcagcctttgctgcgtagaagcctcctgtatacgccagtggtcctcagccacttctgccacatccccaggaggcatttgccaatgtccacaggcatttttttgtcactttaaaatgactgctgcttatgtctagtgggcagaggccagagaggcttctcagtgtcctggggtgcacagcacagccccccaaaaatgatgtcacactccaaaatgtcattaggtttctggccagaacagaatgggataccactgtgtagcaataaaacattcacagagacaagcagctggccacatcgagcctgcaagtgtgccttcccacctggttttagtagcatttatctgtattatta

SEQ ID NO: 32335 - DNA, 1607 bp, Mus musculus
ccacattcattaaaactctttgaatgccttagatgaacgaacacttgagcagagtgtatggttagtaatgtatcaaaggatttgtcttacactaagttacacaaatgtaggagatgcttctgtagtgactcaaaccttaaaatacaaaggtatttaataggatagatcatagcattatatacttcccagacccccacaagaaacattattagtattctaattttaggagtccagtgattccaatcagaatggtcttctaaagtatatcaactatattgagataatatgagcaatataaaggtttgaaattaagaggcaaagatatttttgatatacgctttggtatatagataatttgtagaaattgtttttcagagaaggcgttttgggacagatctccctatgtacatagcccagggtgaccttaaactccctatgtagcccaagctggcctccagtttcttctgattcacttacccatctgcccagtgttgcagttccagacatcaccaggccaactcaaggtctttgttgataagattgtctaaacttgaggtcagaacagaatcttgaatctagaaacatgaatgaattcacagagcattggtaattgattgtggcagtatcccaggtcagtgggaaaatcgtggatgactgaaaaaaataatctcaggataattaactctttgcatgggaaaataataggcctctgatgtcatcactgatttagaaattacagtgtctttgcacaaagcaaagctttgtataagaattttctagggtagtttctgagaccctgaagtaggaaacaaattgtagattctggattcctcagctatttttctggagcatttatacttattcaaagagctggtatgcttatatagggaatcatgtaccagttgatctcttcatcacagcgtaaattatagtagcaaaaaatgggttcagatgtttgttgcttacaaagtagatgaagaaaatgtaatggtcatgctgtagaatatgctagcagctaagcacaacagatgaatctatgtgtcaacagcaaaagaaaaaaaatcatcagagtgaagaattgaaatggtagatacgttgtgattcctgcgtaaatttgaataaaaccaacttaccaactctggtactaagcatcgtttatgggaaactcttctctaaaaccagagttgggagtatatatatgtgttcagttcccaaaacctagttgttgctattatagtaacagtggagttccttgggaacgaagttttcacaaagcagggtaatccaatgctacttcagctttctagtcttcatagttacatatctactttccaatagagcagttccaaacaaatgtgacagatggatacttggctctacattgtagtaacacgtaatctttgttatcttgcttaggtagacatggatgagatgtacacgagatgcatattatcacaacggtcccattgtgcgtgtgtgcatcccaaggcccctcatggatatctgaagccttgtgtagtattaactctctctatcaggttttcctatgtacatacatccctaggctgatgtttataagcaccacaagagtcttcacgtcaaagaat

SEQ ID NO: 32336 - DNA, 1158 bp, Mus musculus
caacatttcctttgctcaacactggaaaacctgtaagactgttgaaattagaagtgggtggaaaaaacacagttttacccaaggcctatagatcctactactcacactcaaatgatggagtgtgtatgtgtgtgtgtgtgtgtgtgtgtgtgtgtgtgtgtgtgtgtgtgtttgagtttgtgtggtgagtttgtgtggggtgtgtgtaggagtgtgcctgtatgtagatgtctgagtatgagtgggtgtggtgtgtatccagagaacaaacctcagttctcagaagcagtccatcttgttttataaagaagggtttctcctgattgaagttcagcaagtgcctcggctgcctggcctgtgaaccctatatatctcctgtctccacctccctaccactagggataccagcttgcgacatcacacctgggttctcttatggcttctgggagggaactaaggtcttacacctacctgcatggcaagcactttaccagctgaactatctgcccagcccccatatatcccaactttgtataaagtgaaacgagatactaaagacatgcgatggttaatacagagggaaccagtctattgtggagtcccatgaaccaatgagaagacagatgaaatgataggatcccgtggcagggacacaaacactttgttttgcttttgaattttattgaggatagtctaagtggactttgatgcttttgtaactgttaacatgtaagccgctgcttgggagagttgatgcgcttttttaaatttcagcgtgagacgatgctgtggtttgaatctgaaatgtactgccaaaggtgcaacatatctagtgtatgaggtttactgggagagagcaaaaggccccctgagagtggggatatgagagtcagagatgacagaacgatcaagacagagatggagggagacagagccatcggtggcacctggtgcgcctgtgggtggtgagtgatgacataagctgttgctaggtcccggaggacagtgtactttgtttccggatcttctccctgctgtctttgcactccctttccactgtgtgatgagcagctcaagggtctgagaggtctgcccggaggcggtgcggcgacacctgaacctgtcagccaaagtccattcctcctccagagtgtttct

SEQ ID NO: 32337 - DNA, 1418 bp, Mus musculus
gggtggccgtgcttttgatcccagcactctggaggcagaagcagggagctctccataagtctgaggtcaaccaaagggtatttaatgagaccctatctaaaaacaaagcagaataaaacaacaacatcaacaagagggaaataattatattatcgttctagaagcacccaagcccttcctttctccccgcaggcgctttcaaatctcttgacaaaaatggcaccggacagatccaagtgaacatccaggaggtgagccggtttctcttgggggtggtgctcagctgtgaggtccagcccctaccatcctgtttgcccagcaggccttgggtgacgtgtctggttttccagggtccctttgctcatctgtgctttctttcctcttccagtggctgcagctgactatgtattcctgaatgggagtggcagacctgccccctcacagctcactatggagccaccttgaaccctgatcctgactgcagccgcattttcatggtcatgtcctgctacccagaggcctttcgtctccctgttctggtacccagcttcccaatcagcagccagagctcaacatgccacaccttgctgcaccctgagttacccctggctctgagacaagctagcttgttctactgaagggtcaccccaccctagcacacccaatccacgccatctgttaccttcatcctgtctgtgtgccaagcctagcactcctgctgcttccatgtcccaagggccctgtcttagttctgggaggatcacacctgtccctacacaccctgttacacactcacacagttacctcccaggcagccagatgaactccaggccatggcaggtccacacaccctagtgcctacgcctgctctgtgctccccctgcacagcggtcgggcccaggagaaaataaactctctctacttgctgcttccttcggactctgagtgctgagtccaggcaggagggaacatgagctctatagagtaacttggttatttttttaatgtgtatgtgtagaatgtgtgtgtatatacatgtactatgtgtgtgccaccctctgggactggaggtatgagggatcatgagtcaccactggggtgctgggaactgaaccccaatcctctgcaatagcagcaaagtacacacacacacatacactacactttctcacacacacacacacacacactcaaacaccatatactccccccacacttacatcacacacacataccgacacactctcatatacaccctcaacactacacactcacacatacatactctcacctacaaacacatcacacacacattctctttctcacattcagtctcaccatatacacacacaccatagaccctcacagatatacaccccccacatacacacactcatacaccacattcacacgtgctc

SEQ ID NO: 32338 - DNA, 1103 bp, Mus musculus
tctacacgagaatcccctgttttcccgctgcctcaagacagggtaaagcaggcaggcgctgtagccgaggctggccttgaactggtcctccagcctcagcctcccaatttctgggattacagtagagcgctaccacgcacgcccagctgtacccctgtcctcatgcctatatatatgcagtcaagcctgggccagggtactttctagaccctaggaggtttcacatctcctatcacctgtccagacccctagctagaggctctgtccccatctcgaggccttagtttcctccccaatctagttgccggaaatgcttgcttttttttttttttttttttttttttttgcgggaagggctgggctcctggcaaggccactacccgacccaccccttttactttacaggactcagctgcgatcatgttcttggtgaattcgttcttgaagggcggcggtggcggtgggggaggcgggggtctgggcgggggcctggggaatgtgctcggaggcctgatcagcggagctgctggcggcggcggcggtggcggtggaggcatgggactgggaggaggtggcggaggcggtggaactgccatgcgcatcctgggcggagtcattagcgccatcaggtaaggcggggcctgaaggggcggggcgggccaaataataaagactcacttagagtccgacctgagaattcttaattagtctgggctgatccataccggaaaactggccctaaggggattctagcgaggctggtgtcactttttagtaccaggattagtaaacctgcttctgtgggtcaacaaataggatgcagtttcttggggataggggctcttctgtgtttggggaaggtgcaattctataggattgtatccagccttcactgggggcgcagccagtggatctaaggctgtccatggcttaagatttgagcgaggtggagcttgctgttttaggagagatcagagtccccaaagaagaaatggtccagagaaggttgtgtggggtctggagctgattggtttagtgggtaaaaatcctttgctggggttagaacaggtggctggcacctatatcgttggtgatccaagcac

SEQ ID NO: 32339 - DNA, 1137 bp, Mus musculus
gtggacacagcctggccacaggggctgtgccaggttcactcatgcatccatccattccctcattacaatagccaatgagcatatgctggcctttgttctaggtcctgcgcctgcgcgtaggagacatagtagcaaacaagagaaggttgatttcctacactaggtgagaagcccagacaaaaattggagtgtcaggcttatcaccaggtgatataagctagtgagaaaaataggagaagggggtcagcagtgtagcttcagtttcagggtggcagcaaaaggctttagggaaaagattactttcagcagagccctgtggggaagaggagcctaggggcctgaaggccgtggtccagggccagcagtctttagcccagctacctgtcctctcttgggccatctagaaagacaaagtttcctagccatttattcctctctacccctagatgcatcaggtgtgatcgcagacagccctggacactgggacacagaagtccctaccccagaactcctaggcagtgtggaatcagtcttgcacaggctgcagactgccttccaagaagctcttgacctttaccgcatggtgagccaagggagcccagggcagggtgggacgatggagagggctccctgccactccctggatgtcctctaacgagcttgccgtcccttacagctggtctccagcagccagctgggtcctgagcagcagcaggcacagaccgagctggcctccaccttccactggatcctcaaccagctagaagccagcaactgtatggctgcagctaacttggccccaccccagacactgcctagcccagaccctctgtccctacctacactttgtcccctggccagcccaaacctgcaggccctgctggaacactactcagagttgctggtgcaagcagtgaggaggaaggcaaggggtgactgagaacctgaagcccctctaccaaagccccgctgccctggagaaatagatttgtaaaccaataaactgacagttgtttcctggaaccttccctgtctataaagcccttctcaatggatgcagagagaaagggcagagggcccctgcatggatgaagcagcctgcatagatgaaccagcctggagactcatttagctctg

SEQ ID NO: 32340 - DNA, 1204 bp, Mus musculus
gcagaggcagcttctcccggaagaaaatgctttagccccagaaaagaacatcttaaaactcttgtgaaagtgtggttttctaggcataaaaggggcgtgtgggctatagaggtggggcagcaggtaagaacacttgtagaggacctgggttccgttcccagcatcctatggcagctcacagctagttaactccagttgcagagtatgcaaagactgattctgtcctagacacagcacatgcatgcaggcaggcagaacactcacacatttgtttcaaaaggtctggaggcagcttattgagctccaacaagctcctagagactggggtcctccatctcctcattctgtcacgtaagatagctgtcatccttgtggccagatggaaaaaggccacccaagcaatctctcagtgcctagcatcgcctctaaccgcaaggaagctcctctttgacccggaaggtctgtgctgtgggaggcgctgagcacagagccgctgtaagctccttgcaatactgaccatagcctctcttcccacagtctctgctgaaggtggtctatgtagagaatgacatccagcacctgcaggacctgtctcacttcccagaccggggcagtgagaacggcactcccatggatatgaaagctggggttcgagtcatgcaggtcagtcctgacggccagcacttggcttcaggcgaccgcagtggaaatctgaggcaagtggcccttatagtggctggtgttcacctcctggacctagcatggggggctctcagggtactggggaagagtcctggtctcaggaccatggatataatccagttaccagcagcacccaggacttcaactgggaggggcttcctgaaggtccgaagtcatagtagctaccaggacctcagcagcttcgtggaatagcttcctcactggtcagggatttatggaacactttcccgggcattgggcacagaaaaaaagaggtcagtgggaggagccagctataagggcatgggtactgaggattcagtgcagtagagcagggaaggcccaggtggtctacccacctcaaaaggttgttcactacttttgtttggttgttttgttttggtttggttttggtttttttttttttttttttttttcggtttttcgagacagggtttctcggtatagccctggctgtcctggaactcactttgtagaccag

SEQ ID NO: 32341 - DNA, 2170 bp, Mus musculus
aaggccagctacagagaatggttttctctacagtagttagaaaccagtatatttaatatatgaaagtatcacacttctgatagtctgtagtttcttacttattgttttagcaaccatgatggagttctggcacataaattttattgttagattaaaaaaaaaaaaaaaccttttagctgggcatggcagtacagacctgtaatgtgagcactcaggaggcagaggcaggttaagctttgtgagttcgaggccagcctggtctacagagttccaggacaggcaggactgcacaaatagaccttgtctcaaagaaaaatttttttcttttcttttttctgtgctgggactcaaacccaaggccttgtacacactaggcaagcatcctgttattgggctttaggttcaacctgttaaaacttttttttttagtgtgacttgtttccctactcaagactgaatctgatgagagaacactgcttttgctcagtgttgtgtctgctctgtgtggcctgaagtgctggccttggaacttcagtgctttggtttgcactgcaaccgtgctgctctcctgtggcaggactgaccctctggcttacctgtaaataaggatgatttacatttatctgtaaattgtgatgctttcttctccacagattgtcaggatttaggactttcatccacagcatcctttgacatgtagtcagaggccaccttgtcaccaggcgctctccctcccctgtagtcccagcttcttcctcttgcagcagacaggggaatactatcaaaggtcaaatgctagttgctggtagccagcatagcatgacttcagaagcccagggcatgtgtggaatgcagcaagaactaagactcatggctgaggcagccgtaccatgttgggagctgctggagcaaatatttttctgacagcccttttctttgcaggtgacacttgagaaggtgcttggcatcacagcccagaacagcagcgggctaacctgtgaccctggcacaggccatgtggcctacttagcagggtaagcacatgtgtgggcttcagcagctggtcactggttagggatttggagttgaagtcactggtgtatctctctgggcctgggttttcccatctgtagaaggctgcttcctgtgagggctatggaggggactccacaggcccatctgtgtcaggagtagtacccagcaaggcagtgcttcgaaagccttttaatcaaatgtcaggtggtgacagttatgggaaactcaagtggctaaaacccaaacttaggtcaagctcaactgcatatgctcttcttagtgcctgtgcatctccctaggagtacactccattcgggtaggtgagagagctgaaggagtccagttaagtctggagatgcttgtctagcccagcactgcttaggcagtgaaaggagcctcttcctctcccccagcaaaacagggtcgggtagactcatagtaacatggtatcagttaatgaggccttgggaaacagattgagcacaggctgagctcttaaatccagctggcacacattcatctccactccgtttctgacctgtgacctgccgggtggcctgtgcaaagagcttcccctctctggcctgcggtcctctgaatcagatataaataaatgatatataaagcaccctggcctcacccgacagccgaggatttaaggcagttatagccataaggtctgtaggcctagggcctgcagaatagtccccacaaaggaattgcttggtttttgtttaacaatgtatcaatatttttacaagtgcccatgctttctcagcattagtatctagaggaaggggcgagcagaaagagaatcttctgcccagacgaagctttataaaagctggagatgcaactcagccgtagggtgcttgcctagcataatggaccttgggttccatcctcagtaccacaccaaaaccaaaagcttcctggcatgggagccaacctaggcttcatgatgagacgaaacccagcaacaaaaccgggggagccttattaacacggggtttttctttgggaagagagtcgtccctgggtccagtacttctcccaagcccccagtttagacttgtattcttttccctaggtgcgtggtggtggtcttgaaccccaaggagaacaagcagcagca

SEQ ID NO: 32342 - DNA, 1118 bp, Mus musculus
tctaagagccaagtgctttgaaggaaactccagaaagatccagaggcaatctccaaaactcagtgggtagagatgcttccaaccaactggaatatctttaatgggggtaccagattccaagactctgaatgaatcccttcaaacctccattgcactctgcaggtgggctcccgcatcctcgggggatggtccctgagcgactccctccatggcttcaacgctacgtggacaaagtgtctgacctcagcctttttgggggtctcccagctaaccatgtccttgtgaaccagtatctgcctggggagggcatcatggtaaccgcacatcctcatcccaagttcccctgctaagtacctcccccagatctccaggtcattaagaggaggctagccatcatgtttgcctgccctcactccacacactccacctaggcgcggtcctccctgtcccagcttgggaactccactttgacttagtggagtggcgtaggctccctggtgcccccttcctccccagcctcatgaagatggaccactgtactacccaactgtcagcaccatcagcctgggctcccatactgtcctcgatttctatgaacctcgacagccagacgatgatgtccctatggagcaggtgggtcctgagctgatgccccgggcatttgggggcattctagcgtctgacatcccatatgctccaggacagtctgatcctacctgtatttagagtattcgtgacacccagacatgctcccctgtcccttgttgggcatccctgctttctcccagatagccaacccatacccatccaatctgtttgtacggtgccccagctgccatgatacccagggataccgatacatacgtcgccatggtattggatggctaaggctatggatgacctgtgaccctccctcagaccacttgagctcaacacggtgttccaacaaagttttttttagaaactactgtttacttatttttgtgaacagatgtatgtagcccaggctggcctcacgtttgccatctttctgtcccatcctcccagtgccagcgttgtaagcgtgtgcccccgtgcctggctccaatgcatattcttgacatcctcaagatatccca

SEQ ID NO: 32343 - DNA, 1217 bp, Mus musculus
gcacccctcaacctccacatgtaactccagcctcctcccctcccccagcccccccttatctcattccacctcatttgcccccagctccggcagctgttgaagaggagccgcacggcacccccaggcttgtcctcttaggaccgaaacccagaacctggactgattttccagtccccaccgtcccgtgggacagtcagcgtatgctcatgtcgcagattcatgataatatatgtgtaatatcctgccattagggtcttacattaaaactccaaagtggcacgggggggaggtgagcagtctccaatatttggggtctgtgacacctcctccccctacaaggggctttctaggtgatttctgtgaaatcgagcccacttgattgtttctgtgaaacactctagagacctttaactttctcctacctggatcagtcatgatcaccccccccagactgtcgtaccctgaatccccattggagtttccatgggatttgaggcatctgagtacctttcggtcaggattcctccccaggacccacacccctgagatgttggaaaggccctctgagattaatgtgtcctgagtcctggctacatcatcatttagaacccaatgtctctgacgctagcattccccgtgattgttccccttggtctgtgtatccctgtagctaccaattaaactcaatttggcctcagactgtgtggtgtcattaaaaatggggagtgggggagcattggttcagtagagcggctctgaggggccacagtaggatgatagaaaggctaggagtcaaaggtcaaggtgcctgtcagatctgatgcctgggaaaggcacttttctgtttaggagatggccattccttcctgatactgtaatttcagacagccggtgcccaatccctgcagaaaacatgagaaggccagcagatcgttggtggtactcacctttgatcccagctctttggaggcagaggcaagcatgtctctgaatttgagtccagtgtggtctacatagtgagttccagggcagccagtgttatttacatagtgagaccctgtctcaaaaaacacattaaaagatgtgagaagacttcaaagccagggagtttatcaggccaggaatgtggctcagcagtagtatccttgcttagaattccccagtgaggggctgggggcatggctcagtggtagagcatttgcagggaggggctgggg

SEQ ID NO: 32344 - DNA, 1216 bp, Mus musculus
ccttcatcctgatctccggctgtcagcagttccaatccacgctctccactctcagcttggcactcgctgctatcttttttttcctcccctcaaaactggatcttagcttctcaattgttaaattttaaaagttttaaaatagtcctgactgacctggaacttgatatgaagagtaggaaagtcatgagcttgcagcaatcctcctgtctctgaactctaaagtttactgcctctgaagtgctgggattgcaagcctgtaaggccatatctggctttgcgtattttgttctgctgtttttgttttttcagacagtatctgactgaacagctctggctggcttggaacttacaaatgatccacttgtctctgtctcccacgagctgggattaaaggcatgcctcaccacaccccacttggatttttttaaattacatctaattattgtgtgtgttccctcatgtctgggccatggtgagcaggtggtcagaaaacaaaagaaaaacattttgtttgttttttgtggggtttaggtttcggagacagggtttctctgtgaagccctcactgtccaggaactagctctgtagaccaggctgtcctcgaactcacaagagattcgcttgcctctgcctccaaagtactgggattaaaggcgtgcactgtggccgccgcccagtctcacagaacaatttaaggaagctggatctcacccctccgccttgagggttcccgacactgaactcgggtttggcagtaatcttaccagttgaaccatcctaccaggttttagcttctatccagagccttgtcccagatctcagttctaacaattgtcctgtccaccaccctagtcctggcctcgaccctaaccttaacccctgaacttgtgccttaactttaccgactcttgacttcctgggtcgccccctctgaagaccctccagagttcctgggagagcaagtgcgggcagtgaccgtggtggagcagggccaggcactgctgcctgtgtccgtgtctgctaaccccgcccccgaggccttcaactggaccttccgaggctaccgcctcagcccaggtaggatgtgggcctggaggagggttcagattcaggaggctgggcgggacttccaggctcctgacccactccttccgcagctgggggtccccggcaccgcatcctgtctggaggggcactgcagctgtggaatgtaacc

SEQ ID NO: 32345 - DNA, 1148 bp, Mus musculus
ttcggttaggctggccagagagagctcaatagactgagttgggttcccacatcgtgtggctcacaactgcctgtaactccagttcctggggatccaagtccttcttttggcctttgtgggcacacacacacacacctgccatttatgtacacacattaaaacaagtgaataataattatcattaaatcttaataaaacagtggtctctagattcactgacagaccttgtctcaaggggactaagtagagaatgatagaagacagccagggtcatccttgggcaagaatacacacacatgcacgcacacacacacatacacacacactcatacacatgtgcacccacagtagactcacatgcacacacacatatatgcccacggatacatgcacacacacacacaacagactcacacactcatgcacacccatacatgagcacacatatataccagaacatgcacacagacacacacacatgcacgcatgtgcacacacacacacacacacacacaccatcaccagctcttgtgtgtgggtgctggagatccaaacgaaggtctttgtgctgtacacccagtgggcttctcctgagccatcgtcccagcactttcttaatcctaaaggattgctagctagtgcatgcccagactccctactgtctggaggctgagacaggacgatcacaagtctgaagtatgggctgcatagtgacatactcccacccccaaatgcaaacagcaacaactaaaaaaagagctatctatatccatgctctctctatgaggcaactgtatcagttagctttagctgtgtgacaaaccaccccataggtggaggcatatagcaacatacattatttcccgtgagtctgagtctgatgggaaagttctggcttgggctggttcaggtcatctctatggtcatcgtagtctgggactgagcttagatggcttcctgctcatatgtgtggcagccatcttgctcagggttgggacagtgtaagtactgctccttagagtgttcacatggagatggccatgaggtccaagaacagcaagaaaagtcatctctggttaccagagcttctcgagcttcgaattctgtcacattacctaccgtcccccgcaggcaaatggcgtgtctca

SEQ ID NO: 32346 - DNA, 1362 bp, Mus musculus
tcgaagccaactttcatcagcactttcgtcctggaaggtcggaggaggatcgaatcaggaatgaatatgaggagagtcagtggactggggaccgggacacaagaagctccacggtgagagaggggaacctggcagcctccagtctcagcttcaagctaatcactgccatctcctgggacctgagagtcaagggaaatgaccttgtttgttggttttgtgtgtttgtgtgtgtgtatgtgtgttcatgtatgtgcatatgcatgtgtgagacaggttagcacagcagaagtggacccacactactactccatgagggacttcagtccccagcttcccccaacactggaagaggtgtcatatcgccaaggtgagtcatgaccgcctttccttccaatctgtgctacttacttctttattgctgtgaccgaaatactcccagagaacaacctgaggagcctagattcccactgcctcgcttcagaaaggtctgtccgtgactgcttggccccactgcatgtgtggcagaggagagttgctcttatcacggcagacaggaaatggaaagagagccagacaggaaggggactagaggcaagagatccgccccccaggacacatcccagtgacctactagtgtaggtccagctaggcacacccgtttccagaacctcccagaatggcgccactagccatgaaaccccaacatatgagcttttggggtagacactttcccatccagtcctcatgtctaccaactccagccttcacaggtattgaagatgaggacatggccttccccggacacctgtatgacgaggtggagagagtctatggcccacctggggtctggggacccctctatgatgaagtacaaatggtaagaagagtcttagtaccaggctgtgtaggtcagaaacccacctcccactgtgtgtatctgttagaagaagccactgtgacaaagagacccctcagtgcagtggcagggaaaaattaaagcggcacacttcatccaggggtggcggtgcatgccagagaggaggaggaaggaagaggggagttcaaagccagccttgactatatagtgagacagtctccaccaagcaaaaaatgaagtctttctcgcataggtgtccaagaggagtcctgctgtgtcccagtgatttagaatgcagggttctccccctggatctccctgtcattctctggcacacacatcagcagggtctgcaggcacaggtcggtttacttaggggtggaggccaattggtggagaaaagctgttagacagacccagaaatggccatcagcccctctgcttccttctgactgatgggaacatggtcttgacactggggctgg

SEQ ID NO: 32347 - DNA, 1242 bp, Mus musculus
attgtggagtgtccctgaatcaatcctcactggctgtgcattccaataacgctagggtgtagggtgataaatagacaaggtgggaggagtggcagggtgtaggaaggaagcgggcagcagagcagctagggcgactgcagccgtgaggaaacggaggcagagagatgggaggggaggaggacagatctgtgggttctgggaagggactttcgacttttcctttgagggaagtgggtagtctagggaggtttttgaagaaggagtgagttggtaaaggtacaccccaaagtgcaaaaaaacaaacaaacaacaacaacaaagcttgagtggacatcctcagagatgcagtgagtggagagagggctgttcgtgttggcagctgcctttattcccagggcatggagaacagagacaaacggatctctgaagtcaaggccagtttgacctacttagcaaacaacatgccaacccaaggctatatagtgaagaactgggggtgggaggagagaaatatatatagtggagggagcctcactacaactatgcaggtaggacaagggtgggtttggaaacgccagactgagtacagaccccattttctggagtcaggattgaagactccttgagggttctgtgctggagaagatcaaagccacgttgtgttgtctgtctgtctttgtattttttctttcttttgcttattgtttgagagaggatctttcattgctgaggctgaccttgaaactcttgatcctcctacctcagcctccagagtgctgggatagcagacatatgctattatgcccagtaggcttggctttcttttaggaaggttcttttgtctgcattataaaaggaggtggatcagaaaagatgacagaggctaggcgctgggtgggaggaaaaggcgaggtagggaggggatatattgacagactcccacaagccaagtgagctgagactggggctgggaaaggagtgcccacagcgagtcaggagcctgtgggccagctagtcacgcctcatgggagaatccagggagtggagtgggtttcgaggagacctcagtgggaataccctaagggctgtccatggaaggtgtccagatcctagattcctgagtaggtgttggagagaaagagcagtggtagcagctgtgcccttggccccgcctaaggctctgtcaccctggttctgtctttagttggtctctccactgagtggcactaaagctgctttcca

SEQ ID NO: 32348 - DNA, 1197 bp, Mus musculus
gcctcccagcaccgtgtgctccccgagggagccacctgtgatgaagaagaggatgaggtgcagcttcggtccaccaggtgtgcagataagttagggtcctggacctggtcagaaagggtcctaaaggggagttgactggataccaacttatgtggtattttgtcccataccagacgtgccaccagcctggagcttcctatggccatgcgctttcgtcatctcaaaaagacatccaaagaggctgtgggagtctacaggttagtggggttgtggggtgccccttgggtggacagataggagccatgacgaggagctgactggtgtctgtcccccatccccgagttcactgtggtttgttctgtcccgcagatcagctatccatggacgaggtctgttttgtaaacgcaacatcgatgcgggagagatggtcattgagtactctggcattgtcattcgctctgtgctgactgacaagcgagagaagttctatgatgggaaggtaagtggcgtgaaggtttgaggtgagtggatgtgggctgaccttgacagagaactaattccttcgtcccgtgctgtagggtattgggtgctacatgttccgcatggatgactttgatgtggtggacgccaccatgcacggcaatgctgcccgattcatcaaccactcatgtgagcccaactgcttctctcgtgtcatccatgtggaaggccagaaacacattgtcatctttgccttgcgccgcatcctgcgaggtgaggagctcacctatgactacaagtttcctatcgaggatgccagcaacaagctgccctgcaactgtggcgccaagcgctgccgtcgctttcttaactgaggccatggctgcccggattcctcacgtgcccgctgccatctcaccctggcctgtggctccctagtctcagtatctcactcctaccttcctgtccatggtgaatgtgggcatgtagtggggcaggagtctgccttcacccctcctgcctacccagccattgcctccttcctccttccctggggacccaggatgtagatattgtacaaaggtttctaaatcccttcttttctatgcacttttttatttaagagggcggggtcccaggtgggaatccccccacaataaagtctgtcagcgtttggagaggtggtctttccgtgccttattactgtggttgttgtgt

SEQ ID NO: 32349 - DNA, 1133 bp, Mus musculus
gtgagcctgtagcacccccagtaaagcagccccctctaccccccatcattcccccaacagctcccacctcctggactctgcccccaggacccctgctcagtgtgttaccagtggtaggggtaggagtggtccggcctgccccacccccacctccacccccactaacactggtgtttagcagtgggccccccagcccaccacgccaggccattcgtgtcaagagggtatccaccttctctggccgatcccctccagttcctcccccaaacaaaactccccggctggatgaagatggagagtccttggaggatgcccatcatgtgccagggatcagtggcagtgggtgagtgcgtctctaaggctggggctggcaggctagggaggtaggcaggaggaggaggacacgtgggctttctgtgctgcttttcaggttcagtcgtgttcgcatgaaaacgcccacagtccgtggagttctggacctgaacaatcctggggagcagcctgaggaggaaagccctgggtgagtgaccgggtcccctccctgaggctctggacaccccctcccggtaatttttgcctcctgacaggtctttgttgacaggcgcccccaggaccggtgtcctttgctgccacttgcagaagctccttcccaggccctcgatggttcctcagacctactgtttgagtcccagtggcatcactattcaggtagagaccagcttttcctctcatcgcctccttgtgctgggcccggtggagactgacagaacctggattggttcactcgaaacacagtacacaccatgggctaattgggttcattttctaacactagaaaacaacaacaaaaaccctacataagctcagtgtgtagaaacccaaggctcggtgctaagagttacggactgttagggagctcctggcctcatgacagcagaattggggctagaaatcagtatctgggaggtggtggcacttggggagcagaggcaagtgagtctctgtaggtttgaagccagtctagagatggagttgcaggataaccagggccacatagagaaaccctgtctcaaaaacaccacaaaagaaatcagatttaataatgtatctttgtagctgcaggctgagccaga

SEQ ID NO: 32350 - DNA, 1205 bp, Mus musculus
tgcagctcaaggcccgaaggcgcctggacaaggtcagcacggcccgctccgagaaccccaagccctgtgtgaggcatggctcctgctctccaggagctacctggcaagtcagggtgatgggcacacctgagtgtcgtggtgtgtcctcaccagaggacaggtcctgagggatgaggcaggccttgcctttctggaaagccaagtgggatctgggcaaaaggcagggtatggcaggttgggggaggccagtgaggagaggagtctgcagaggggtggggttggcatcttttgacaaccccatgtccctccttaggatgctttagcccctggcccctttgcctcttttcccaatggctggactggaaagcagaagtctcctgacggtgtgcaccgggtccgagtagattttaaggtacagggttgagagcaacttagagcatgcagtggatgaaacttctttattgtaaccagagctttcaacgtggatctgacttgtgttcctggctgctttccaatcctgtgtcctctcttaccccaggaggattgcgacctagagaatgtgtggcttatgggtggtctcagtgtgctgacttctgtgccaggggggccaccgatggtgtgtctgctgtgtgctagcaaaggcctccatgaggttggtgctttgtccttttatttttcttaaaaaacaaaacaaaacagaaacaaaaaaacaagacagtcctggcctccaagtctccatttgccattcctgacctggagctctcaggcagggatcacctcccggctgtccgtccagcctcatgctgtctgtctgtcgtttccttacccctcctagctggttttttgccaagtctgctgcgatcctttccaccccttctgtctggaggaggctgagcggccctcacctcagcatcgtgacacctggtgctgcaggcgctgcaagttctgccatgtttgtgggcgcaaaggccgagggtccaaggtggggcactggcagccctgggcaggtagggcctggggaggggcgacctcatgcagtctcctgtacactccgttcccctccactgcctgcagcacctcctggaatgtgaacgctgtcgtcatgcttaccacccagcctgcctgggacccagctacccaacccgggccacgcgtagacggcgccactgggtgagagacgagccacgtcccttagtcctgcattc

SEQ ID NO: 32351 - DNA, 1139 bp, Mus musculus
ctgaagatgaatccatggaagctaagagagatcgagcctcggtatgcagtgagaggagggtcttctgaagaaggctggctgcagaaccacatggaaccatttcccacacctcttcctggtttttcctctctcagggccctgagtcacctttacaaggcccccgaatcaaacatgtctgccgtcacgctgctgtggccttgggtcaggctcgggccatggtgcctgaagatgtaccccgcctcagtgccctccctctccgggatcggcaggacctcgccactgagggtaggggacttgagtagtgggaggcttgaggacaaataaggtttgtgcatgagcaagagtaccagggagctgagcagaggaattggatggggcttagggggcagatgggttgcagtgctgctaggtcttggacagatctggttaggtccagaatacctagagtcagtgtggaaaagcagagggaaagtagggaaatgaggtaggatacctagtggctttgtggctctgtctcccctccatctgctgcaatagatacgtcatcagcatcagagactgagagtgtcccttcccgatcccagcgggaaaaggtggaatctgcagggcctgggggagactcggagcctacagggtctacaggggccctggcccacacaccacggcggtcactgccatcccaccatggcaagaagatgagaatggctcgttgtgggcactgtcggggttgcttgcgtgtgcaggactgtggctcttgtgtcaactgcttggataaacctaaatttgggggtcccaacactaagaagcagtgctgtgtgtaagtagctggagtgtagcctctggtcccacctggggttgtcagtcacctgagcctcttgtcccagccagagcagtgggatgggcatccttgtggagagcttcctctcttcccccagaccaccagtccctaccctggtgacgtgctgctcccctccccagataccggaagtgtgacaagatagaggctcggaagatggagcggctggcaaaaaaaggtaataaggcttggagagggtttcttcacaaaaccttacatagatagcggggtggcagaggccatgttttctttgctttccactcgtgcctttgcatttgacacg

SEQ ID NO: 32352 - DNA, 1226 bp, Mus musculus
ctcctcctcttgtcccagctacatgctctaggaagaggggcaggcctcccctgactcctagccagcgggcagagagggaagctgctcggtcaggaccagagggcaccctttctcccactccaaaccctagcaccaccacaggaagccctttggaagacagtcctactgtggtccccaaaagtaccacctttttaaagaatatacggcagtttattatgcctgtagtgagtgctcgctcctcccgtgttatcaagacaccccggcgatttatggatgaagatcctcccaaacctccaaaggtggaggcttctattgttcgacctcctgttgcaacctccccacctgctccccaggaaccagtaccagtctcctctccacctcgtgtcccaactcccccatctaccccagtcccactccctgagaagaggcggtctatcctaagggaacccacatttcgctggacctcactaacccgggagctgccgccacctccacctgctcctccaccagccccatctccaccacctgcccctgccactccctcccggaggcccttgctccttcgggcccctcagtttaccccaagtgaagcccacctgaagatctatgaatcggtgcttacccctcctcctcttggggctcttgaaacccctgagccagagctgcctcctgctgatgactctccagcagagcctgagcctagggcagtggggcggaccaatcacctcagcttgcctcgctttgtccctgtggtcaccagtcctgttaaggttgaggtgcccccccatggagctccagctctgagtgaaggccagcagcttcagctccagcagcccccgcaggccttgcagacccagctcctaccccaggcactaccaccacagcaaccacaagcgcagccacctccatcaccacaacacacaccaccactggaaaaggcccgtgttgcaagtctgggttccctgccactatctggggtggaggagaaaatgtttagccttcttaagagagctaaggtgcagttattcaagatcgatcaacagcaacagcagaaagtggcggcttcaatgccggtgagtgtgttactttgagcaagtccctgcactcagtctagataagtgtttagccggacatgcaggaccagtttcccttttacctcccaattgtttctaccctgaccctatcccttccctctcctattcccctgttcccactggtcttcactt

SEQ ID NO: 32353 - DNA, 1102 bp, Mus musculus
tggcagtcagcactcaggaggcagaggcagatggatctctgtgagttcatggacagtctggtctacagagcaagttccaggacaaccagggctaagagagaacccctatcttgaaaaaccaacacacacacacacacacacacacacacacactgttacactatgtgtgggtatctgtgggtatgtgcatgagaatgcagatacccaaggagacctgcaggaggtgtcaggtcacttggctctagattacatgcagctgtgagggtgcttggagccaaaccaggttctctgcaagaacagttaccggtgaccctgggtttcctgcctattcttccacgggctgtcaagttgtatagtgtagtgactttgtctttttgggtcacctgattccctgggacagtggtggtcacaggagacacctgtggtcgtctgttggtcacatgcactggtgggcaaagtgggaaaacaagtctgccctgtggtgttggcgcaggggaagttataccacttgtctcttacaggtctcagcctgggatgaccgcatagctgaaggcacatttcctgggaagatctgacctggctccgcccacctctcctctgttctttgtctttctccccggatagaaaagggggacctcagcatatgatggtccttaccctgggaccctgaatcatgatgcaactactaataaaaactcactggaaaagtttcacattgtgtgtattacacagctggacaagaaggccgggtacccggcccagaaggggcctcacggtggttatctttcttgtttttaaaatgaagggtagatttctttgtaaagatttattattgtgtgtgtgtgtgtgtgtgtgtgtgtgtgcacgcacttgtgtgagtgtgcctgaagggaccagaagagagttgggcttgagctcagggaaccaaaccccagtcctctgcaagaacagcaagtgtttggctgctttatgtgcatgtgtacagtgtggcagctcacaacgggtataactccaaccccaagatatctgatgccctcttccagcttctgcaagcactgcacacacatggaactaaacaagggtcctctggaggaacagccag

SEQ ID NO: 32354 - DNA, 1207 bp, Mus musculus
ttaggcaatcccacaatgcatttaggcatattctgagcaaagtttgagttcattggacctcagatgagtgtgtgacgccagaaaactagccggtgacaccagaaaatccttgcagtgtttttgctggtgatggatgaagcattatcactgggtgctgtgtgaccttggaaagtcatttagacaccctgtcccttgtgtagacaacagaggtagcaatatcttttagagtggccatggggtaggtatgtatagagtacacatagtatgtgctgtgcacacagtgagcgttaactggaatttaaggatgaagattggttttgccaaggagacctctgtccaaccctactgtggcttctgtactcagatatatgggttttccctgcccttcatctttctgtgtttgtgaagaagggggagataatggtttattcacattcagcctgttattctgctctggcctgacatccccacacccagcacctccagaatggttgccaacattcccactctgtttgcatccaggagtcaggatggctgaagacatcaagactaaaatcaagaactacaaaactgccccctttgacagccgcttccccaaccagaaccagactaagaactgttggcagaactacctgggtaagcagagtaccatagtgggcctgcctgggtctcccatgtacctccaacctcagaaaggaagttggggagcagggacatgtgcgttccagcctggtttccttcactctggacgtaccctctggagggcccgacccctcaaactagctctccaggtcataaactttggtctcaacaataaattttttgaagaatataattatacatgtatatatgaattacatatacatcttatgtgtgtgccacatacacacacaacatacaagtaaatacagtatgtaaacagttgattcaggggctggtgagatggctcagcaggtaagagcactgactgctcttccgaaggtcctgagttcaaatcccagcaaccacatggtggcttaacagccacccgtaatgatatctgacgccctcttctggtgcatctgaggacagctacagtgtacttgatatattaataaataaatctttaaaaaaaaagttgattcagacatagtcacaatccatggataaaaatgaatattgccagtactctgctctcagcttgctttgggcccggtcttaaacactg

SEQ ID NO: 32355 - DNA, 1156 bp, Mus musculus
aagttgaacaagggaagggcaaggaagagtgcaggagtcggttcacctggtccccgtgtttactcgagcctctacctgacccacaggaattcatgaaggccagtgtggatgtggcagacctgataggcctaaaccttgtcatgtctcggaatgcaggcaagggggagtacaagattatggttgctgccctgggctgggccactgctgaactcattatgtcccggtgtgtggagcaaactggagcccagacttccgggaatggacagctgggtcccacaggggtgctgaggggaggtgatcagaggctgggtgctgggggtgggggagtctgggtactagagactgcctccttttgccttcctcagatgcatccccctctgggtgggagcccgaggcattgaatttgactggaaatatatccagatgagcattgactccaacatcagtctggtatgcagtctagccctagcctacctttatgttgttagccatacttctcccaaaaacttggctccaacttcccagtcccttcctgcctccctgcaggtccactacatcgttgcatcagctcaggtctggatgataacacgctatgacctgtaccacaccttccggcctgctgttctcctcctgatgttccttagtgtctacaaggcctttgtcatggagtgagctgggtggggtatgaggctgggttcaaatgggggtgtgttttctctctccttttcctcattgtgatgtttccccacaggaccttcgtccacctcttctccttgggtagttggacagcactgctcgcccgggcagtagtaacaggactgctggccctcagcaccttggccctgtatgttgctgttgtcaatgtacactcctagcttgacatctcaggtgttggcgaaccttttcatttcctctctccagatttcagtgaagtaaacagtgtttggaaaggtttttgttatgtccatctctctctctcagaaaccgaatcctcggacttaggtctcacagagtctgtctggcttcagaaccagataaataagctggaatgttggccagtcttcctggtttccccatgagaacctgggggcttggtaatcattgaacaagctaaggaatgaacacactagagttcaggagggggctttggggtaga

SEQ ID NO: 32356 - DNA, 1161 bp, Mus musculus
gacaggatctatacaggaaacctgggaaacagaagaccgagcctcagctaaaaaggctcagctgtgtcagactcaagttatctatttgagatacaccattcgaggtggaaaacagtggctaaaagaagccagaaaaagactgtaattacaccaaggcaagtaagagaatttttgggtaccgctggcttctacagactctagatacctgggttggtgaccttagctgcccgttgtacccactaaccaaggaaggggaagtgtttgtgtggaccccagatcaccagaaagcttttagagaaatgaaaaaggccctactgatggccagcctttgcctgacctaaccaagcctttcactctttatgtggaagagagatcaggagtcaccagaggtgtccttactcagactttgggactttgaaaaaggccagtggcttacctatccaagaagttagaccctgttgccagtgggtggtttcttgcctgaaagctattgctgccatagctctgcttgtcaaggatgctgataagctcactctgggacagcaaatagctatagtggcaccccacactcttgaaagcattatctgaaagccccctgactgatggatgacgaccaacactcctgtgacacattatcagagcttttttttgactggacgagtgatctttgctccacctgctgtcctcaatctctctaccctactgcccaagactttacctactcatcactgcgctgacgttctggcagaagaaactggtacttgaaatgatctgaaggatcagatcagccttgtcctgagagtttgagctggtacacggatggcagtagccttgcggttgaaggactgagatggccaatgtgatagtcaagaagatcctagaagaagtcttcccaaggtaatggacttgcctttgttgcccaggtaaatcagggactggccaagatattgggaattgattagaagttacattgtgcatacaggctccaaagctcaggacaggtagaaaagatgaatagaattctaaaagagactggtgcagacttggtgctccttccccatgcccatcactgtcttaaatcatgtgtttaaacctacatgttgctgtaataataatctgtatgctaagttaaaaggcttgcaggtggtacagaaagaaggc

SEQ ID NO: 32357 - DNA, 1186 bp, Mus musculus
tcacagtagcacctttaacaacgtcaggaaatttatccatgctaagtatacaaccaatctttaaaaataaatttgcaaatatgtactctattttcacagccccagaaaaatcccttctgtttcttacaccattatctctctatctcccaattactaatctactttctgttttaaaatattttcctattctggacatttcatgcaaatgaaactgtgtgagacagagcctgctatgcctagcttgcttcacttagcacacattttagggttcatccatgtggtgtgcttgggtagttcacccctgattatgccattatcccgatgcatctgtctgttgaggggtcatttccgcctgtgagccaaggtcactaggtctgggatgaggatgacgcatgagccagtgtttgagaatgtgcgcgtgttcaagcctcttcaataaatattcatagcagaattattggtattgtgtaaatgtatgttcaactttttagttgaaccgaattgatttccaaagtgctatcccatggtgcgttcccctcagccatcaacaaacactgcgctgtccctccatctttgccggaacttggttccgactagtgttctgctgacagccattctggtgtgcgcttgttggtttggtgctctgttccataagtatgtgagcaaatgggtatgctatctttgaagataaacagagccagatgcaaaacatgttcccccaccctaccccaccgaagggatgcctaagaaggaaggggacctggagagccacctccctgtcatgagcgaaaggatggtagacataaaacagtggtaccctgagggcctgttgtggattatgcccccattgaaagataactgctgtcactattatctgcaccagcaccagcaccttcaccaccatcatcccagatcttttcctgcaccacaaggacccctgcaggaagagaggcagactctactttatatacttagcatgcttcgttttatttgggacagggtttcatttagcccaggttagcctcaaactgtgtgtagctaggagttgatggtgaccctgaactcctgatcttcctccctaacgtctgggttacaggtatgcaccaccacacacacctgctctctgtgctggggctggaactcagggcttcaggcaggatcggcaagtgctctaccaactgagccc

SEQ ID NO: 32358 - DNA, 1220 bp, Mus musculus
tgttgaccatgcagttataatttccagaatcttctggggagacggagccgaagctcaggtacctcccttcctgcacgagactcccattcttcttccagaagaagcggacctctgccgggttgctctctgcgaagtcgcattggaggaggacacgctgcccagcgcggatctctgatgcggggcttaccttcagtaccttcacgtctctgggggcgtctgcagggccacagcctcaggtgatgttttggttttcttcccttcttgatgtccccaaagtttcctgtccccttgattaggacaccctgtctccttggcgctgagccctgtgcgtcctccctcaaccctctcttttggcctgtggcccgagtccccatcccctcccctcactctcccacccacagatctcaatgtgacctcctcctgggcaccccatatcactcacagtggacattcaggatgacagggagggcccacgaacacttgtggttgcaggcagcacagctgacaggcatggaatcccatgtcactttctgaatcctcagcactccgggtttgagcacactcccagaaccttgagggttccatctgtaggaggtgacgtctggattgctggagttgtacctacagaccagggtcacactgtctccttccaggattggtgtgaagctctgaatcactgtggtcaccgccttgggagcatcttagggtagaatggagaggcaagcaaagatggagaggcaagcaaagaatgatttcttttctttccctttgcaagcaccagacaccacacgtgaggtcttacatgggctaggcaagagttctaccactgaatgaactatatcactagccctaacctatttctctttctttctttctttctttctttctttctttctttctttctttctttctttctttctttctttctttctctctctctctctctctctctctctctctctctctctttctttctttctttctttttttctttttctttttttttttccaagatagggtttctctgtgtagccctggctgtcctggaactcactttgtagaccaggctggcctcgaactcagaaatccacctgcctctgcctcccgagtgctgggattaaaggtgtgtgccaccacacccggctccctatttttcttttttaaccttttatttttgagtcacagtcttcttaatttgcacaggtcagccttgaacttga

SEQ ID NO: 32359 - DNA, 1833 bp, Mus musculus
tgcaggagaccttcaaggaggcagagcggctgcagatggacaatgagctcctcaggcagcaggtgggtacaggcctggaatccacgggggcccagtgtgccaaggcctaaccctggctcccgtgtcccccatggtgcctgcagatcgaggagctgaagaatgagaatgccctgcttcgagcccagctacagcagcacaacctggaaatggtgggcgagagtacccggcagtgatgcccgccggctcacccttcagctgctgtcggcctctgctgcccctcccccagcccttagcacagagagggagatgcccctccccaagctgcgtttttttatagtagatttttaacaaaaacaaggagacataatgcatttctgttgatacgttgcccactaccctcctccatgcgaaaacgatgcccacctgcccatctgtccatcagcctcccttctcggtcctcaccagcccatcacttatagtgggctcatcaggaggagcaggggaggaggacagaggccccgctgcccgctgcctccttggtctctagaggtattgagacagggtgctcatgggaaggagggagctttggggatgcgggccttccctggggcttggacctttgcagggaggccatgcccgccacccctcttgttctggatccctgctcccctctgggtgtgtgggtgtgtgtgtacgtttgggtgtgtgtgtatgcgcgtgtgtgcgtgtgtgtgttttaattttctttatggaaaatggacaaaaaatagagagagaggtatttaactgcaataaactggccagtgtggccccgccttgtctgtctgtgtgtccatgttgggcatggggttgggtagggttcctagggtctccctgatatctaagctacagttatactgtagctgtgtgacaatggctgggggcattaactgaggccctggggtgctgattaggggtgtgggagctgaggtcaaggacatacccctgctgttagaggggaggctggagtatccctgggctctggggctgaagccctccctctgtaccagccaatgatgagggctggccttgagccccccacccccaagagagggcagatggccagaaagccaggcttggcccggcagtctgtcgcctcaaattgtagctctggcgcctgtgctgtgacccttgtggcccttggctgatgatgaaacctgtcctgagaagccacagtgatggttggcggggtcggggaataccatcatgtccccaagagattggctcaccattcccaggatggaggcctgcgcgtcaggttccctttgctacactttgtaccttgcctcaatctaagtactcctgttggcccctggtgtcttgagaaccctgtctcgagctggagagatggctcatcagttaagagcacctgctgctcttccataggtcctgagttcaattcccagcaaccacatgatggctcacaaacctctgtaatgggatccgatgccctctttagtgtgtctgaagacatcgaccgtgtactcatataaattaagtaaataaaacttaaaaaaaaaaatgaaccctgtctttggccttaccacttccaaaagtcctctttgaggaagcatgtggaacacatgaacagcccaatgagcagcaacagaggggtagaagccttcccaggttctggacagaactgactggatgctccctgtgtaactcaggaatgccgtccagtagtttatctctggagtcaaagtttgataatatctcaggctgctcataccaaggggtccaggtaatagaaagagcaccacacaggctttagtagtactccaagaactagct

SEQ ID NO: 32360 - DNA, 1100 bp, Mus musculus
gctgtgtaaggtctggtcagagttttgcacaggcgttggatagggtcttttggagttacttttcattgcaaaactggaaaacttcttagaggaaagagtagagctaatgatggttgaatggtgtcagagacgagattctgtacagaatggcacacacagtaggctacgcccttgcctcaccgtatagtaaacaaacaccgataccagtaacaaagatggcatagcaggggtggctaaggatggcctatgtgtactcctccctaggctgtaattcaaaatccattcagcaatggtggcagcccggcggccgaagctgtcagcggggaggcacgatttgcttattttccagcatccagtgtgggcgataccacagctgtgtctgttcaaactacagaccagagcctacaggccggaggtaaggggaaggaagggttctgaggtaaagctagggaaaccatttaagcagttccagcttgacccattactgatgttcgctgcacattccctgcaggccagttctatgtcatgatgacaccccaggatgtgcttcagacaggcacacagaggacaattgcaccccggacacacccctattctccgtatgtgccagtcccattgttggagccagagggaagggagggtttcagggctggtcagcatacagcaggagtggggtatgggttttatgagcttctgcttcggaagtatcagtttaaatttttttcatctatttccaccctctcttcacggggatttgctttgaaagataactgtgaagagctaacccaatggtagcctagcattctgcgaagccctgggttcaatccccagtaccttaaaaacaaaggtgtttgtcaagtctgatagcttggtaaatgctgtcgtttccccttctgctttaggaaaattgatggaaccagaactcctcgagatgagagaagaagagctcagcacaatgaaggtaaggatggcggagtgctcctgggtgccttgagcccattgcctgacatgtccagatgctggagacgtgcatgctgagtggttaggtcagtgctgattggcggaggacggcaagatgttgggaaagatggagggcgtgc

SEQ ID NO: 32361 - DNA, 1102 bp, Mus musculus
tgccccttgccgcctccgccctgccccgccccgacgtgcgcatgcgccttcgggagcgcgcgagcgcgcaacccggctccccaacctccgggctcctatacgacctacttttacagtcttcaaaccctgtgccccggcgatctgagccccgcatccgtgttgccggccttccagccgggcctgcgttccaaccggtggtggtcccgtgtagagtccccgggcctatgtgtgtgtacgcgcccggccgtcaccaaagacagacagcgcgcgcgttccctagggcctgccctctcccgcgcgcgcgcgcgcgcccgcccgccccgggatcgcgccgtcgccgccaccgcgcgcgcgcagctccagtaaaggaggaaaaaaaaaaaaaaaaggaaaaagagaaggggggggggtgatagaaagcggcggcagctgcagccacaatccgccgccgccggaccgggctaggccgggcggcgggcgcgggagctggcgatctgggcaacagggcggccgccatccgggcagggccctgttgaaaaaaaaaaaaaaaaaaaaagctcaagtcgcggcggcggcggcggcgagcgctcagggaagcaggccccaggccgcgtgcggcgggccggcgggcggggggcagctgagctgtggcccggagcctcgcaccgcccggagccggcggcgggcggaggcggcaggaggaggcggcagctgcaggagtagcggcggcggcggcggcggcggcggcggcatctcctcctcacatgaccccactgtttgtccccgtgatcagcgcaagcggctcccgtgtctcctccgtcccctcctgccgcgcggcgtgagcgccgggctcgggcccccccggccgcccgccccctcccctccctcccctcccctcccccccgccccccccatggacatgctggacccgggtctggatcccgcttcctcggccaccgctgctgccgccgccaggtaagcgcgccgacagctcgcgcccctccgcgcgccctgggccccggcccctcgagccccgcgcgcaggggccgccatgatcccgagcggcctctgggcccggctcaaaatggaggccgcggggagg

SEQ ID NO: 32362 - DNA, 1160 bp, Mus musculus
gttgaccatatggcttgtggcagagatggtgtactgctacaagaagattgctgctgctacggaggctgctgcacaagagaacgcgtgagtggggctggtagggagggctggggccatttaggtgccatctgtcgttcagagtatctgtgtcagaggcaaatagtgtagttgctcgcagatgaggaaaacggaaacccagagaacaagagggtggcactgctgccaggcagcaaagccgcaactcgaacccaagccttctggttggcagagttacagcttgtcggtcctgggcctccacagattcctgaatgtcccataggtaccctgtagttagaggcctctcattcagactcggggcgggggggggggagcccagtccacagccctctctaatctcgggggcccgggggcctaaggcagggactctagtctatcccattctattcagggttgggcccggagggtcactgtctgcctttccttcccttgcacagctcagaatacctggccattacatccgagagcaaagaaaactgtacaggcgtccaggtggctgaatagcgctggtaaggttgatggaccgacgggtctgcgcatcgccagccaggagggctcagggacacactcttaagtctccacttcttaccctgcaggctctgggctccgcctcatggaagagccagcccctacgggtaccctcccgccctgcagtggggatcagcccctggtgggtaccctcccccggcagtggggatcagcccttcggtctccccagcctcacagttctgcagtggagccacgagggtgggagcgggcagggactgatcccacctcacccaccgcctcccacctaccctcccaccgccatgcatgatgggtgaagcaatatggccgccccaccctgcttttgctgcctgtttgggggagggggcggtgaggcgagggggcaggccccgccccttctttttgctgatttgcacataggccacttcccacacgcactgccaggccagccggccccacccctgcttgatggggtcaagaggggtcgggacagggacagtagtgggcaggaggttctgggcctcatctcccctccgcttcctccggctggacctggggttcccttcctgtgacacctcctagccctggcccacccg

SEQ ID NO: 32363 - DNA, 1169 bp, Mus musculus
acagggctgttctacctcagaatgctgaggcaggacaaccaaaagttcagtcccagtctagactactgagtttaaagccaatctgtacagcttagtgagagaccccgcctcaaaataaaaagtaaaagggggtctgggacgtggctcagtggtagagcccctgcctagaaccccccagtgaggggctggaggtgtggctcagtggtaaaatatccactaagcgtataccaggttctaggttcaattcccactcagcaaaaaaggaaaaaaaaattgcagagcaaagaagaacaagggcaatgtggacagggagaccggcatgaactaaagattatatgggggagacatatttgaagaaacttcctgggggagcagagatggcctagtgggtaaatatgcttcactaaacccagccacccatgttgtattcctgggatccacacggtagaggggaccaattgctgaagaagttcctgaaagagaaaatagaccacttgtactccaaagtagatctgtgtactgaagttagaatccttcccagaaaccgctgtgcctcccactgtaaaactggacagtcctgggcccaggcacacagtgtttttgagcagcgataaaatcaatcactcggagtgtttgacagaatcctgataagaagtcaacaaagatgtcctttaaagtccctgcctctcatccccgccgcccttatggctgtcggtgtttgcacagttaccagaatgttctgtttgcttaacgtccacctctggcaggatgttaactcgccagatccaagacttcaggtctctgttagtgctgggcgcagccagatcagggccattcattcagtcccacggtgtttataagcattaattatgggccctgtctctaggtgctaaggataccgacagcaaccaagacttcctccagttcacagtttagggcaggcaataaagaaactgtgtaaacaaatgaacagggtgagtggagatagtgtgggtgagtcaggaggagggagggagctctttagggctgagggacgatggaggaggagggctgaggatggagtccgttatgctgaagctgtgggtgggcttgttagatggaggggaccacagatgcagggtgtgaccctaggagcttagagaacaagaggaggctggaatgactgggac

SEQ ID NO: 32364 - DNA, 1180 bp, Mus musculus
gaatgcatgtctgggtcactgggtcccatgactaggtgccgtgtgaatagttttgttgtgggtttcgctgtttgttttgctcttcagtgtaaaactttctcgtggttgtgtataggacgctgatttatgtggacttactgtgtttctctgattctgggatgctgtgcgactgtagcatatttgtagcgagcgtgcatgtgtgtgtgtgtgtgtgtgtgtgtgtgtgtgtgtgtgtgtgtgtaaaacgttcctggcagttgtgtatgaatttgacacacttacaatgctgtggttgtttatgcttgtgacacttctgtacgtgtgaacggcagagagacaggtgggagagacttcgttcacctgcaggccagtttgcctgggaccctctgtgtccccagccatctttccctttcccacacacctgtgtgtgctcttgcccctctgtgctgaggccgatcctgaggcccaggacgcagagcatctgcacagtgaaaacgccattctcttccgagtctccgccccttaacggtcctcctctcgccactctgacccctcccttcactctctcaggactggctggctggctggctggctggctggctggctggctggctttggccaccctagggctctgctacccgcccttgagaacttcctctttgtctcttccaagagcaagagggatgaacttggcttgtctgtgccttcagcctgccattgagtggacctggggcttcagaatcaatcaggcccgaatcttagcccagaggtgagaagagaccacaggaacccccggggccttctgctctctagaaacgtgcagggtggcccagggtcctcagttctgctggtcgcttgctgttctcagacctgccagcctccttcctggccctgaacttgacgctttgagagagtccagcactgtctcccccacatttcgccagctctgttctttgtccccagcccttggcctcagtaagcctggcccagctaagccctttgcagtcagtctggctcacttaagaaaccctctctgctcctaattattctgtcagaattcaatgtgcatcagattttaagttgaggtttctgatgccggtgggggtggagatttacatttgagttttgtttctcttttgttttgtggcagtcctggtgatggactccaaggctttgtaca

SEQ ID NO: 32365 - DNA, 1183 bp, Mus musculus
atggggattgcattgaatctatagattgcttttggcaagatagccatttttacaatgttgatcctgccaatccatgagcatgggagatctttccaccttcggagatcttctttaatttctttcttcagagacttgaagtttttatcatacagatctttcacttctttagttagagtcactccgagatattttatattatttgtgactattgagaagggtgttgtttccctaatttctttctcagcctgtttattctttgtgtagagaaaggccattgacttgtttgagttaattttatatccagctacttcaccgaagctgtttatcaggtttaggagttctctggtggaatttttagggtcacttatatatactatcatatcatctgcaaaaagtgatattttgacttcctcctttccaatttgtatccccttgatctccttttgttgtcgaattgctctggctaatacttcaagtactatgttgaaaaggtagggataaagtgggcagccttgtctagtccctgattttagtgggattgcttccagcttctctccatttactttgatgttggctcctggtttgctgtagattgctttatcatgtttaggtatgggccttgaattcctgatctttccagaacttttatcatgaatgggtgttggatcttgtcaaatgctttttctgcatctaacgagatgatcatgtggtttttgtctttgagtttgtttatatagtggattacattgatggattttggtatattaaaccatccctgcatccctggaataaaacctacttggtcaggatggatgattgctttaatgtgttcttagattcggttagcgagaattttattgaggatttttgcatcgatattcataagagaaattggtctgaagttctctatctttgttggatctttctgtggtttaggtatcagagtaatagtggcttcataaaatgagttgggtagagtactttctacttctatcttgtgaaaaagtttgtgcagaactggaattagatcttctttgaaggtctgatagaactctgcactaaatctgtctggtcctgggctttttttggctgggagactatttataactgcttcaatttctttaggggatatgggactgtttagaaggtcaacttgatcctgattcaactttggtacctgtta

SEQ ID NO: 32366 - DNA, 1593 bp, Mus musculus
gagagagagagagagagagaaagtatccatgcctctgtgtagagaacagagtcagatctggagctggtgagagtctggattgttctatgagtaaaagccatgagctattgtgttcatggttgtggagcaagttcttagtgctgagctaaggttccagcaaccacctacccccacacaccttgttaaaaaccatagcttgtgaagctggacaatgtggtgccacctttaatcccagcactcaggaggcagaggcagaggtaagtggatctctgtgaattggaggtcagctaggctcctccaatacagtgaattccagtacagacaggtatagagagatcctgtttcaaaaacaaaaaacctgcaatagctcattaggctgagcccacagttactacccatccctgccctttccctgagactggacttggcgcagccgccatacctgccccaaccccattgtctctttggtgaggatgcccttcctcctgcttgctggggttcagagttgtgtttttcctttctcaggactgtgggctgcagctgagtggggaggagggacgccgctgctatcccctggaggggcacctgctctgccggcgatgccacctgaggcgccttgggcagggcccgctcccctcgcctgctgtgcatgtgactgagctctgagaagcagcggtcacagagaggagaggagtggcccacgctcctccccacccgcaggggccggacccccgcaacaaagaagcgatttctatttattcaccttctgtgcctcaagtcacttcccctgctggattccaggacactcgcacagtagactaccttcctccgaccggtctcagctcccatggcagggattggagggtcttggagctggtgggggacaggtgccttatttgtgtgcgaccacagagccagggagtatcaacatcctgggaaataccacgatttggccttgatgggtattttcagctgcagttctcctcctctctggatcctggcttggggtgcttttccagcatccacagtctcagaagacccaggagcagaggggggtggggctcatgagggggctcccttacagaccctgccagcgaacatctgtgcacactatatcaggctccactaccaaagcgtatgatttgacttaaattaagttttttcccttctggaggatgtttgcattttctttaaaagaatatagttttcttctaaaaacttggaccatggtggttatttctcattcacagcagacttgctcatggaaacacattcgtataccgtgtagttagtgttatgaaatataattggcagggagtggggtgggtggagtgcctggtgggctcatgccaagggccccctgagaaatcacgccatgtaacagatctggtataatggggtttattcaggggaagggaggggagtgagagcctagagaaggggtagaggcagaggagtgaagacatagacagatgggaacaaagccatgagggcagagaagggcagaaagggagcgactggtgggaactgttagctgtcgctagctgttaactgttgctttgttcattttcattttttctaaacattattaaa

SEQ ID NO: 32367 - DNA, 1201 bp, Mus musculus
ggtttagttcgttatcatcatgggggaagcgtggcagtgtccagggagacactgtgctggaggagccaagagttctacatcttgatccaaatgtactgggtggagcctgagcataggagccctcaaagtccacctacacagtgacacacttcctccaacaaggccacatctactccctgtggccacatattcaaaaacatgaatgaatctatggggccaccgagctactaagtcttaggatctgatttcaatccttaggacccacgtggaggaagagacaactgatttttacaagttgtcctctgacctacacaggcatgccatggcatacccacactcagacaaatagcacatatgccggaaaaaaaaaggtcaaagttcccaaagagacccattgaggatataccccccaaagacgcacaaatctcttcagtggatcaaccacttcctccatggacaagagactaagcctccttttttctttggtttttgaaatagggtctcattgtgtggcccttcttgtcttagaactcccttgtatctgcactgggacacacatcatgagtgtgctgttagtactctattgctgagctagatttccagcctttggattattttgatagcccaggctggactccaacccagtctcctacttcagcctcctggggtcacagtctgatatgtgctggggattttgtcctttgagacaccgatcttgctataaagcaatggctggcctggaacttgaaattttctttttttcaagacaggtttttttctgtgtagccctggctgtcctagaactcactctgtagaccaggctggcctcgaactcagaaatctgcctgcctctgcctcccaagtgctgggattaaaggtgtgcgctaccactgcccctgctcataaagatttatttattatatataagtacactgtctctgtcttcagacaccagaagagggcatcagatcccattacacatgattgtgagccaccatgtgattgctgggatttgaactcaggacctctggaagaacagtcagtgttcttaaccactgagccatctctccagccgtggaactcaaatttctgcttctgtttctgccactgaagtgctgggattacagatgtgctaccacacctgttagctgttgctttgttcattttttcctaataaaaaagagtttaaaggtgtgtgtgt

SEQ ID NO: 32368 - DNA, 1567 bp, Mus musculus
agggacaggtggtagaggtgtgggggaggggaccttcctgtatttgctgtacaccagcagttttgttgactcttctagtttcttctgaaatacttgtttctgtttaagagggggtgtcttctaggcaaggctgtcctccagtgtggctttgtagcctagagtgtcattgaacttcaggttcctcctgcctccatatccccagtgctgagactataggcatgcgcctccacatccaactttatcatttgggtttttcaaggcagatcctaggctgtagcttaggttgacctcagacttctgggtcctactgtgagctttgggatgctggttcacaggtgtgagccaccattgtggtttggaacgtttataacagcagcatagtactacacaggtgtttagagacgttccctttcatgctggtcagagatgagtactgagatccaagctgggctttgtccctggttgcagcatttcactctttaccttccagggagacggctccgtgggaaggccttctataacgtgggtgagaaagtgtactgccaggaggacttcctggtgagtctccactgtgctgcttgccaagctgggtgggagcagggcgggaacctccttcggactcacatgcagacctgaggccagcgacagtgagtgcccctttgtcacgtgacgtcctggatcctgtgtcccctctcagtactccgggttccagcaaacagctgacaagtgtagcgtgtgtggacacctcatcatggagatggtgagaacctcttctgtctcctggagtcccctacctctttcctgttccagactcagtagggccctgagccataaccccttgggggcagtgctgagtgtctcacctgcagtgaccttttgacgcctccccagattctgcaggcccttggcaagtcctaccacccaggctgcttccgctgctcagtgtgcaacgagtgcttggatggggttcccttcactgtggatgtggacaacaacatttactgcgttagagactatcatacgtgagtttcccctgctggagcagtgtgtcccgcagcatggccccccccccccccccccgcctctctggttctttttatttttatctcttttaagatttattcatttgttttatgtatatgagtatactttagatgtacacatggttgtgagctttcatgtggttgttgggaactgaactttaggacttctgcctaactctgtcaactctatccccactcactcagcccctgcttgctccggcccaaagatttatttattatcattaataagtacagtattgctgtcttcagacacaacagaagagggtgtcagatttcattacaggtggttgtgagctaccatgtggttgctggcctctctggttcttgctttttattttttcatctgcttttctgtgttttctcagctgttggggtaggtgtattagtgacttttcctatgtggtaacagagtccttcctagaacagtgtgaggaggagaggtttcagaagacagacagtccatcacgataggcaagacctggtgttgaaggcacggtgttggg

SEQ ID NO: 32369 - DNA, 1178 bp, Mus musculus
ctagactttgctagaatccttacactgtgttttgaaactgccagaattcccacgttggtgtcacatccatgtggcacaaagcaggcagcatcaggctgtgttcctttagcagagggccagggaggaatatggggagggaggatgtgggctcggggctcagcctgggggtggggggggaatctggaatgtgccctgaggcctcggggtggaccagagcctgggccaccgctgtcccgcccgcgtcctcgcgaagtctgcgcacccctcggccgggccgtcgccgcccccccccacattccagaggccgctgcgcagtctccttcctcacattcctgacggggcaaaggagtccctccgtccccccgccccctgcgcgcggtctcgaagcggagggggcgcggccccgagctgcgcgcgcattcctccgccgcgcgcctccgttcctccctccctccccgccacggccccgcgcgagagtgcggcccacgccgagcgaccgcgacccgggccccgccccgccccgcgcccaggggtcccggggcgggctgcgggccggcggacgatgcggcggcgctgccggagcggcggcggcgggcggcggaggcggaggtgacgcgccgcggcgggccgacggccatgcagcgctcgcggacggccgcggacgacgcggctctgctcctggccgggctgggcctgcgcgagtcggagccgaccgccggctccccagggcgcgtgcggcgcgggccgagggccgtggacgaggcggcgccagcgtcgggccgccgaggcaagggtggctgcggcggccccgaggccgcgcccgacgtcccgagccgccccgagcgaggcccgcgcgccagcctcgcgggctcggacggcggcagcgcgcgctcgagcggtatcagcctgggctatgaccagcgccacggccccggccccgggccgccgtcggggggcagcgcgcgctccagcgtgtccagcctgggttcccgtggctcagcgggcgcctgtgcagacctgctgccgcccggcgtcggcccggcgcccgcccgctctccggagcctgcccagttccccttcccgttgccgtcgctgccgctgcccccgggccgggagggcggcccgagtgcggccgagcggcggctggaggcgctcacgcgggaactggagcgcgcgct

SEQ ID NO: 32370 - DNA, 1415 bp, Mus musculus
ttcctctattagggtgcccctccccttttcagcggggactctctcaggaggcatgatgatgcatttgaattatatgctagtcattatttttttgttttgcttgaaaaaaataggcaaattgccctgggtcagtttggctccccagtaacaaccttctcctaagagtagatgtgcttggtacagcaaacaccagacagcttccctgagggtggccagggaggggggctgggattctgctgtgtgaggccttggtgagccattgacatctccctcacatcactgttctttgctttgttttccaaaataagcacaagagcaagatgatgtgctcatagttgattcagacgaagaaggcccttcaaatagcaccgactgcagcggggacgacaaggcccgcaagcggaagctggaagagaatgaggctgccagtaccaagaagtgccgcttggagcagatggaagatccagatgacgtcatagcgttagactgagcaggctcctgcccttggtctggtcggaaccaaaagttagatcctttgtgtggctttgatggttccgttcagcgttcatttgctgagactgttcgagactgttgctgtgttgaagtaggaatagaatttgcaaccctttgagcaaagctgggtgatgagctgaaagaacgcgggcgtgcatgttgccttccctgtaaatagccttagctatcatttcctagtggaaaacactgtggggtaggaacgctgcaacctgggtataaatattatgcctttatttttggctagagaaaagttatttttagcctagatctaaccattttcatactcttacctgaaagattcacagaagtgtcaagtgctatgcattgaaacttgttttttaaacattacctggcactgtgtatattaatgtaaaacaatgttaatttacccagattttcagtttgtactgcctggtatgtctgtgtaagaagccaatttttgtgtatttgttacagtttcaagttatttatatttgatgttttgtaaactcaaacaacaaatatactgtacttatggaccaaataaatgatgtctgcatacttgtcatctgcctctgttgccctagtgggtttgtgtctgccacaggctgagtgctagctctgggctgtggagctgtgaggttggtaaagtgcttgccatgcatgtatgggagtctgagtttggtctctagctcacaggttaaaaaaataagctgggcacgtcacgccagcactggagaggcaggcagggaagttctgaggctcacggccagcctagcctactctgtagtctccaggcccgtaagtgaccctgtcttacaaaacaagatagatgtcttctgagaaataccacccagggttggccttcggacacatacaggtaacagaagtcttccctcccc

SEQ ID NO: 32371 - DNA, 1141 bp, Mus musculus
tacttgtgaaaaaaagcagcaggaaaggacaaagtggtcaagtgtctgagaaatagcacagttggggtatgcgtttgtgtctgtctttctcaccctatgttttaactctcagcacagaactgcctttaaaaatgtgcatcctctgttcaccttgacaaataacatttgatgtacactttggaactcatgtatgagagtagggagttgtctataaagctagggaaagccagaaaccacataaccctatccccagaacaccaaggtcgggtcagatctttgggcagagcagctggaaaaaaaacatagagacttgctgggctgcaggacttatgcctcagtctcttagtgagcaagatgtaaagaaaactcagcctctatcacttgagttagagaagcattgctctggtcttttcttgagagtgttctggaagtcagaaccttccaggggtcacattgtgcattctgagctgtgaggatgtccctgctcctttactatgaaatgcacagctcagtctgtttatagtctctgtttctcttttagtgaagatcttggaaaggatgttgaatttgaagtagttggtgacagccctgaaaaagtggggccaaaacaagctgaagatgctgccaaaagcattgccaacggcagcgatgacggtgcccagccttccacctccacaggtaagtcacctccacgccagagacttgaacaagttggcactctgatggacactgaatgtaaaataccaaggctgagttagtttggaatttggaattaattgtataatggggctttcagttttatgagtcatgaagacctttatgacccctggggtattgggagtggttttctgaatctccaacagcaagctgtgggctaattcctggtccatggtctgtcccgcgtaagctgcctgcttaagctgcttatttgtaggccataaactgtgcatctggctctttgagcaggtgcttccagggtgggtatgggcttccaggaaggcaggtgcctaagtaaagcccacctgagaatgttcccagaggtccttctgacacctgggacctttcagatacccgatcttttgctgctccctgtttggaccagtatctcccctgcgttcccctctgttttgtgcaggaaact

SEQ ID NO: 32372 - DNA, 1177 bp, Mus musculus
ttctaagccctttattcttggtgtatactgtttgttgtctgctgattgtttcctgagcaggctatttgtgattgggacgcctggttactgttcaagctaagcctcatttctgttggttttcataattacagaacccttagctctccttagcctccctaggatctcttactatttatacatctaagatgttccctaaccccacccccaaaacaaaaagggcagcagtggagcacaagcctctgaacgcattgcttacatacagaatattattgagagactggagtttgtatcattgggcttccgactgacctgtggagtggttgtggggttgtggggcctgtgtagccagcagaactgagggtgctatacccctgctccaaatatttgatctttttctgtggtgttagaaattgttattctgcttacatatgctgggcctttaaacctgatttcatggcatagttttagtaaatcaacctaatttgatctgtttttatcaacttgggcactataagataatgggatttgtttatttcagctttttaaagatgatattagatatctgctgacaatggacaaactctggcgcaagaggaaacctccagttccactggactgggctgaagtgcagagtcaaggtaaagaatgtagctagttcctctcgtacctaccccgggagccagccgtcagctgaagtgctgtgtgtctgcatgagggagattgggtgtgactccactcctgcaagaactgctgcccccccccccccaccacccacagacaccccagcaggaccctgctctcataagctgcctgctgtctgtgctttgctttgttttgttttgttttttaactgccattggtaggacatcatggcttcattattcctgaaagtgtcctgatggctgtatgtacagatctgcttttgtacttgtgtgattgtgtgtgatttacttcagaggggctggtgagatggctcagtgggtaagagcacccgactgctcttccgaaggtccagagttcaaatcccagcaaccacatggtggttcacaaccatctgtaacaagatctgacactccctcttctggagtgtctgaagacagctacagtgtacttacatataataaataaataaatctttaaaaaaaaaaaagatttacttcagaaacacaatttaaaa

SEQ ID NO: 32373 - DNA, 1231 bp, Mus musculus
tattgagatatgagaatatttagggtattaacagatcaaaatcttttaattttgattgacatctttaaatacatggctagaaagctcttggttttttgtttttaagatttgtttattatatatacagcagcctgcctgcatttacacctccacaccagaagagggcatcagatctcatcacagatggttgtgagccacccgtggttgctttaaactgaactaaggacctctggaagaacagccagtgctcttaacctctgagccgtctcttcagccctccttatagtagggagtcctggttctgtcttagctatggctgtagtcacaataagaattttgtagtcactaatttaaattttttcttaacaacataaaacccagttgacctggtctacaaagtgagttccaggacagccagggctatacagagaaaccctgtcttgaaaaaaaaccaaaaaaaaaaaaaaaacaaaaaacaaaaacacccaaacccagttgaaattgaatgaagggatggagtgtctaccttatatcatggggtaaccgctttcccatgtcctaatgttatagggtgtgactgagtgttacgaatgtcaccctaagcctacccagaggacgttccctggctgtacgattcggaacacaccttcagaacctatccattgcatcgtatgggccaagtatttgttcaagtaagagttacatatttctggcatatttttcagaactgatcatggaaagtgaggccatttttacttaaatactcttaaaaagttgtgtttacagtggttaaatatggtgaagagacagcagtggctttcctgggtctcactcagacagcattcttagcatgctgtgggcgaaattttagatgtttagtctggtatcggacacaggcatgcaactaagtttgtgcgaatgtatatatttggaaatatgaaaacatacttataaataacccattggttaaacaagaaatcacaatggaagttaaaaatacttaacaggactgtggtgaaactcagtggcatagtacttgcctggtattcctgaggctgtggtttagatctctaaccctgttcaataaccatccacaaccaactctaatgtgtaatgtttgtggaacagctagccaagggtgccttgtaagtatcctggtgttaaattattcttcggcaaggaagcttgtccagctctgctaacacattttcttggaaggtttgggactttg

SEQ ID NO: 32374 - DNA, 1172 bp, Mus musculus
tgggtgtgttatttgcatgtatgtctgcgtaatgtgtgctgccccagtgctcaaagattccaaaagagaaggccagatcccctacactggatttacaggcagttttgagccaacttataggtgctgggaactgaactctgaattttctggctggaacaacaaccagtactcttaactgctaagccatctctctaaccccactttagatcttgtagaagtaccttgagtcatacccagggccatacacataccagacaggctgtactcacagcccagcacttgggaatcattcctagaagtctttttctagagtgaatttgcagtattaattcctcggttgcagttttgttgagtgttcctgtaatgaccaaggctgtagcccactgttgcagccctaacaggcagaagtggtcaagttacattcccatagtcacaatgagcatgtgctgtattgaaagcaagaaatgttcgtaattgtcatctgaacttggtgtcatcaggaactcttgctcaccactgtgttctttcagctgcacgaaaccacgtgaataggatgtgtctggccgctgatgtgcctctcattgagagcgggactgctgggtatctcggacaggtgaccactatcaagaaggtgaagagacactttgattttccacttacttgagacctggcaaggaaagaagctttgggtttgtatagaggacctaggtcagcatctcaggtgtagagatttcatgccagatgagacacgatgatgcttgggtctctgggttcatttagttcagcaaatccctaccctcaagaaagccaaggacaatctaaaggcaaaggaagagagcgattgactctgcatggatttgttaccttaatttatctgttaaaatccttagaccaagctgggcatgatggcagacaactttaatcccagcacttgggaggtagaggcagatggaacactgagttcaagggcagcctggtctacagagtaagcgccaagacagccagggctacgcagagaaaccctgtctcaaaaacaaaaaaaagagggaaaaccaaaactaacaacaacaagtccttagatggactgacataacaaattgtacaaaaattcttagtcatggactttgtgtcatgttgtagatgacagacaataaatcagacttctaaaagtt

SEQ ID NO: 32375 - DNA, 1176 bp, Mus musculus
gccattggactttccattgctctgcatgtaggtgagtgttcctgcgtctcctgcaggaggcagtattgcagcgtgaggttgatgtcatatccatgaataccttgcttagcccacaggctccctgcctctctgcttctgcctacaaacatttatcttttagtactgggagagagaactgtagggttgatattatgctcagggccagctctgaagagagaggctttccttggggcccctcctcctcccaggtcccacttttcctggttccagaagaaactaactaacttccgggaggacacagaggtggcacttcttttttttttttttttttttttttgcctgcgaggggcacctttgctgacgctgcttttgtgtcacaggttttgaccacttcgagcagctgctgtccggggctcactggatggtgagtgctgtgtggcctgagacatgtatgggtcccgccctgccctccctctctccctgccagctgctcagccgccactcaccttgctgttctttcaggaccagcacttcctcaagacgcccctggagaagaatgcccccgtcctgctggctctactgggcatctggtacatcaactgctacggctgtgagacccacgccttgctgccctatgaccagtacatgcaccgctttgctgcctatttccagcaggtaccggccgctgggccgtgctttgggaggtctagtggcaggtccagtgccccaccttgtgcttgtgagtgtggccatagttcatccctgcggctgggttcctggcacatcttgttaaccaagtcctactctatccatgctgccagctggattcacctctatgagaggtgccctgtgtgtcttcctctttggctctctcctgtcattgctgttcttgggtggtgatgtgagctggaactcgtggcccaggtatactttgttcaccaggatggacacgttcggtgaccagagagtttacagctatacctctccctatttgtaagcacatgcaacaagaattagcaccctttggggcccctgaccctgtgtccagccctattgtttggtctaggcatacctacctgctcagtctcccctctccttttccttgcatgtgtgtttgtatgtgtccatgtgagtgaatgccacacgggtgcaaggtgccctggaagccagaggagc

SEQ ID NO: 32376 - DNA, 1228 bp, Mus musculus
caatatgtgtgtctgggtcagtctggaggttggatagaggaggtggggtgccctaagcctgtccactacctgtcctcatcaggcaaggctcagggctgttgcagggacctggggatctgcagccccctagtctgcagtcactagtatatggtatttggccttcctttctctttggttcatagtctgagccatactagggatgcacatggtacaatacgagggcccagaggcttgggtcagactctgcctggaattgctagctagatgaaatctgaccttgttcctctcagccaaggtcagaagctagacttgtcagtcagggctgccaaccattcgattcccgttctaaaactaagtccgttagggaagatcatgtcacacctaacgaggcttgtgagatggttgctgtagcagagctcttcttaaccctggatccttacagatgagtctgcagatcattattgtccagaggtaccttgggccaccttcctcattctttcagtttcacctgtgtgaacttcctgtgttagctctctacaccccacaggccaggatgtcatcatcttgggactttctctgtcttcatttgtgcctggctctcagactgcagttctccaacctggtctctcagcttcgtccttcacattacacgctgtgctgtgcttcctcgaagcctgtcacctcaggcctccagaagatacatccaaacagctaacggatatgtggtctagcaactctcctttacagctagtggtgttgtagtcctgtgtcagcctgagagacttaagaaaggaagtcgctcctgttgtttcctgtgagtttttaatctcttgttgtaaaaggttactcctgccacaggactcttgtatatgccactctggagtgcttctctggatgacagtgtttattcagatccaaggtagacatgggtaggaagctctgggtctgtcagaggctgaggagacagggtaagcataggcacaaagctatggatctgtcagtagctaaggaggcagaatgggtgcaggtctgaggctctgagtctattagtatatgaggcgacttggtaggtaaagtattagtctctgtgtctaatctgggccaatgaggcagagtggccacaaatctgggtttgtcaatgaccaagaagacaatggtaggtacaggcctggggttctggatctgtcggcttatgacgaaacagggtaggtgaaggtatgagctctgg

SEQ ID NO: 32377 - DNA, 1221 bp, Mus musculus
atgccatgagataaagaggaagcctctctttctgtcatggagttaggaagccagcctgccttgggacagggagtttggggggccacttgaaataaacattggggaatctggagcaagaaagccctacttggctggtgagatggctcagtggttaagagcactgactgctcttctggaggtcatgagttcaattcccagcaaccatatggtggctcacaaccatctgtaatgagaaacaaatttttaaaaacccatgggctggagtgagcagggctagagcaagcagagccagagcaaaaggggttgcgggtggggcaagaaagcctgtttttcctagagtctgtttagacagcatgtggcagactaccaggataacatgtcacagattgtgacagggatctggttctgtgaccaccagaggctcctgacagggtctagcagttgtcatttgggtaaagggacacaagacacacgaggagtgacatttgtgagctgtgcgtttgggttaatcacatctgcttctgtgacagcgggtccggagtggtgactggaaagggtacactggcaaatccatcacggacatcatcaacatcggcatcgggggctctgacctggtaaggagcgcccagctcaccctgggatgggctgaaggttgggaacagtctctccctagaaccttgtcctctcttcctgcagggacccctcatggtgactgaagctctcaagccttactcgaaaggaggtccccgtgtctggtttgtctctaacattgatgggacccacattgccaaaacactggccagcttgtcccctgagacttccctctttataatcgcctccaaggtatggcgctgaggatggggaggatgggtggattgccctgggcaatggagtgtcaggaaggattctgagtgaatggggctttgtggatctggttagcacagctgcccttagatgctttccatgtctggcagcaagtgaggtttacctaataagagccggaacctgttcactttggattcttgtcataggcagtacccactttatgtgatctttgcctgtgtgtgtgtgtgtgtgtgtgtgtgtgtgtgtgtgtgtgtcccctcagggtctcatacaagctaggtaagacctctaccactgaactacatcctcagctctttatattgagacaggctctctttcagttattcggatagccttgaattcaaactgtggtcc

SEQ ID NO: 32378 - DNA, 1197 bp, Mus musculus
gcctctcagtctcagccatttgagtagggatttctaaccacccatgaggaggagcagccgctgctggctcgacaggcacgagagagctgtcccctcccacctgctcctagtgggctttggtcagacagggtgggtaaggctgagatttcctgggagccacggtgtaaaaatagagcggcggaggcaggatgcagaggccagagagacttgtgagcgactgcgaaatagaagggagggtggaagaaatcgtacatgtgatgcatcttcgtgccttgtcactgatgccaggaggcgagggacctgggatgaccacctgtggttcctcactggacgtccctgatacctctccctgggtgtttccttgtaagtttgagatgtggagcttgaagggggaagttctgcccaggatctgtctacatcttctttctgtggcgtggcttcctacactacttaacactgctacaggtcagcctttgtggccaggcactgccgctggggtgtgaccagcagcgtctccatctttctgcagcttgaacctcaacaccaaccatgggcatattctggtggactactccaagaaccttgtgaacaaggaggtgatgcagatgctggtggagctggtaatgttctgactggggagttgtgatctctgggttgggttgtgggtgggggctgcgctttgttttgggttctaggtcccggtgtggagttggtatcccagggatctccaggccccctgctgattgagcagactctttgaagatgctggaaaaggaatctgtctatgaagaacatctgtcagcctcaagggggggggggagtggggggggaggggggctggacttgtgataggtgatgaggatgggggatgggatacaagacctcagcagtggcttctctccctaggccaagtccagaggcgtggaggctgcacgggacaacatgttcagtggttccaagatcaactacaccgaggtaagcagttacacccgccgccccccccccctcttcctcctctttgccgaccgttatcagcatcgccctgtgtcttcacccttgctcttaagcaatgcttttgcctcacgaaggtgctaaaggcttttctttgggggcaagagaggttgcagagctttggggtgtgatttctctgagactggcagcctggacttggcaatcaaattggcacagttcctggtg

SEQ ID NO: 32379 - DNA, 1598 bp, Mus musculus
ttatttaaaattttcatatttcatctttgaaaatgtctaattgagaaaaatccatgatattttctggtatgaaagtttgacagtattaatttttttatattttcttaaatcattaaaccattttaatatatgttaactactaataaatggtttattctttctaactccatgtaagcttttccaatgaagattgtaataacacatttttgttctcatttttctacagataaatttatatttaaaaataccaaaaaaaaaaatccctatgtatacacaccacacacatacacacacacagacacacattcacttataagaaaattatagaggacctgtagggtgagcccagccacctgcgtttttagtactgtgtctccaggctgcctgaggcctcagctgttgtcattcgtgctgtgtgggggtgacatttctgcctgtagtgaagatccttctcagtgggttcggaatattcacctcaccatgtttacagagaactattttgtacatagagttttccaggcacgtactttgcaccagccctgcgtggctgttgtctgtgttagctgtcacagtgtgcacactaatctgttcagagttccttgtggctgtttgacttgtaaaaactgtgtatttccttcagtaatgtgtccacagtgctgtgtttccagttctagtcttctgcagtactctcattttcatagtgcctccctgaagacctcaccttgggccaaggtcactcctcggtgccacagcacaggtgacactgctaattgtcatctctggtctgtctttctctattaaggaagatatttgtctccacggctgtgtgaccgtgtgaatcagcttgtgtagtctccacatgggtgctgttcgaagcaccaccttgctctaaacactggtgattccaggtgctgcgcttggcagaggtgtcttgccaaagcgcatgtatgcgtgtgagtgtgtcctcagcacggccaagcatggctgccttgctcggcattagcaggacatcatgtgaatagttgtgaccttccaaaactggaactctacattttgtatcttacttttaaagctcctataagtaaaataacttggctttattaaaatatacatttaataatactctgtatcttttttaaattaattgcagcagatatgtggctctcagcagaactgtgcaggagctggattacctgccccaacagcctttctaaggaacaaacgtaggaatgaggattttctggccattttccctcagcaaacatctgtaatcccagcactcaggaggctgaggcaggaagccaggcataatggtacatgcctgtaatcctggcagtttggagatagaagattagttcaaggttcttgtggctacataattcaaggctagcctggactacataagaccctgtctgaaaacaaaactacggtgattgggttgtagttgagtggtagaacacttggtctgcaagccgaaggtccagagttgaatccccagtgccagtaagtaaagaactagcaggaagacggacactgagtgtgttcctgtttgatgaagtacccagtgcttctgtttacatcagtggtgatgatggtag

SEQ ID NO: 32380 - DNA, 2032 bp, Mus musculus
gtagtaaggtctccccgtattgcagagtggcgtgcctgcttgataggccagccactcctgcagcctctgctgactaggacatacagagagtaagcagagagttgaatgtggacattagagcagtgctgcccaagaaccagtaggacagtaggacagaaattttttctgtgaaataagaggaagggtgtattaaggtaacagaagtaaacttaagcagactaaggaagagccatggcttggaacatgaactaatacgtcttttcctttttagaaagacaacaaagttgctgcatagtctacaaacaagtctttgaaaataggtgactcctagctcttcatggtcctggaaagtgctttcagtctttgtgaagaatgaagaagtgaagttgctgtcttgcctgtcaccagcactgggttttgtctgttttctgcttcatttcaaagctacactgcagttgctttggggcaggaaggctcgtcttaaaacacaagtataagtgtatgtggagtagcagatggttgtgattccttgtttagagttgaactaaagccagctaaatggaactgctaagtattttttcatcactgaaaggattttcttatcactaattaattgtattcggcaattacttccaattgcctgcagataggccgtgatactgtgttttgagccacagaaggttttgtgcgtgtgtgtgtgtatgtatgtgtgtgtgcgcgcgcgcgtgtatgtgcgtgtctttttctttttggagatcctataatatgaggtagcttatttcgacacttaattagggtgctggatggtagagaattttgtcagtcaactatgtacacacaggtaaatactgtttcttaggcaaaggtaacttttttatatagttgtaaaattccattatattccattgccaaagaaacattaagaactttgtatagctgtataaaaagcaactaattttttaaagaataaacgttttaaagtcagcaaacatacgtgtccttgcagaagtcagtgtgctgaggagcagggatatgggtgggtctttccccttgctttccaggcttaaggtttttgatttcctttgtactgtttggactaaagtgaagatttgataactttattccattatctaaaaagcataaattattcatgcatagtgtatggacttcgttttgtagcaaatcacaggatttgttcaaataacagatcttttaagtgtatgaatgtaaataatcatagatgagagtgtacctcgctgtattttcaaataagtaacctttttaagacattaaaactcaatatatcagttgacccattcctcctgctatgcctggaattctgttgtggtaaccgctgactcctgttttatgtcaaaaagatggagttttcagaatcctctggcacctgtaaaacatcactaacatagtatgcgggcctgtggccttctaatgactctgtacacggttgttgctaactgtaaattactaataaatcttttttgatatttaaactatagtgaaaaagatctggccactttgtgtttttaataaaggccatggaataaagagatccaaagatttcaatatttttaactattttggtttttgttaactttctcactaaaacattcagtaatgataaaggcatgtgaaactgcactgtaggagaattggactgcttaaggatggctgattattttaaattttatatcttttgtatagagcaacaagaaaatatcttataatttggtttcattgttgagatccagagcttgacagctgtcgtttcctgtgcgcctgcatgtgaacaactaacccttttgtagggttcacagatcatgagattgaacacatgtttaggcatgttaagcatcagagcacgtgctgtgctcacaacacttgtaggctgagatgtcccagcccagttctctacgctcgtacaaggcgaacttgcactttttctcagccccctgggtcactgactggggcatgcattgtcccaataataactggcagcatggtggccccactg

SEQ ID NO: 32381 - DNA, 1099 bp, Mus musculus
aggcgtgtccacggaaggactgttgatgtgacctggggttgatgtgacctggttgatgtgacctgctgctcctgctgcaactgtgctgccagcctcccagccctcctgctcctcggcctggtatagcgtcctctgctgggccagtcactccagagcagctgtttctcctccacacttggcagacatatttttctacagtatttaaaacagtactaactgtctcgctgcacaggtcggcaaggctaaggaggaccatccatcgctgcttttacctggtgctcagttctcagtccaactgttcagcaagccttgcaaaggatgggctgccggcattcggggcccaggtgcctgctgagctgggtctgtggggacagatgtgaggtggcgggtgctacaggacgtggaacagagtcctctaggggcagggcagtggggaagagggcaatgggggctttgtgactctgtgacttttatctgagatactctgctgccacctgtgtcccagactgcacttggtgcacacctgacctgttaatgcccaggggcttccaatcccgactgactgtgctcacatctgggggttcttggagaagtctccgcccacccagtcagcatgggggccacagcttatctcaggaatgggcccttctaccaagggacccatctgtcagcatcactctctgggtccccagctcagggaaccaccctccaccctagcgccagtttccccattcatatgcacaccaagtgttaatgaaatgtcctaaactagcctgtctgtaagacccagacccaagcttacctagtgctcttaaccccagatttccaacaaggactggtcctgagaggtcctcacagatctgctcttctcccagacgacagggccaaaagatggataccctggccttgtcacatctcccttagctcctcccaagtggaggaaccgcaaagaactgacagatggggtgccctggccggcacccccttgtgtataacgcctgtagacttgtatatgactcctttaatattgtaaagatgctgatgtacaattgttctgtgtttgtgtgaacacaccgcgttcccggttcatgccataaag

SEQ ID NO: 32382 - DNA, 1204 bp, Mus musculus
atgtcttccaggctatcctaatctagaacactcccctgttgatctcacctgaggtgggtagttctgcacctacctgttgtcctttctgctggagaaagtatgttcctaaccggggaggacctgggctggatgggagcatttcttcacaaggaacagcatcaaggagagccacattcaggtatcatctctgtgtccccagaacctgactgcttcaaacccaaatgtccctctcctcaggagggttggccctggcattcccaaggtttctcaattctcacccatattagcacatttgatccaaatcctttgacatagaccaagcaagttggtccagctgtgttctgcatcctatgtccgtcttggtgtatgatgtcaccaattcagttgataagagtcctgaggaagtaaatgctgacatgcatggaggtgggcaagctaggaacagaagctgtaggtgggtacctccctccctagtattttgcttggtttactgggtactgtgccaggacctgggtaacccgcaactttatatggatgctggcagcagccgtgcgtgggtgaagcaaaccactctgacctcagactgcatccctggctgggctttgctggctggctttaggaatccagagccttcctagactctgtgcagatccagtccaccctctccgtgttgggcttgtcttttcttgacagacgctgccccaaggccatagctgagtcctgtcccttaatcctgtgcactctctcagaagaaaggggaggtacaaagagagcagaagacagccagtccctacccactggggccagaaacagcatgggagggggtcttgctttcccaatgactcctttattctaaaggaggacacctgcgttccccatggggcacagacaggcgagcagtgagcttctatcctgcaaagtgtggctgcggggcggccctaggcaggcagacagctcttccaaatctccatgaataattgaagacaccttaaaatgtgtggcggcagcctccaggaagcccttcccccaccgtgtgtggctgcaagtcttgctgctgctggtgggtgggctcctctccgccaggggcggctccagagccaggcagaggtcagagctggacaaagcggctgagccctgactcctgctgtctcctttcccacctcactattctctgcccatccttggagcatccagggcagggtag

SEQ ID NO: 32383 - DNA, 2847 bp, Mus musculus
aagaaaagctgaattctagccgggcggtggtggcacacgcctttaatcccagcacttaggagacagaggcaggcggatttctgagttcgttgccagcctggtctacaaagtgagtcctaggtcagccagggctatacagaaaaaccctgtctcgaaaaacaaaaacaaataaacaaaaaaaacaaaacaaacaaacaaaaagaaaagctgaattccatctgggttcctcagtttgtgattttattctaaattgtgtatggtaaattctggggctacaaaaaccagtcctaataatttggccctattttatagatgtataaacctgtgttagcattgtcagcattgttttttccaacatacatatttttaaaaatgactttaggtgaagtaaagaaaccccatctgtcatgttgaggaggtggttaaaatacaaagtgtgtttaggaaggaagaagtggtcttgggctttttttttttttcccttttgtttgttttaaagggcatagagtgcgattgaactttgaggggccttctgcttattagataagcatggtctctgtcctaaaaaacagcatctactgtgtactgacattttagtttctgtggacgcaagtaaatgcagcatttggtttgggggagaaaccattttttgtcagccaagttagtaaataaaatgccttggcttgatgatacagaccatgatttacaatactactaattcatttggtttctcctgtgtttgttcaaaataactgccaatggggccatgatttttaaaggtaaagtgttcgtgtgtgtgtgcttgtgtgaagaggcaccttttgttgtttgatctcaactgaacaattattagaaaaatgaatcaactttatgccatctctcaaaagactagtcaaagaaaacttgaaagtatgaggtttgaatctttaatttatttcctaaatttttaaatttttatttctttgaggaatctttttctagtttagtgggctgttcttccagacctcatgtgttattgcttccattagtatgcttttgtgttctgtataacttattttagagagaaaatgctgataaaactcaggatattgactcttgttgtgaaactgaaaagctgggtgtctgtagggtctgctcttatcagtgttgtatttagatcgtcttcttggtaactcatagtttgtgcacagctccagtgtcagtttgttagttcctgagacggtagctaaacatgggtcttgtgtgatcaaagtttgggttctgggaatcttgtttgaatgtggtcatttctggccctgtgttctactaggacttggtaaccccagtgtcgctcaggttgctccctagtatggcaggaagttgctgactgttcgggacagaagctttcagggccctggagctcagcagagctgaagacaggagccgacactgttctttgggagccaagaaatgagtggggttttaaaaattagggctcagtaccattttacctgggttggaataccatctactcctaaagattgagagatggtttggataactaacaaggactcacccatataatcctaatcttcatcagtggattgataattacgtaatgaatttaattggtgacacagttaggtcccacttgaacatgtatgaggctaggcagacttccggaaactcttacttctaaacaccagctttcacaaatggatgttcttgtggaatttgtggttaccagtgctaggactttaaaaagctgtagggaggtcagtgctcaaggtatcaaatcagaacatacaaatgaggtccatctttgctcttacctttgtaaaagagattgttagcacaagcaagtagttccatactgaacacaaatgtttggactcaaatgttcttactcaagtgggaatgatgtttaatttgatagatttctctgtaaagttgggggaaactaggtttggggaatgggtaaacttaaggctttggaaactgtagagtgacttttgaaagtcttgttaccgggggacctttagagtttgatctgccttgtggacaggttggtggcttaggaatcaaactgtagtgtgaattagccttgtctctgtctcctgggatggctgccctttgacgagttctgggcatagagggggaatcagagccaccctctctgtctagccctttgggtcacaggtgactttgggatctcagtaaggatttaactaaaatatgactgggtgtttgaaattgggtcatgaggccattcagtttttacggttctcaatttatgaaactagaaacatgtacagtttgataagaaaggatgcagctgcttttgtttcttaaccctctcacccctttccagggaagcttcgtgcctggacaacccatggagcttgtagagtgctcctgatgccttagaaataggaaaagacgcctgtttgtgtgacaggctggggaagattccattccacagctaatcagatctgcctcaggaaaaatactaacttgttctatctgttcctggccttcagtttgtgagattactctatttttttaaaatataattttatttctttcaacgaatttaaaaataaaaaacaccttttggaacaacgactttttcttcgtgggtttctttatcttggacatgagcaagaagttcatttgtaattggccccaaagagcctgcaaggtgcctcttgctgttgtcctgggctggagtgcatggacagcggggtactttgtgcaagtttggatttccctgagttgacagggaaggagttgtctctaaacttggaatgcagcttcagttgattgtagttgtttggtctaacttaaaactgcatcccagtgtagggg

SEQ ID NO: 32384 - DNA, 1177 bp, Mus musculus
tacccatagagatccatctgtctttgtctcctgataaatacttttaaaatttatttttactgatttttaaaaattcttcattttggtggtgatggccgaggcagaggcaggtggatctcaggttcaaggccagcctggtctacagaaggagttcctgtacagccagagttacacagagaaacctgtcttgaaagtcacacacacaaaaaaaccaaacaacaacaaaaacaaaaatgaaaacaaaaacaacaacaaaaaaccccaaacaacttcatatatgagtgcctctgcatgtgagtatttgcatgtgagtgtgggtgcccagcgagtccagatgggtttggatcctctggagctggagtgacaagtggtcgtgagccgctggacttggccgtagggaatagcatcaggtcccctgcaagagcagtgtgctatcacaacttctgagccatctctccaacctacagcttgatttttctccaacttggaagactagtgaggtcagttctctgagtacagctgacagaacgtctgtctcttcctagaacgatgtcagtgacaagcagtcggctgtgaagatgaagatgttcgggaagctcacccgagacacgtttgagtggcaccccgacaagcttctgtgtaagaggtttaacgtcccggacccttatccagggtgagttgggttagcttgtctttccacccactccgtgaaagctcatttaagagaaaaaaattattagatttatcttatgtatttttgcttgcatgtgtgtctatgcactacgtatttacctgctacccttagggcttagaagagctcctggaactggacttaagctaccgcatgcgtgctgggaactgaactggggtcctccgagagaacagcaagtgctcttaagcactgagccattttcccagcccccttagagttcatactatgctcctgtggtcccccttatcaagaggaagttgacgtctaactattgggagttgccagtttgcacatttactttaacttctgcttgtttatttgtatttttgttcatgtaagtctgtatgtatatatgaggactctaggtggaccacagagggcgtcggatgccctggagctgcagggacaggtggttgtgagccacatgacaggtgctgggaacccaacccagatccctgaaagagc

SEQ ID NO: 32385 - DNA, 1196 bp, Mus musculus
ctggcctttgggggcactaggcttgcacatgtgcacagacatatgcgagcaaaacctacatataaatctttgggttttattttattaaaaaggaggtttaggacaggtggtggtgggtcacacctttaatcccagcacttgggaggcagagaccgaaggatctctgagttcaaggccagcctcatctacagagtgagttctagaacaaccagggctacacagagaaaccctgtctcaaaccaacaaaaagcggggtgggggctagagatggctagatccccatctgttttcactgagctgttcattactgcctgtaattccaattccagaagatttgatgccctctcatggcttctcagggtaccttcatgcacgaacacacacatacacacatatacacacatttaaaaaaatgaatcttcgcacaaaaagtacatttcaattgttgctgccttgttaacctgaaatttctaaaaacgaattttcttgtctgttttttaggaaaagttagactcatttttgaggagggcctggcatcagcagatttttacctgtctagcaaatcttgcattctctatgtcactgaagcagatttggtggccggacatggctacagaaaaagactcgctcgctttagaaatgtaagtaccgaggtgctaaaatctagcatcccctctcttcaaccgtcccaagcgctgagtgatagctttctgaactgtgttaccagagctgtgttcttctcttttgaagtcctcacatcttcaagggatcataatagttgagaagacccagatgagtgaacagtatttcccagcagtccagaagtttactgtgctagaccttgggatggtgctgcttccagtggccagccagtcggaagcatcctgcctcattatccacttggtaagtaccagacttctcctttataatatcccagaagtccagaagatgctcaatttaccccagatccagacttaaccaaagctgcctttagtagccctggctgtcctggaactcactttgtagaccaggctggcctcgaactcagagatcctcctacccttgactcccaagtgctgggattaaagatgtgcacctaacttcaaaataaactttgacacaggctctcacgtagttgagattgcaggcgtgtgtcaccacacggggccttaggcagtgctgaaggttgagctcag

SEQ ID NO: 32386 - DNA, 1238 bp, Mus musculus
tactccaggagtgagccactgcagagttcaggctctctgtgccaggagcagggctgggcccacactggttcttggttttcttatctgtaaaataagatctgagcacatgaagcccaagatagtccagggtgttgtggggtggacacctggctttcacagtgactgtgagaaggattaaacctgtgccagtggtcagagactgcccagcttgggcagctaccaggaggacatcctttttgctgttatgactctcaggttgattggctggtatcagagtggccataatacaaagtggctcttgagacagcagaaagcatggtgtcttgctggaacaattcagctgggaggctgggcgtggccagtgtccatttgtacaaatgcaggtccccccagctggtgaagggctgtggtggcactgaacactgagtgcaagtggcaggctgtcccagaagacccaaggaaatgggacacagctctgtttacaccatttttttcaggtggtcagattttccaatacttaaacctctgagcaatatcttgtagcacatgggagactggctatgcaaacatcagctattgttttcctatattatattaaactgtgctgattgaggtagatttctgaaatgtgacatggaaatgcttgaggagtttgtgctctagaattgctcccatataatacgaacgtcttgtctttgcagtggatcatcaataaagcaccagtgtaatgttggccacagtttcttgttctgtgtcaaatgcaaaggaacattcacactttctagagagtaaaatgccagcaaaggcagcaagttagcatgagtgcgatgctggccccagtggagttgccttggacacagaccagctatgtacagcacagggtaaaaaatgggagtggtggcactgtgcaaaggaaaagcaggaggaaagcaagtttaaacctaccatgagcagcagcttatctgccgagtgggtttggtgagtttagaggttgcctgttctgttgtctgtggtaacaaacacagagccttgcctgtgctaggtaggtgctatagcctgagctaccgccagctccccttcattcagttaggcattgtgccttgctacttattagttagcaattctgcaatgggcatgctgttctgcagccttccctagccatccatcctatcgggtaatgggtaacatttcccggtaacttaggagtttctgtttcttgggtttttggttttttattt

SEQ ID NO: 32387 - DNA, 1182 bp, Mus musculus
taagtaggattgcagtgggagaaatgttaactatgtacttcttcaagttgtcctttaaactgttttacagattactgcagtttctaaatcctgatcctttgagagctgatgggacctcagacctgcaccaggtattacagactctaagaatagaagatgaaagcagagaaaccactagtggtattaacactcctttctcccttcaggctgccttaggtgggttttccccaagtcctggcttttggagaatgtagagagccactgctgtagtgcctgtgttttattaggggaacaaatgatctttaatttgggtggttgtgtatgttttccagtaagcatgtattcctaggtgtttacactatgatctacaagaaaacacagttttcttcttggtaaagtccttaatactcttctgcctactcaaggaaggcctggctgttgttgtctaacgtcttgttggttagttgcagaaggtgaagctgggcacactgcagcctggggtggtgctccggaacaggatcgagccctgcctaaccctggagaaatcacctctgtcggcagacctgaagaaggtgaacatgttcttaaagccagactcctgacgacatgccagccctttccaacacagagtgttgctttgttttgctttgtctgttctgttctaagagtgacggggatgaaatacagggctttgcgcgtcctgggcatgcattcatcactgaaccataccccaattccataggaggattttaaataaacacttctaaggctacattgcagaattcttgcttctaaaattctcttaaaatattttgtgatttatttctcatgtattcgaaacttcccagaagattaatttttttttatagaaaagcccattgtgcaactgttgatcctgttctgaagtaagttttcttttttcttttctttcctttttccctccctcccccctccttcctcctcctcctcctcctcttcttcttcctcttcttcttcttctttctctctctctctctctctctctctctctctctctctctctctctctctctctctctctctctctctccacaatttctctgtgtagtcctgactgttctggaactcactgtataccaggctggccttgaactcagaactgccagcctctgtctgcatcctgagtaatgggactaaaggtgt

SEQ ID NO: 32388 - DNA, 1147 bp, Mus musculus
cgtagcctagactggtctcaaacttaggatcctcctgcctctgactcccaaaagctgggatgacaggcctgtgctgtttcactctgctgccggtacagcctttcatccctttcgttctgacatctgttcaggacactttctgcctggagtgtggtttcccgggggcgtggctgtggtcttggttggtggagcagggctccgtcctcccgcttggggctcatggaggctgtgggcctgtttctctttgcagtgaacttggagaccatgtgtgccgatgatctcctctcggtcctgttatatctgctcgtgaagacagagatccctaactggtaacattttcctgttaaatattccttagctccttgggctcttttgagcaggattctctcctgcagcccggactgggccccaactcttgttcttcttgccttggcccctgagttctgggatttcaggagagctccattctggctggcatatatttgccgttaactgttctatgcattttgaattggggggtgaatctgggccaagctgcctttaggggtttacctctgaagggggcagtgttctctcctccatccttcaggggcagctttccttcagtggatagatggggaaactgaggcctggagagctgctatttcactttgtgaagaatgtggcgattttgttgctgtcaactgtgtaggaagcagccaccatctcataggaaaccataattcactttataacattagctaggtgtggtagcttgccccgttaatcccagcacgcaggaggcagagacacatggatctgagacctccaaccattagctgtctcagttactcttctagtgctgtgaagaggcgctatcaccaagacaacttagaaagtattgaactgggacttgcttatcttttcagagggttagtccataatcatcatggccgaagcgtactgacaggcaggcaaggtgctgggtcagtagctgagagcatgcatgatctgtaagctgcagacaagggagagagggagagggagaaggagagggaggggagtgaaggagagagagagagagagagagagcacttttgaaaccttgaaactcacttctattgacatgccttctttaaaaaggccaaacctaatccaacaaggccac

SEQ ID NO: 32389 - DNA, 1138 bp, Mus musculus
ctgagcctcacaagagggttttaagatggagaggggggtgggtgccagttccttctagtgactttttggcttccctttatgctctaagggcaattttgtagtttgttgaggcctaagggattggtagagaaggacactgaagctacaggcctcagattctcaccctacagaggcctgaaagggtctcatgttggatggcctccactttggcactgccttgtgccactggcaggtcgcggctttgccttgcctttccctgttgtatttttccacatcttctttctgtttcaggaggctgaatgacccgtcagttgtcactcctttctccagagatgacagaggtcaaacacccctccatgtggctgccctctgtggtatgtgaccctgggctggcttctgtgaggcaaaaggatggtggcccatgagctagtggaggcccagatgatgggatactgggaggggctgggttgtgggtgcatcccacagggcaggaaagatggacaactgcccctctgtttttgctggccaccatgctacctcacaggctggaagaggactcatgtggctctccatgcttggggctgctgctggccagtgagaacgggctggtatgtctgctaagacaatctcacagaattgtggtttggggttcacatatcactgtcctcaaagataatgttgagccaggtgtaatgatgcagactgtaatctcagccactcaggaagccgaggcaggaggatttgagctatagagtgagactccagctcaaaactagaggggctgaagtacaaatgtttccagcaccacgtgggtgctggaaatcgaacctgggtcctctggaagagcagccagtgcttttatccacggggccatctcagcagcccctggtccattgttactgagaacagatgtgggtgtgattcccttcatagggcatccatcccacagtgatttaagtctgcagagcctgactcatgtcagctcaggctcctgtacagctgagactgggtctcctgtgggtttcctgccagggctatccagagtgaggtagcattgtagttgggagcccctctgtttcctctaccaacaagaggtccttctgttctgcaggtcaggcatccctcattgacttcctgg

SEQ ID NO: 32390 - DNA, 1195 bp, Mus musculus
ttggtgaattttaggtgtcccttgactgggtggaggtgtctgtgagggttgacggaacttaccagataatgcttaacgtttcatttgctcctttctcaaagataaatgatgctgcgtgtgttctactgcagatccaatggtggctcccggacagcttcctggtagccacatagtaacagccctactgtgcttattaccccagtgtgtgtagtagggatgtgcaggctggggaatcctagtgcaggtcagagcttctaaatgaagagcagaattctttttcaaaacagtttccctgttgcccaggcttgaactcctgcactcaagccactgcctggcctcaggtgctgggacaggagccatgtgtcatgggaccctgacgtggtttcattgttgttttgttgttgcggagatacttaaggaggggattcggtcacacgaatatgacatttagatgggaacccgaaggataatcggcagagaaaacatttaaacaacttactgacttagccccttttaaattgtaggactcaaaaataatggagttgctgcaggtagtgccaggctgtgttgcgtctctagacagcgtcgaggaggcagaccacgagggttacgtgactgttgagatcaggagaaaatgtaagtgcttgcgaattctcaacctccctctgtgtatgttagggttctctagagtcacagaacttatggatagtctctatatagtctctatatagtaaaggaatttattgatgacttacagtctgcagtccaattcccaacaatggttcagtagtagctgtgaatggaagtctaaggatctaacacggcaaacaggcgagagagcaagagcgagactcccttcttccaatgtccttatattgtctccagcagaaggtgtagcccagattaaaggtttgttctaccacacctttaatcccagatgatcttgagctcggagatttaatcttaaacttctatctccaagcctccagataagggtcactggtgagccttccaatctggattgtagttcattccaaatatagtcaggttgacaaccaggaatagccactacactctgtttgggaattaatgggtaggtgatgctttctgtgtgtgtgtgtgtgtgtgtgtgtctgtgtgtctgtgtgtctgtgtgagtgtatatgtgtgtgtgtttgaaggcgtgtgtgtttgt

SEQ ID NO: 32391 - DNA, 1626 bp, Mus musculus
ccaaatgcaaaaaaaattcatgtttccatttttatcacccattgctattgtgcctactgggtctggttttcattttgctgttagtctaaccaataatagccttcagtgaattttctgtggctttaattttccacaattggttaaaaaatagtaatcacccaaaccccctaccatttcagcagggcggctggctcttcagaagatgcttccacgtcccttcagaccacatgatagcaagcatgagtgcaagccttcccccacccacggggaaatgtaataacccaaaggttcagagcctccgctctgtcgtgcgttcatatgagcccttgggcctgggccctgcatgtcctgatagcatttacagcaaggctctaccacgaagcaagattctgagtaacacaagcatgtatgtatggttgtcattgctggggagactcttacccggtcagggtcactgctcagaggagtatcctgaccactgctctaagctttggcatgggaaaccctgatttttgtctcttgctctgaccacctgcgcttctaagagcaaatggggaatactgctttaaaattactgtgttcagtaaacattagatggagagagaggtgccagttgtgacctttataaatatcattttgtcccttgctgtgatcacaggactctggcagatgccctcactggcctgtcagccatgtgcctgttcactttatctgtggcttgaccacacgcagcgatcgataccggctgaagcttctgccctggaccgctcagtcccctgttcgaggttaccatcggtggctttgtaattactgttcttttcctcacaaaacaaatgtgagcatcatgtttacatcgcatctctgcagcgtagttggcttgacaaagatgagcaggtgtctctggtctcagtttcataagcacttatttaatcaggttttcaattgtgcagcaaggtgctcaaagtaatagtctataaatatatttaatagaaacttgagtttgacattcatgggcgtaaagacatgtattttttttttaaagaaataagtattgtgtaacactatggctttgcttctgtagcccaagtagagaaacttctggaacgccatgtaaaaaagcaatgattgattctgacgctgattcattaaaactggatgattggcgtttggtgacattctgttgcccgcccacccatcacgctgcaaaccgtgtttgtggcagcacaggccgcctggttagaagagtgagtgcagcaagctctctggctggcacctcttaattttcagaagaactgtccaaaattagagtaatttattttgctttacaggagtttgccatgtattgacttaaatattgtattttggtaataaattttttttgttaaaaaaccacttgtttctaagtttccttagctgtctgcgtgtattcctgtcttgggtttgttgagttagaaacttgcatttaagccactgaaagcttcccgggagctggttggggtttactgttaggctctgttaagttgctgaggtagccctggcgcaccagggctgcgtttcacaagcatgggctctgggccttctcccctgttcaacagccctttagcttccacagcagacatggcgatg

SEQ ID NO: 32392 - DNA, 1144 bp, Mus musculus
tccttatagtaggatgtgaatatattttcagaatttcaaaaatttgagcagagaagtgtgatttttcgttatctacagttaaaatttggcataagaaatagtttatccagagttacatgaaatcatgttggcttcacagactgatgctttccagtagctcgaggtgactccacaggccccaaggatggctgtttctttaaacaaagaatcatgtctctttagttctagaatctcaagggtttctttaaacaaagagtcatgtctctttagttctagaattgcaagggattcaagggacattagttctagaatctcaaggaggctgggtgacaggataaggtgttaaagtcttacccaaggaacagggtctttatctgtctctaggagaccgtttcaaaaaggaattctgagctgtttaagtctattagggacagttgggtgcattgataggaacctcccaacttagaagatatttaaacatttcagtcagacaccagagttgacattatcccataacccatgctctctgctgtgcactgtctctagatatggaagaaagcagcagcattgccatgttggtgcaagagattggagaaccggaggctgtgttaactgctgaaggagtcctcagcccttcctcagaagttgaccaacaaagaaaagctaaagcagatccattggtccacgttatccagaagctaagcaagatagtggggcatgagaagtcacaaaaatgtctactgattgggaaaaagcgcccacgtccaagtgagacagcaaactctcttgaaaagctagagaactgtgagattccagctaaagccactgagtcccctgctgctggggttaggaaaaccgagatgtcacaggcaagttccactcttgcttcaaatgatgggaaggctatgtcctaccagtgtagcctttgtaagttcctgtcaccatccttttctgtgctgaaagagcacgtcaagcagcatgggcagcagcatgacgtgatgctcatgtgctcggagtgccacgccacctccaggagccagcaggagctcgaagcgcacgtggtgagtgagcacgagaacagtgccagtagccaggcccggtccagcccctccggtcagggagccacagaaagaaagagtgagac

SEQ ID NO: 32393 - DNA, 1237 bp, Mus musculus
tctgtgatttcgtccctttgataatgagataggactgggtgggggaggggagtcgaggaagagtgtggtataggagcttacacatccggtggagtccaggctctccgtcctcttccgtctccactgggagctgtactgccctgccggtgtgcgacatgggaacaggatgcccctgctaaagctttgacatcggcctccttagtctgctgcgtgtcagtgacgcttgggaatggcggctgtctatctagactcaggtcacatgtcagctgcctctctctctctctctctgtctctgtctctgtctctctctctctctcagatgctgtgaagtccaggtttcaaataaggtagcaattatatcctatgacttagtgctgatcaacaatacctctctatctaattgccagcctgctataatcatgttgcctattcttactttcgccagagacagaaagcccaaattttataaataccctgttattgtcatccttccattaaacaatagggactatgaccctgcccttgctttcgagcgcctctagccccaggcagtttctggattaataaatctacacattttctttcaggtaagtaacaccccatgtcctagtcgctctgtctggactccacacccctacccccccgtctgtccgtgctcctttgtggtttatctgcagcttgttaactgtgcaaagtcaacagaagaacttaaacacatacatgtttttgagtaaataattcctacgggcataggtatgtgtacgcacacagcacaccagcctacagtctgtatagagtcagagaggctgagaacattgccctccaccccacatgtttgccaatagtaatggatgcaaatacttagaaacctgagtgggagaggagatttcactcctagtcacaaaccccagtgggtggtgagtccacaggtcaatgaaaacctgactgggacaatgctgtgccctgccacctcacctgagctcgcagggctgggcacatggtagcctcgccagcattcctttcttgtgtctgattgtcatgtattttgtaacactttagaagaatacagaaaagtgcagtaattatctttctccatagtatttaagcagaaatattgctagtgtaatattgtgtcaggtcgtcgtattaaccaggaacaggtgacagtaaaatcccagccaacagcactctgacacccacaacttaaaaacggcgatcgaagcgaaatgtgtaaatg

SEQ ID NO: 32394 - DNA, 1229 bp, Mus musculus
tctacaaggaagcagcgatcgctttgggataattttccttcctgtcccgaaatagccgcgtgtctgcttgtctcggggagtcagccgagacactcccccacccccttgttactggctaagctgcaaatgtgattttgatcccagagtgaactttccagctagcctatattacaaattaatcgaattccaccagtgcccacatttttaaacttttagaaaaaaaatatttaataggaactaagcaaaaagaagaaatcaaaccagctgctgacacagctgtttcttctcttgtttaattcagttcaatataaaggtaccatatgctgcttaaaatgatgataggaaagatgaaataatttaagagaataacaagaaaatacatgaattgtcagcattctgtcagattcaaagaatgaaatagacaggtgtagtattgacatgtttaactttgtgtggtgttagcagttttggtgtgaacaacttctgacatgtgctgaagtgatgtgagaacacttctcatccactgcagacatcggcgaggaggccgggagagccggtggcgtccagcagcaggcgctgcttcgagacaggaacctgggctcggccatgaaggactgcccgtactgtgggaagactttccggacttcccatcaccttaaggtccacctgaggatacacacaggtgagagagatcgaggtgtgttcgggtgtctagagggtaccgctcagagctgaggaagccccagaattcagctgtgtctctggcccaagtccacagctgtgtgagtccctaacactgtgccactcccgtgtttcattgctgtgacaaataatgagagtgctgcagttgagagagagagagagagagagatttgctctggcttgtgcatttagttcaaggtcagttggctccattgcttttagttcagtggcaaaatataaacagaccaaccattataagacgaccccccccccccagatgaccaggcagactggcctctggcccagcacggattccaggcccattcttggggctggacagatagagtcatcctcctccgttgcatggaggttaggtagtccactacggtgctgcctcaagagaaacctagagacgttcgttctcagccaacagagagaaatggccactgggccaccctggccatctctcttgccttagatcactagtttcacgcagtgaggacaatcttttagaactttgccttgct

SEQ ID NO: 32395 - DNA, 3067 bp, Mus musculus
gaggccgtggctaccgaggccggcgggagcagtttggacgaactccaagagaaccaccccaagaagcctttgccctcaggagtgtctgaggtgtgtgtctgtgtctctgtggcatatctcacaggcttgctctttacacttcaaagttctcagcttgtgtttaagttctgaggaggggagacggtccaaatactaggtagtttttaagaagtgactctctggtcttcatttttcttgatatataaagacacatcaagacattgtggtgatatgtatgtcatttagtctcatttcagttgaacatagttggctttgattagatgaagttccacaaacacttagccacaatgaaagagcttttttggtttgggtgacacatctgacttgtaccattggattgattgtcctagaattttaaagctattttgattcacgttagtcttagcacctctagttttttagtttttacgggggcaaagtgcaataaagatcttgaataaataacctccccccccaaagaaatgatgtcagcattggtgaaacgaagcttctgactgtcagacagcaaggaagcaagggagcctgggcagaagcccgcctcttgtgcccgtgtcgcttctgtgttcactgatgttttctagagagctggaggtgtcaaccataaaaaactccttgaatttgatggtgtacttaagaaaaataatattacctggtttctttgaaccattagtattttgatgtttattatccaaaattcttgttaccttagtttaaaaaaaaaggtcttggaaatgaagggtaaagatttttgtgtgcgtcttagttatatttaacaccatatacacatttgtcttacaggctttttctggaactgtaatagaaaaagaatttttatcaccctccctagcaccatactcagccattgctcaccatgccctccccaccattccagagcgaaaagaagttccatcagaagtatcagaggaacccacaaagagggtgtcaaagttcagagctgcccgattgcagcagagaagctagagggctccgcctgcagctccagctgcgctttaggacatgcggcggattcggccatggagttgggacggcgtcctgcttggctgggcagagctctctcacctttatcagtggcattgggaaagtcaaagtaaatgtttgaatgctgtaatgttctgctggcttcgttaattctgtgactactgtctaattggccttaggatgcaggaatagcgttttgagttacttttcaaagaatcctgtcatatattgtttgtgtgttttcaactaaacacaggcagtttcgtaccagctgtgatgttgtgctttccatatggaccatgttaaagacacttttaaaatctcaaatagattcaacaattatattacttgcttttacattttaaaggcactttaaaaaaatctacatttcttgtaggtttcacagctgtatggttctttgaaaaattcttcctttgaatgtcatactgtaatctttaaggcaaaaagctacacaaaccctttgggaaaatttgactagaagaagaatattttgtacaacttttttttttttggaagtaaaatttttatgaaacttggtttctaaaatgttgtgaacttcctggtttagattgtgtataaaatgtctttgatttgtgtataggccacaccacagattttcaaagttttcaagtcccacgagcacctcctctccccatacacacagttgtcattggcaccattctttggggggaaaaagtttgtctagatgctttaacactttgttaaagcacaggccttttgtttgtttgtttgtttgttttacatttcaatcttcctcacattttcattcttcaaggatgctttcctaccagtaaaaaaaaagaaagaaagaaatattatattatatttacttgtagccaaactccttaaagagacattcagtctcaggttgaccattacagtgcaagtgttgatcattagcttgatgcatgctaaaatgtagcttttaaaaagcattccgcatcagtactaaaataagccatcaaccccagtccaccctctattcacggctaaatagttagaggttatttatagcttctttaatgaattcttgcttaaacaaagtgaaattatgtcctagaaaagtcgcagctgtaactagagcagtgccactgtcagagttttatgaaatacatgctttaatggtaaaatggtatgctagggtccatgctagttaatggataatgcagaacaggggactgaattggaaaggctgcctaaaaatataatagctcggtttttctagccgttgttgatcatctgtacacatattttgtacttaaaaaccacttttctttccaatcacctactctcaaccagactatcccatcacaccgactctaggcacaccctgctccttctccctatgagaggcgtcctgtgctaacctcctcctgatgcaagcctccttgtggaactgttggatcttcagatgtgtaacttaagtgtgctgttattaaacactttctatgttcatgaacttattttgagcctgctttatctatttgtgtacttctttcaaattggtctgcctcacagaacgtgttcaacgacatgtttgtgctttctgctgaagacccacatgaaatagtgtcactcagtttcagagtcagtcttaacacagttttaaactgtaacttgaaactacactttgatttgtttgaaggtaaactttatttttctgaggcatgttgtcaccctggttggaattgaacttgaagtcctcctaatcctggggtcaggggctgagaccgctggcttgcatccagctaagttctctcagctctacttttgctcttaaacactagaatgttacagtctcatcttgtgcttttttcttctgttccagccttagaatgagctgctccaaggagctctcattcctaagacagtggtgcctagaaaccaacagcttcttatgagggtttattgcccccgagctgtgcttggcctattcatcaggcagaactatgcgtgtatatacact

SEQ ID NO: 32396 - DNA, 1166 bp, Mus musculus
gtgtgtgtgtgtgtgtgtgtgtgtgtgtgtgtatgtgtgtgtgtgtgtgtgtgtgtgtgtgtgtgagaacaggtgttcatgttttttgttttgttttttgagacagggtttctctgtgtggccctggctgtcctggaacttgtgctgctctgtagataaagctggccttgaacacagatcttcctgccttctgagacctgggattaaaaatgagaaccatcatgcctaccaaatttcttagattgcattcatgctacatctggccaatgttcagagataaaaatctacgtgtgtcctgtgagctcttatgttttgagtagctacagtctgctgagatgtgtaagagcggttatttctattgtctgtatttttttaatcttatccatattttctttcatcatctagtaaacctgatactgtgattgcaaatggagaagacagagtgtcttctgaggaggaaaaggaaggtgcagacacaggtgtgaatgtggtgtctccagtgacagactcctctgccgccagcagctgtaaaaggcgtgctggaaatgcaggactccctaatggtcaagtcaatagtctgaactattcagtgaatggctcaaattcttaccacagcaacaaagatgatgatgaagaagaagaagatgacgatgatgatgatgatgaagatgacgataatgaaagtgaccatgctatttcagcagataattctattccaacaatatatttctctcatactgttgaacctaaaagggtttgtatacttctaactttgtagtcattaaatgtcatccatgctgtattttagaaagaacattaacattgactaggattgtcaatgctatcaaacaggaaaagcacctttttctcttatccaaccgcttcaccttaaaagaaaaacaataattagtaagcgatggtagtcagtctgccattctcagaaggcccactaatgtactcttgactgcagtgactgtggttgacctgccctcattccagggctctcttttggtttgctttcagatctgaaaatggcttcaagacaaggttattttggggcaaggggaaccaggttgttctttttatgtaggtgtcaaatgagtactgttatcctgaacagcaaggaaaagttgggttgagggataaaaactgggtaattatgggtt

SEQ ID NO: 32397 - DNA, 1234 bp, Mus musculus
gaaaagcagatagttttgcgttcatatttgatctatctcctgccaccacatgacagttgcaaataaaataaagcaatttaaaagagagtattgttcatatataaaattataatagaactttccagagattagcctctatcaattcctcctggagtaagcatccttggcggtgccttagggtttgaagtatcccatggcaggacgttttatatcactctcataactggattctcttgagtttgggtggcgagtggatgttactcgggtggagttccgcatggtagccagggtgcattgtgactttgtgcttgtgtgatgttgaggttctagacggctacggtgacggctctttgaacagggtgactgagtgggttcaggaagctgagcagcacttgtgaagggccctatctttctcaacacttttcccaaaagacggggtctcatgtagactaacagtcatggcatttcctttttaaacaggaaaacaacgaattgctcacaaacctcattccaaaccaaaaacttcagatatttttgaagcagattttgaaaatggtgtaaaacccaagaatacatttgatgctgatgaactgtgggctcgacttgaagagctggagagacaagaagaactgctgggtgaacttgaaaggtgcttaatggcagattagctttccaagggaatatgtatctttcctcatttataagatggtgtgtactcattgaagaaattgcagaaaactgtagaaggatcagcatgcccttatataaacatttttgtaggatatttccttctgtgtaaatacttacactgaaaatcacaatctccatgatactcagatctcgcatattatacacacacacacacacacacacacacacacacacaattatacttgatagtcagtgattgcattaatgctaacaacaacaacaacaacaacaaaaaagaacttaaaagtgaccaaagtttgttttttgaggaactggggattgaactaatgcctctatcctgtaagacaagcattctacagtgccatggccaccactcctaaataacaaattttaaatgatataattttatactgttttcaggataatgctctatgctccagtgacttgttaaaaagaaaaaaaaatggctttgaatttaaatttgatactgaaaatgtttgtccttgtatttcatttacaaactttctgtttattgagcaggcaatttataatgtcgtctggt

SEQ ID NO: 32398 - DNA, 1150 bp, Mus musculus
gaggcatataaagtttgcaataccaaggggcctctcttcccaatgatggccgagtaggccatcttctgctacatatgcagctagagacacgagccctgggggtactggttagttcatattgttccacctatagggttgcagactccttacactctcccttttttgaagacagggtcttacctggtatcccgaggtggagtgggacttgccatggaacccagactgctctcagagtcccagttatcctcctgcctcagcttcccaagtactaagatttcaagtataagctgccccatccagtatcactgaaataacaattcccatgaatacctgaaagtgttttcctacaaccttcatatatgtgtatgtatgaaatttattttgtctgaaatactgatctacatatttgcagaaatacttattcacaatgatggcttcattcttctgtgtttggtaaattgggaagctaatttttcagagttcctatttaatggactatatttgtggtactattttgtatagaaccttctttgttttttttattccacccccccccccccgccccttcatcccttgagtgaagcagagaatagtcataaaattatcttgccatatcatgtgcttttgccactggattgggcagttactaccccaagggatgatggggaggaagggtgggcacagtgagtacacatcccttactttgtctgtagccttttctttctttctttctttctttctttctttctttctttctttctttctttctttctttctttctttctttctttctttctttctttctttctttctctctctctctctctctctctctctccccctccctccctccctccctcccttccttccttcctttttccctctccctctcctccttctctcttcctctccctctccctctccctctccctctccctctccctctccctctccctctccctctccctctccctctccctctctttctctttctctttctctttctctttctctttctctttctctttctctttctctttctctttctctttctctttctctttctctttctctttctctttctctttctctttctctttctctttctctttctctttctctttctttctcttcctcttcttttcccttt

SEQ ID NO: 32399 - DNA, 1102 bp, Mus musculus
tttaaagaatcctaggaaaacgtcttcatccttagaaatgccacagattgtacatgtaagattcacaaagtttaccatagaaggtgtgtgttagccaaacacttgggattgtgagtgaccaatcataagagggaaaggagccctaataagagggtaaggaagccagggagtgatgcaggcatcagagggagaggagagggggatctctcccagtcccgggttagagaactgtgctaaaattaaggctaatccttattcccttttacttgatctgagctaaagttaacattgaagtattttaagaagtgctgtggtctttaactggacttagagagttggtgatagtttcactctgggtacatgtctaaagtggaattgatttatttttatttcatatgcatttttttggcctgtatttatgtctgtttgatggcattacaaactataattacagacagttgtgaactgccttgtgggtgctggaattagaacccaggtcttttgggagagcagccagtagtcttaactgctgaggcatctccagtgcactggtgactgagcaacttatttgcaagatatgtcttggaactggcagtccagcgagagaagctgacctaatgaatttagacagcctggagagttactcccagactgctctcataccttacttaacccgagtaggaaggctctgtggttgtgggcagcataagcagtgttagaagtgaagtaaagacttcctgagagaaggatctgaggttagacttgcaggtaactgcaggtgcaccctgttggtccaactctgccctgctactttactgtgcttggagagtgaatgggttgatgcccccttgtggtccattatcaaaataaatagcacaaacacaaataagcacaggagcgctcagctcacttactcactgcatgttaaaccttcattcctttataagtaacatctaaaaagtaatttctgaggagaaccatattttgttttgttttgcacagtttcatggccttacactttataacacataattttgaccctttataacagaatgtgtgagtgctgtgctgaggaggacgtggagaagtggcatagtgactg

SEQ ID NO: 32400 - DNA, 1064 bp, Mus musculus
tgtgtgtgtgtgtgtgtgtgtgtgtgtgtgtgtgtttgtgtgtgtttggattttatgtggattctaggcattcacgcccaggtcctcatggttatatggcaagtgcttttacccattgaaccaacattccagtcatgtctgggttttaaaacaggatctgaggaggcagttccccaatctccaggcctgttctgtgtcttagaatagcctgggactcatgctcctgcctcagcatatcactgccacccaggtctagaactattcctttttaagggtaagtaatattttattgcattcaagtgtattaaaattgttttatacaatagttatctgtaagtggacacattgccttcattttgaaggctatgaataatgctactgtagacatgcatgtgtgcaaaatttatgctgtttgctttgagtgctttgggtgtagtcaggttaaaacgctaggtcataaagtacgtgtttagtgtttgagggactgctgcatgactgtctacctctgcatgactctacatccttcccttccagcagagttctcagtggctccagctcctctgtacaaagaatgctcgttatttcccattttgtgttttaaatgatggccagcctgatatgtgtgaagtggtatctcactgtcattgctgtttctctgccagttccctcctttttgtctgttgttggattaaccaaacataacattattgttacttctgcccattaacgtctttatgataaattattgaactacatgtgtactatactgtgtgtatcttaatactcagcgtgctgcgcatttacactacgcttgtaccacccaggttcagcatgcattcatttactcagccgtttgtcttttctttctttccccctccttctcctcctcattgattgattgctttactgattgagattgggtttcactatatagttctgactggcctagaactctgaagagatccacctgcctctgccttctgagtgctggcattaaaggtgcaaggcttccttggctcccaccacatcttgattattgtcagtacattttgatggtgtgtatt

SEQ ID NO: 32401 - DNA, 2395 bp, Mus musculus
taatctgaaagtgctaggaacggtttcttctaatagcatcttccttctgttcccttttaggaaatctaccctccaaagttgcaccagtttgcttatgttacagatggcgcttgctccggggatgaaattcttaccatggaattgatgatgatgaaggcaggttacacattaatatcgtgtgtgtgtgtgtgtgtgtgtgtgtgtgtgtgacagagagacagagagagactgtctttcccttgcaaggtgtggtgtgcccaccaccaccgtgggtcttatccagttagccatgtggcagggactatggctgagcttttcacaactgtcacttctttcctttaggcccttaagtggcgtctaagccctctgaccattgtgtcctggctgaatgtctatgtccaagtggcctatgtcaacgacacgggtgaggtgctgatgcctcagtacccacagcaggtcttcgtgcagatcgcagaggtatgtggaccttctgcttgcccactgtgtgtttgtgtggcacaccacagctcaggggcttctagaagcttcatgtggcatcttgtcttagtgctcctgtcttccttagcttctagacctgtgcgtcctggatgttggctgcttagaatttccttatggtgtcctcgctgcttctgctttgtatcatttctcctcactggagttgatgcagaaggtctcaggtatgttgggctttcctgtgagttcacagacaaggtgtcttcaaggtacaagccagctatcagctgcggactgagcctctgacttctttactggcaggttatcagtggtgcgacatagagaagtgtgtcaaatggatggttccgttcgccatggttatccgggagatgggaagttccaagctcaagcacttccggggagtccccatggaagactcccacaacatccagacccacaccaacagcttggatttgctggtcagtaatctccttgctccctcccatcagacaagtacttaaccaactctgcctaaggaaaagccagttctaactccattaagaatgtttctagtccatagagtctgtgtctcagtatgcgaatactatagacattaggtgagagggggttgtttactgagaccagttcttactagatatagcccaggctgaccttgaactcagaagtctgactcccctcaagtggtaggatttgccaccaagcctaactataatttttgctatttctccctcttgcctccatattaaaaacatacagcaagaaaaacgacactttgtttaactttgacaactttccctcttattcttatgtaggacaaagcccaagcaaagaaagccatattgtcagaacagaataggatttctcctcctccgagtgtggtcctgacacccccacccagcagtaagaagcagagcagcgagcaggagacagaatgaccaaacctgccattgcctccaaagacagtggtgtggaagcagctgcctggagctccctgtgctgccttggaggtcaggagcccctgcagatgctgtgctctatggagaggtgcatctcttccggagcagcaggggtctgcaagatgccttggatggaagtgcttttattgaatgctaggtgttttaactatagggtcaagtacaccagccacctccagaacaccactgagtgctccagaagctgctaaggagggtgctacttgacccactggactcttcacacagatgacacaagcttgaagttaaggaggccacgccatggcggttgctggcctctgctcgggtgttgtaggttgctgttgataggctgtgaccagtggttgtgagcaagtgtgggatgcagagcccacagcctggcctaggctgcccttctccactgtcagccaacagcatgtcctgccttcatgaactcttattttgtaagtgctgctatgtctatcaatttttaataaagataatactatctttgaagcagctgttcttaactctgtctagtatcagaaactaggagttgccttttagagttggtctaccaagttctcttgtttttttttccgagacagggtttctctgtgtagccctggctgtcctggaactcactctgtagaccaggctggcctcaaactcagaaatccgcctgcctctgcctcctaagtgctgggattaaaggcatgcgccaccactgcctggccagtttccttattcttgagacagtctcacaatgcaacccaggctggcctagagcttgctatatagcctgggcttccatgaggctctcacccacaatgccctacacaggcagcagttcacactgtaattgtcagctgtctcgtggaggcattccacacccagggagtttcactcgtgtcatctgtcctctccagagtattacaggtcatagagct

SEQ ID NO: 32402 - DNA, 1180 bp, Mus musculus
cccgggtgggggtggggcgaggccgggtcacccggtcccctgaggtatcagctcggggtgccccggccggggtggctgtgagagacgggtcaggggtaggtgtagaaagggacactgaggcagccccggccccgaggacggtgatggagcggggggtcctcttgaagggcggctgggcctccatccccaacctcaggttcggacccagggtcgcaggctgctggcggcgcctgcgggtgacaagccacccgggcccatcggccattttcccggccggcctccgggcccaggaggctcccgccgccgccgcccgcgcgggaggggggaggggtgcccgggacgaactggaagactcaggtcccctctgcgggccgtgctcaccacgatgcttgcttgttgtcctcccaggtctgagttccaagcccaagtcctgagccatgccaagggagaggtgagtggcctccctgctgcgggagggtaagggtgagtagcggtgggggaggggcggcctgagtttttggggagcagcaccccatgacaccatgcccttgcagagactcgacggaccacagcaacatgaaagaagaaggtggctccgacctttcagtccgctccagaaaaaggaaggcaaatgtggccgtggtgagtacaaaggatacaggttgggaaggggacagcccacccccccttccatcttacctgggtaccaaatttggttcttcttacctactagtgaaaagaattagttgagagagaggtttcctttagttgaatgtcgttcatgacctaacaaacatttccccctttttctcttgtgttttttgtctttgggtcgcaccatgtggacccatggtggaccgggatttttttttttttttttttttttttagtttttgcaagacccagatgaagaaattgccaagattgacaagactgtgaaaagcgaggatagcagtcaggtaggtctgctgcctacagggtattctgcctcctgggttccaggttttctttcttccaactttcccaaaacagagctgcaggccacatggctgaacctctgaagcttgtcaatgtggcctggtctcagttgggcctggggttgtgggaggggtttgtgtttcctgaatggcacctttaaggttacaggtactgatacctggaggaaccagagtgagtgtat

SEQ ID NO: 32403 - DNA, 1213 bp, Mus musculus
tgctgccggctaactgccatccagtgtgcccagcagtttcagacctgactctggagggaatttggagacagtgtagacagcagctctgctctgtattctttttgacaaaaccagaacagtagaagtagccaatcgtaagacctgaagacattttgaatgtcccactggactaacctttcttttgatgtgtgtttttagtttagaagtgctatattccacaagggttaagtcaatgaggttggaagacacctatcttttttttttaattcaaaaagcacaatcagtctttcctttgaaaatccatataaagtacaacttttagcgtgattattttcctaaatacaaagacaaataatttacttattttatgttaattacgggcatgaagcaaaaggtttctttggggaacatgcagttttgtagtgctggggttggttcatgtcctctggcaccctggcttgttgaaaggtggctttagctgtgtgctgtgtacctgcttacgtggcctgctgtcctctgtgtgattaggagggtttctgctggccctgcagcttgcttccctgcggattagttctttgctcatgctatagccttcatgtgggtgctacctagagcaggcgtgaactgctgggtggtgattgtgagttcagacaataaaaaaatgtatttttttcaatactgtataaaaatagtattctgattacctccccctcaataaaaaaaaaaaagtccagaaaaaaaaaataaccacttggaccgaaatcacaatttttaaattgtgcatcttaactataagaatctctgtttacaagtaatgataacttgaagccttacaatgctccattatgccatcacagagcttcattgtgctaccagaatattgcatcatgacatcatagtgcccatgtgtgccatcataagacaaattatggtatgttaatgctcaattttgatatattaatgcccccatggaacattacaattctccagtatgctaacaaaatattctaatgtgacatcacaaaggagaattctgataatttaatttttttatgttagcaatacttcaatatgccatccaaatgttacttataatgtcagtgtccacttgtaccatcagagtatgaattatgacactacaaagttccatttttacataaaataccctactgggacatcacattacccacactgtgccaacataatgtggcaa

SEQ ID NO: 32404 - DNA, 1219 bp, Mus musculus
ctacagcgatgatgacactcaggagcacaaggcccaggcattgctgcgtgtgctatcgcgcttcgcgccgcccaacatgcaagctgcagaggcagtgtcccacattcagagcagcggcccgcgtcgccacggagcctccagtgctgtcagctccaacaacgcaggcgctgctgtccgcaccacctctgaaaccagccacgatgacaagaacccacctcctgggagccctcccgctggatcaggagttcctgaggccgccgctgccgctgcctccgcgacccacacagccaccacaactgctgctgcagctgctgcttcttcatcagcatcaccaccatcagggcaggctgtccttctgcgccagaggcacggctccggtaagggcaggccccaaaggggttttgcatgcccggtggagagggaggttagcagccagtacatcagcagcgctagatagctttattgtaacagcagttgtgtgcgccagaagcatcttttctgctgtgcctttctggtgttctctgagctttttcccagtcttgactcttaaagggtttgagcatcctatcaagtatattcataactcagcgggctgctctgcttgacactgaggctgggttgtgaggttgtgtggttgctctctcggacagcattgagaactgtactctcagatccccaagtttggacagatattccccaggtggggtattcctcttgaaagaagcagtgaaaacaagctgttgtccctctttgccgattggtgactttgaattgtcttgtaagttgcaggaaggttggctaggtagcctttgctaagtggcttctaggtgtggctttacacaagctgtaaattttgtatgcacatcagagttccagttctccatggttccagagggaatggagccctgtatcacacttatgaaggcacaaggaggctgatacccgttttcctaggactagggatgcaaagagttgaggtgaggggttgtcagaatagaagaccagaaaagtgagctgctgctctggtaacaagaccctgggggtgttaacatagcagtaatgagggtttcaggaggcccagaaaaagcagaaacttctgtgccaaatagcccttctctcaacatggctcccctcttcaatccaactcagaggaacactatcttcagtgctcactcctagtatctgattttaaataattcaccccctgcctggaaccccc

SEQ ID NO: 32405 - DNA, 1175 bp, Mus musculus
catttcacctctgcaactgtgtgcttcactgagataagagggaaggcaattgatggagacctatcctttagacttcctctcccataatgtctggctgttagctcaattgccttcagagaaagtatctgatggtggcaggttaaatctttcaaataaggagtataggagaacataatcaggagtcatttcattggtatatatttttgttaactgaccaggtattttgttttactctatgtctatagattatctagtttctggttcttggttacccaagcattgttgaatatagattctttcttgtggagtaagtcttaagtcaaatcaaaagttcattgcctactcccacatgttcattgtctccattgcgctagcacattatgtagggacaacaggttgtaggccaagggttttttggttgctggtttccatgtttctctttcagtttcctatgcatccggagtcccacagcattgcaagggcactagaatgtatttgtgaaggctccatgttgccatcgacccaactactcgatattcagtgagtatgtggatgttatcttcagccatagggccttctctgctgatatacagcactctttttttctaagcaacaacctggttttgttgatctacatgggacatacggccaaaacctcagcagaattttatgaattttgccactggaagccttaccaggacaagaaatgcgataagactttatacccccattactagaaggccttattgggatgcccttcatagatttgaggaagtttcccttgagtgagttcccatatcacacccataatagcctctctgtacctgtgttcactgcctacactctcttcatccaccccatatcccataccatgtcaatcatcattttcattcccatccacccttttatacctttagaatgtactctgttattgtataaccaagagacacatgtgttcctccatctggatccctcttctttacccaggttctcaggatctactgattttagtacatgcaatccacaggtgaatttataggtttttgttatctcactcaggatgatttttttctagttccattcattttcctgcatattgcataatatttatttttgtaatagcagagtatgactccattgtgttagcatgactgtccatgttgttgtaaggatca

SEQ ID NO: 32406 - DNA, 1153 bp, Mus musculus
gatcatttatccaggggaatagatttgactagtgtcaccaacatcttcaggcattattatatccctgtttattatgccctgatgacctggaagaaatatacgattgactgcatcagaagtatctgaagccttggcactttaaagaaatttcagagtcccaaatctctacagaatgaagaagagtgaaaagaaagatcaggagagaaactgacaagtcttaaaaagtggctgagcacttgaccaatgccacaagacagtttatctcaaatgtggtaaaaagacagcaatgggagcaagcccacaaggaaactttgtacattgtatgcctgctggagttgatgtcccgcataaggagagaaagaaatacgcaggggtgaagactggcttgttagatcaggatcgtattctgcttctctgaagcctgtaaaattctgttaggaggacacctggactcccaagactcaacaggagtcagtcactctaagactggagcaatcatgtctttgcaaagagctgtgtgaggtatggatgaactatgagggcaagagctttggattggaaagccaaaggaccaaatgactagagggcaacgctcagggtgtacctgaggacaagctggctcctactgtgctctctgcattcacttagctgtcatgggtcagcccctccaggtcttccactctttccttattcttggcaactacaatgtagctgtcagtaagagcactgtgctccttccctggcagaccccacccattcattaatccttgtaacctgcttccctggaagactaaggatattctaaagagatatttcttttcctttggctaacaattagtgaaccggtgggctgcatgaaattcaaatttcctgggtaatcacattctgggtaagattgagtcctccatcgaagaaggcttttgctgaagaaacatttgcacattgcaggagtcagaggagctaagaatggggtatggtttgagggatggctggaaaattcttatactgcttggatggattacttagcatctatctctttccttccacctaaatatgtcattacccccagtgattgaatagtttgcttctatctttgtcactattccagtttagttgcactcaataaatttgtttctaattttatgacaaattt

SEQ ID NO: 32407 - DNA, 1893 bp, Mus musculus
taagcctttagattcctcaacaccattgttacaggaatgaatgcttacacaagaaaaatattcacgagcaaaaatttgtttaatgatttgtttaattttaattatgtgatgccagtgtatttttatatggctttgtgcagatacatgatggttccaagaaccctttgggtcatcttggagcaggaagtacaggaaggcagaaaaccctgatccttagtcatagaaagaaacttgtctgaaatgtttgtttggccatggcctttaaatatttgaaagcatttatctattatgttgagatgaggtaataataaaaacattcatacatgagaaaaatcctgttcctacaaacaacttggtaaggattttggcatcacattcaatcaccagaaaaatgattgctgcacctctttttcaaaatagccttgaagcaagtaaataattcaccatgttcatacacatctgatggttctcatctccacatgtggtttatgttttgacaattttgttttttgagacggtttctctgtgtagcctaaagtgtatttgatggttcttatattgcttctgtggctactgttgtcttctcttgtgtttttacttggcagatgtctttttgcttcaatgtatataatataatgtctgtcaactaagtggttcattgtctatttaaaaattggactgtgtgtactcttacatttcaagtaagggtgtctgtgaatgggtggggggctcttgttcttgatattgtttatcatattttcacaaattccctagagatgatgtttgttcatcaagcctggcttggatatcagtaattagttagggctgcatagaactctagattttcatgtgtcactcttctgagtacaaatccaaaaccagaagatttacccacaatatatcccgttttgtcacacagtttaacaacattaatgttaaaatgcttaatagaagagaatataagaaaaaatgaatacattatgtgtgtaaacaaagtaacgttttcacctatctgatagagatgtaagaaagtagaataatctgcaatcaaatgtagattcacaacatagcatgatgtgctataaatatgcatatattatttggtgttccatgcctcttcatttcccccttagttatccattgaacgcatcatttagaactatggacttttaagagaattacctagaaatgccagataatgtaacaggaataagatttattttaaaaatctgctggcatacacacacacacacacacacacacacacacgtgcagtgtgcttataaattgttaggaggccatggtggctatgtggagactgcaagacaacttagtgaggtggacttttggccatctttatatgataatcacaatcagcttgccagttttgcactcatagatgtttcctgctgagccatctcactggtactcaaataagattatttgaaatattacatcagtaagttattgtcttcagattataaacgtattgcactctaaggatggaggaaaacagaacaacttactacatacacactatggaacgggagtatacacacaaacagacccaagattttaaattggtaaaatagtagagtagaaaagataacccaataaaggagaatgtatggagtgattcaccaatttaagttattattgagtgtcaggaaacattcctattcatcaggacagtgatagtttctttttaaatattattttattcttttattcaaaggtaagtcatttaaacaaacaaaaaacgtttctcagctgggcttacaagtgctttcgtgtaatccaggaacttgggagatactgacatgtcaatctgtttgagttttaggccaacttggtccatgcagagttctaccatagccatggctctataggcta

SEQ ID NO: 32408 - DNA, 1134 bp, Mus musculus
attagaccagattatcaaattaatttgtacacataaaaaatattcatcagtataatgagtgtgataaaagttttacatgttctaattattattgcaggcaccaaacaagtcatgcaggagagaaacactgtgaatatacacaatatgataacgtcttcacatatcacagtcatcttcacaagcatgaacaaattcaaactcaagagaaaccctctgaaggctttcaacatattgaagctcttgcatgtcatagtagtcttcaaatacataaaagaacagatactggaaagaaaccctacaaatgtaatcaatgtgataaagtcttttcacaacagagacatctccgaacacatgaaagaactcatactggaaagaaaccctatgaatgtgatcaatgtggtaaagcctttgcatatcagtctgctttggtcttgcataaaagaacacatactggagagaaaccctatgaatgtgatcaatgtggtaaagcctttgcacatcactttactgtggtcttgcataaaagaacacatactggagagaaaccctatgaatgtgatcaatgtggtaaagcctttgcatatcagtctgctttggtcttgcataaaagaacacatactggagagaaaccttatgaatgtaatcagtgtggaaaaacctttgcacaaataaatcatctccgaacacataaagtagtacatactggagagaaaccctacaaatgtaatcaatgtgataaagccttttcacaacagagtcatctccgaatacatgaaagaacacatactggagagaaaccttataaatgtaatcagtgtggtaaatcatttgtatctcacagtcatcttcaaagtcatggaagaattcacactggagagaaaccttacaaatgtaatcaatgtgataaagcctttgcacaacacaatagtctccaaatacataaaagaacacatactggagagaaaccctacaaatgcaatcaatgtgataaagcctttgcacaaagcagtagtctccaatatcataaaagaacacatactggagagaaaccctatgaatgtgatcaatgtggtaaagcctttacacatccatctactgtggtcttgcataaaagaacacatactggagagaaac

SEQ ID NO: 32409 - DNA, 1177 bp, Mus musculus
actttctccacctaacccccctcacacacacatcatttggtaaaaaaagaaaagagaaccagagggtgagactccacacattggttacattaagcagaagaatagttaaagtgacctagtgatcccatgtctgtctctagtgcacagatttaaggttaagtttagaaatcaagctttatgtattaaagtagtgctgcaggttgtggtggcacacgactgtcctgtaatcttagcactctacactcggaggctgcaggatgactgcattatggaggctgggctgggcatgaagtaggctaggagtcagcagtgtagaagtaagagccaaagtgtagaagacatgcataatgctttttagaaaaagcagatttgtgtgtgtgtttcattttcaaggtttgtttttattttacatatatgaatgagtatttgactggttgtatataggtacaccaagtgtgtgcctaatgcccagagaagccagaagagatctgagaccctggaatgtggaggaggttgtgagccccatgtgggtactgaacctgggacctctgcaaggtcaccaagtgctcataatctctgagccatcgtttatgactttttttttttttgttctcttactacaacaattttgccaagcatatgacgagatagacagcatttagttcaagcctggtagggcacaagtttgtcagattctatattgcttgccagcctcctggagaacatggccactcagagacatgtgtctttgacatgtattgtccttgattttaaacgttgttgagggttagtcttatgcactgtgtattcagatgctgatttctgtgcccagagatctgcttataccccagccataggcaatgtcatgaggcaagggtacaagagaagaaggccatgaggtagaggaagaaggagattgttgctatgaggtcaggcatgaggaggcttcacgaacaagggggttctccatgtgcaccgctagctacaccaaggagcccaggagagactaaatgtaagtaactcggagtgtgtggctgggaagtagagtagctaggtagcatcaaggcttaaaagttttgctcagctattctgattaaagcttaatgactaaatcagtagatctgtgtctcaattagttgggagcaaggcaggttaggaaaactgccacttttaaatt

SEQ ID NO: 32410 - DNA, 1177 bp, Mus musculus
aagttatacaaagttacaagggcaaggtcacataaattattgctgtatatagtcacaccaggaaggtcatattagtataagttatatacagtcaagagggccaggtcacattaggtcaagctgtacgccagtgcttctcaacttttctaatgctgatacaggttaatacaattccatgtgctcatgcagggtatctgcatgctggcagacacatctagaggcagagcaatagtgtctcaattcctacgcccatcagaaatagtgtttcccaatggtcttaggtagagaactgctgttctagaactttcaggtgagctgttaaatttttagaattagatctgtccagttgttttatgtaggcatgtagtgctatgaactttctcagcattgcttttgttgtctttcataagtttcagtatgttgtgttttcatgttcattgaattctagagtctttaattttcttcctatatttgtgtcttgtcttgtctgtctttttctttttttctttgtttttctctctcttctttctctcctcttccctcccctcccctcttccttccttccttccttctttctttctctctctctctctctctctctctctctctctctctctctcctttttatttttattttttcatacaatgcttcccaaccatggtttccactctctttactgctcccagtttcctccccccattccattcatcctgcttccctttagaaaagaacatgcctcccaggtacatcagctgaacatggcccgagaagatacaataggactaggcagcccagtagtaggaaaagagtcccaatagcagacaaacgattcagaccccctcgccccctccaacacacataatacacacctactgttaggagtcccacaagagcaccaagctaaacaaccatacatatatgcagagaacctagtgtagactgggcaggcccaataatcgcctcttcatctccatgagcccctattagcccaggttagttgattctgtggccctgttctcctggtgtcctcaatccctttggctctgacaattcctcctccctcttttccacagggttccttgagtattgcctaacttttggctgtgggtgtctgcctctgcttccatcagctgttggagaaaaccactttggtgaaatttgagctaggcactgatc

SEQ ID NO: 32411 - DNA, 1157 bp, Mus musculus
ggagataacagagatgggtggtcaccaggtcctccaactccctaaagataggactaacgtgggtcctattattattgttgtcttctctttgttcttttcattattctgataattctaaatattaaccctttaaatactgtcacctgtgtgcagccacttgtttctccgtctcttctttcttgatcattattcctttccaggaatgcatggcctgaaatatttacaagccttctggtatcagaggtgaatgtgatgctcactgctgcagagaaggatgtgggtgattgttcatcactgaggagatgctcctgctccgaaccattcatctgagggcctgagggtttttctagacaagtcaaaatgtcctccgtcccatatcatagctttagaaaaatgtgtattgattactgataacagaacaaatgttgtagttaccttaatttcattcacttggtaatgactaaatcagtggacataagaggaaatgttaattttcatttcagggtcggttaactttcaaagacgtggccatagaattctcccaggaggagtgggaatgcctggactctgctcagcggacgttgtatagagatgtcatgttagagatctacagcattctggtctctgtgggtgagaatagttttcttttgggatttctacttcattctacagtgtctatcaaatgtgtttactatttgtatctgtccattgtctgagtctcagctctcagtctgtcctagacagtactgattgtcttgtttatataaacatttgaaaccagtctaccttgtgtttacatttagtaaaatccttcaatttagtagcacatactctgtgtatctgactgtaaaagttgatttctccagttgtggtttttcatgtggtaattaaaaagatttatttatttattctatgtatatgaggacactgtagctgtcttcagacacaccagaagagggcattggatccctattacatatggttgtgagcctccatgtggttgctgggaattgaactcaggacctctggaagaacagtcagtgctctgaactgctcaaacatctctccagctctttttgtggtaatttaaaggagaataaatatatacaaaaacttaagtattcatttcaggaaagtctaaaatatgtgtcaggaag

SEQ ID NO: 32412 - DNA, 1924 bp, Mus musculus
gcaagtcctttacccagcactcacatcttcaaagacactgcagaatccatacaggagagaaaccttaaaaatgcaaagaatgtggcaagtcttttgctgagggctcatctcttcaaaaacatcacagaatccagtcataagagaacctttacagatgtaaagaatgttcaaaatctattacctgatttgcaaatcttaaaaatcatcctggaatccatactggaaaaagtcttttcaaatgtaaagaatgttttgaatacattaccaaagactgtaaatttagaacacattataaaattcacgtatgagacaaaagcaagggtaattactgacatacttgttcacccaagaaaaatgttctttaaaatatgaagtatagatagaagcctttaaccaatatttaacccttcctcaatatcagagagtcacactaggaagctctacactggtatgaatttgaaaacattttacctagaaatacatcgtatattcactctggtggtttgcctgaaagtggcctgcacagatatataggaagtgacattattagagggtgtggccttgttggagtatgtgtggtttaattggaagaagtcactgggggtggactttaaggtttcagatgcttaagcaaggcccatccattgtcattcttcctgcctcctctcgaaccatgtgtagaattctcagctacctcttcaacaccatatctgcctgtgtgccaccatgcttcccaaatggagataattgacaaaacctaaaactgtaagtgtgttccttaaatattttcctttataggagttactatggttatgatgtctctcacagcaatagaaaccctaaataaatatgatatccactaagcaattttttgaaaataggttacatatgtactaatgtttcatacagaattattctgaaatcaactactaataatggtatagaattcatgttacatttgactaaacttgtaataatttaaaacataaagacttgtaactaatatttctcataaccatctaaaatcaaaattgttgcacatttatgtacttcagtggaacaggatatttatatttgtatggtatagcttcgatgtaaagatattataggatattataggatttgagctttaagtatatgttatagattatgtataatattaaattaactttctgtctcaattactagtaaataaattagagcttgtgtttgtttactgctaccttggggtaatgaatttctattttatactggaaaggtatcattaatgttagccattctatgagtgatatttttaacaaaaacatgtcgcaaaaatacaatgggtaattgggagcattttagggatgtgcagtgaggtaaatgtgggatgtaaaggtgaataccacagcacaaaggatctggtaatggaaataggaacgaggcttcctgagggaagcaaatacagaaggaagaggaaggacggtaacttaataaaaaggtgcctgaaacagtcatggtgcataagtgatgtgataggggaaacaggaaaggaggtttcctaagggaaggggaagggaggcgaatatggatggatggacggtaccatgtaaggatgtctaactatttgccttgaaaccaaacttcatataattctgtttataaagctacatatatagttatgtatcttacttgagctgagaaccctctctccaagaactgaagaccacttaatgaaaatcctaatagcagtcctgagaagttcttttgaattgtttactagggctatctaagagactcccaaaacctacagcccattgctgcattacttatctggccagagaagtagaaaggatgtacccattgctaaagacacagaccatgcacttcaaaaaacagggcccagagattcttgagctggcactgtgctgaatgctcccaccct

SEQ ID NO: 32413 - DNA, 1527 bp, Mus musculus
tgcacagattgtggcaagtcctttacccagagctcacatcttcaaagccactgcagaatccatacaggagagaaaccttacaaatgcaaagaatgtggcaaatcttttgctaaggactcatctctccaaaaacatcacagaatccattcatgagagagtctttacagatgtaaagaatgttcaaaatccattacttggttctcaaatcttatagatcatcctggaatccatactggaaacaaacgttacaaatgcaaagaatgtttgaagtccattaccacaggctgtaaatttagaacacattataaaatttaagcatgagacaaaagcaagggtaattactgatacactgttcacccaagaagtatgttttgttttggttttgttttgtttttatgaagaatggatggaagtctttaaccactcactgttcaactcttcaatattggagtcacatcaggtatccctatactggtttgaatttgaaaaaaaatttccagtgtggtggtttgaatatgcttggctgagggagtacacaactaggaggtgtagccttgtttgaataggtgtggccttgctggaggaagtgtgtctctgttggggtaggatttgagaccctctttctagtcatctgggagccagtcttctactgtttgcctcctgaacaaaatgtagaactctcagctcctcctgtgccgtacctgcctggaccctgctgtactttctctcttgattatgctctgagtctctgaacctgtaagccagctttgattaaatattgttcttttaagagttgccttggtcatgttatcttttcacagcaatggaaaccttaagacaccccaaaatgcatcttatattcactctggtggtttgactgaaaatagcatacacagacatatagggagtgacattagatggtgtggtcttgttggagtaggtgtggttttgttggaagaagtatgtcattggattgggccttgaggtttcagatgctcaagtgaaacccactgtcattctttcttcctggtgcctgctgatccaaaggtagaaatctcagctatctctggagcaccatgtctacctgcatgccactatgtttcccaccatgaagacaatttgcaaaaactctgcatctgcaagtcagccaaaataaaatatttttctttataggagttactgtagttatgatgtctctccacagcaaaagaaaccctaactaatatattcactaagcaatttctttgaaaatagactatgccaggcggtggtggcacatgcctttaatcccagcacttgggaggcagaggcaggcggatttctgagttcaaggccagcctgatccacaaagtgaattccaggacagccagggctatacagagaaaccctgtctcgaaaaacaaaacaaaacaaaaccaaaaaacaacaaaaaaaaggaaaatgaactacatatgtactaatgtttcatacagaattattctgaaatcaactactaataatggtatagaattcatgttatatttgact

SEQ ID NO: 32414 - DNA, 1279 bp, Mus musculus
aatatggtgtcgtctttgcttgttacagtggtctgtagatacacacacaccaatcataatgcagaagagcaaccgtccaaacatcattgacgtgatgaaccatttttataaattatctttgaatacatcaaagaacacatactgaagagaaaacctatgagtgtaagtgatagtgtaacaccttttcacattaaggtaaaaaaatatatgctctggaaaaaccctccaaaagcagtctgtgtgatgaagccgttttacatcaccgtcatctacaaaagcatgcaaagagttattctgaagagaaaccttatgaatgcattttaaattttaaagcctttggaaatttctgtagcctttgtgatcatgaaagtattcatagaggagtgaatctctgtgaatgcaagcaatgtggtaaaccctttgcttatacatcacagttctcaccaaatgcagaaaacaacacatactggctagaaaccttatgaatatatttaatattgtgaagccttcacatttctgtaatcatcatctgactatttatactggaatgaaggcctgtgaatgcgagcaatgtggcaaaatcttttatctgcttccttgcaaaacgtttatttaggagccctgagtggtttgacacctgacaacatggaggtggttgtcagggaacccaagactgaaagagaagtcactctaaggctgtggaaatcaggtatttacagagagccctggagtatggatgaactgtcagggagggagccttaagtgtggaagccagaggatcaaaaggccaaatagcggtgcttgtggagacccagaagacaagcaagctcctgttttactttctgtatccactcagctgttttggctcagcccccttccaggtcttccattctttttggaaactctaagtagctgtcaaagtcagaaccccacggtccaccagttgtcagtaccacttgttccttaaaatgaggatttctgatgctgtcattgctctaagttatgtggttgatagaattaatgatattctaaagagctaagatctaaagatctccctttgggtaatatgtagtgaaaccatgtaccctttgaaatttgaatttcccctaaatgcaatctgggaaagactggttcctccagatgagaatgtccttgttgaataagagaggaagcaacaatttggatgggtttacagatgggaaacattcatatacattggttagattccttaattgtgcatatatcttgcctgctatctgctcacattaggaccccaagg

SEQ ID NO: 32415 - DNA, 1099 bp, Mus musculus
tctcagtcatcttcaaaagcttgaaagaaaccaaactagagacagacactctgaagtctttcaacatagtaaagtgcttgcgtgtcaaagtactctccaaataaataaaagaacagacactgcacagaaaccctacaaatgtaatgaatgtgataaatcctatttaaagctcaagtatctacgagtacatgaaagaacacatactggagagaaaccttaccaatgcaatcaatgtggtaaagcctttttacttgccagctatcttagaattcatgaaagaacacatactggagagaaaccttaccagtgtaatcaatgtgataaagcctttacacaaaggagtcaccttcaaagccataaagtagtacatactggagtgagatcctacatatgtaatcagtgtaataaagcctatccacaccagagttatctccgaaaacatgaaagaacacatactggagagaaaccttatttatgtaatctgtgtgataaagcttattcacaactgaatcttctccgaatacatgaaagaacacatactggagagaaaccttatatatgtaaccagtgtaataaaacctttgcacagctcaagtatcttcgagaacatgaaagaacacattctggagagaaaccttacaaatgtgatcaatgtggtaaagcctttttacatcccagctgtcttcgggtacatgaaagaacacatactggagagaaaccttatatatgtaaccagtgtaataaagccttttcacaacagagttgtctccgaatacacaaaagaacacatactggagagaagccctataaatgtcatcagtgtgataaagcctattcgcaacagagttgtctccaaatgcatgaaagaacacatacaggtgagaaaccctataaatgtaatcaatgtggtaaagcctttgcacaggtcaagtatcttcaagcacatgaaagaacacatactggagagaaaccttacaaatgtgatcaatgtggtaaggcctttacacaaagcactcatcttaaaacccataaagtaatgcatactggagggagactctaaatatataatcagtttgatgaagactattcacagtggagt

SEQ ID NO: 32416 - DNA, 1156 bp, Mus musculus
ttgctgacaaagtttctgacatcgctagctgatcaccaaaagtaatgaacataactgttactttggtagccaacaatcatagttgtgtaacccttccccactaaaaaaagagaaagagagagagaaaaaaaacccaccaacaaaactgtactgtaagcaatctgggttgactctccctgagaggctgagcaatgctatgtgaatctgaataaaaacctcttgccattgcagagatctattgtcaacctgcgtctctgggggtcgcgttctcaacatttgggcccctggggtcctagcacaaccactttgccttatcccatcagtgcactctcaccctacttatctggaaaaaggtcggtcctggaacagcaacatgggcccggaatcactaagctgtgtcccttcatcacacactaaccttaagggaggtgcttatgtcactccagactcgctggccaatcaaggcctcaagtctgacctgccagtcagaattggaggcgggtgcttccgggcgccatgttgctggttcaatgctgtagctgaggaggctggtgtggtttgtttgtcctgctctgtgtgctactgctgggtgctgtgaggggaattcaggcgagctctgacctcgcgacatggtgagtatatggcagctgcttccaatgggaaggggcaggcgattgaacaactggagcgagtatggtgaggcctccctgggactgggtgctagctgcgcacctcagctacacagggccacatgtgaggttgtttgtggtcttggctgctctgaataattctgctctggggcttcatctgtgcgaatatttaagcatgagcttgtgcgttgaaaccttcttggcaagatggcaaacacagaaatgcctagtttctccagtatcttctacaattttgtttgtttggttggttggtttttcaagacagtgtttctctgtattgccctggctctcctggaaatcactcagtttggctagcctcaaactcagaaatccgcctgcctctgcctcccaagtgctaggattaaaggcgtgcgccaccactgcctggctttaaacacacacacacacacacacacaaaacttttttttttaatctcatacaatttttacactttcttttaagattgtgatgcaagatatatttg

SEQ ID NO: 32417 - DNA, 1507 bp, Mus musculus
tgtagtcttcatcctcatggaaggattcatacagtagagaaaccatatgaacaaaagaaatgtggtaatgcttttgctcatcacagttatctcttattatagaaaaaaggagatattagagaaagatcctacaagtatgatagaagtaatgaagccattgcacaacacagttatctctgactacattaaaggatagataatgatgacaaacactataaatgtaataaatggggtaagcccattatataacatggtcaactttgaatacagaaaaagacatactaggcaggaaccctatgaatataagcaatgtagtaaacacatgaaaccattcatactggagagaaacagtattgaaggtattaaatatggtgaagtctttgcttgtaacagtggtctttagatacacacacacaaatcataatgtggaagagcaaccatccaaatataattgatgtgataaaccatttttataagttatctttgaatacatcaaagaacacatactgaagagaaaaaatatgaatgtaagcaatagtgtggcgccttttcgtattaaggtaaaagaatatatgctctggaaaaacccttcaaaaccagtctgtgagatgaagccattttacatcacagtcatcttcaaaagcatgcaaagagtcgttctggagagaaaccttatgaatgtattttaaattgtaaagcctttggaaatttctgtagccttcatgatcgtgaaagtattcatagaggagtgaatctctgtgaatgcaaacaatgtggtaaaccctttgcttacacatcacagttctcaccaaatgcagaaaacaacacatactggcaagaaaccttatgagtatatttaatattgtgaagcctttgcacatttctgtcatcatcatgactatttatactgaagacaaggcctgtgaatgcgagcaacgtggcaaactctgcttccttgcaaaatgtttatttaggagccctgtctcgaaatccctccccaaattttttttctttggatcgtatagaatccattctcctcattgatgatatccaacattgcttttctttatattgttttctggaagtacatcattttgatggtgctggaaagaaccaagatgtccttcaacaaagaaatggatgtagaaaatgtggcatatttacacaatggagtactactcaactattaaaaacaataaattaatcagattctttggcaaatggataaaagtagaaactattatcctgagtgaggtaacccaatcagaaaagaagatacatggaatggactcactgataagtgaatattagccgaaaagttctgaatacccaagatagaattcacagaccgtatgaagctcaaggagaaggaagaccaaagtgtgggtgcttctgtccttcttagaaaggggaacaaaatatttatgggagtaaattgaggttcaaagtgtagagcagagattgaaggaaagtgatccagagactgccatatctggggatccatcct

SEQ ID NO: 32418 - DNA, 1302 bp, Mus musculus
aaccctacaaatgtaatgaatgtgataaagctttttcacagcccaggtatcttcgaatacatgaaagaacacatacgggagagaaaccttaccaatgtaatcagtgtgacaaaccctttgcataaggcaataatctcaaagtacatacaagaatgcatattggaaagatccctatgaatgtaatcagtgtggtaaagcctttgcatatgactaatcttttgggatgcatcaaagaacagatactggagagaaacgttaccaacataatcatagtcttaaagcctttgcagaaagcagtcatcttcaaacccataaagtactacatactggagagactctacaaatgtaatcagtgtgataatgcctcttcacaacagagaggtctccaaatacataaaaggaaacatctgtagagaaaccttagaaatgtagtcaatgtgatgacgcctattcacaacacaatggtcttacctacaataactcatactggagagaaaccctatgaatgtaagggatttagtaaagcctttgcacattacaatatgctccaataacataaaaacgaccatactaaagaaactctatgaatataatcacagggtgaagcatttgaacatcacagtagtctctagaaacaaaaaaggaaccatctaggaaagaacccctataaagttctttaacatggtaagggctttgcacaaatctgtagtcttcatcatcatggaaggattcatacagtagagaaaccatatgaacaaaagaaatgtggtaaagcttttgctcatcacagttatctcttattatagaaaaaaggagatattagagaaagatcctacaagtatgatagaagtgatgaagccattgcacaacacagttatctctgactacattaaaggaaagataatgatgacaaacactatgaatgtaataaggggggggggggtaagcccattatataacatggtcaactttgaatacagaaaaagacatactatgtaaagggctgcaatatatgtgccgccactagatggtgctaaacctctttgtgcgcagctgcgagagcatagcaagccaaagtcaccagtctgtctcccggggcttttgcccagcccctgggggctttaacctatccccagggtgcatgaggatcatgggtgttgctaccagtcctagtttagacacgtcaccaaaagtatttaagccacacactttctgagccttctttgtctacctcactatgttatgaagtaaaagttaaccacggaagaacctggcgtgtcctgtgtttatttcctgcgggac

SEQ ID NO: 32419 - DNA, 3186 bp, Mus musculus
aagggggagtgggtgggcaagggagtgggagtgggtggatatgggggacttttggtatagcattggaaatgtaaatgagctaaatacctaataaaaaatgggaaaaaaaagacatactaggcaggaaccctatgaatatacgcaatgtagtaaacacatgaaatcattcattctggagagaaacagtattgaaggtatgaaatatgatgaagtctttgcttgtaacagtggtctgtagatacacacacactaatcataatgcataagaccaaccatccaaatataattgacgtgataaaccattttataagttttatatctttgaatacatcaaagagcacatactgaaaagaaaacctatgagtataagcaatagtgtggcgccttttcatattaaggtaaaagaataaatgctctggaaaaaccctccaaaagcagtctgtgtgatcaagccattttacatcacaatcatcttcaaaagcatgcaaagagtcattgtggagagaagccttatgaatgtattttaaattgtaaagcctttggaaatttctgtagccttcatgatcatgaaagtatacatagaggagtgaatctctgtgaatgtaagcaatgtggtaaaccctttgcttacacatcacagttgtgaccaaatgcagaaaacaacacatactggcaagaaaccttatgaacatatttaatattgtttagcctttgcacatttctgtaatcattgtcatgactatttatattggagagagggcctgtgaatgcgagcgacatggcaatctctttattcaccagatgcagagaacatatacagtagagaaaccttatgaatgggctaactgtggtaaagcctttgcacatcacaataatccctgaatacatataagaacacattctggagaaaagcccaatgaatgaatgtaatcaatatcataagaaatttgcatgtggcagtagtctttgaatatattaaagaacagatactggagagaaaacatacgactacttggggaaatgtgaaagaactcataatgtagagaatctgaatataaaggatttggtaagatcattatgttcagctacacaagattattctggagaaaagtaatctgacaaatgtcaaccatctactaagcacagtgttcctttttattttacatgcacctgcaaactcatctggacaaaactactatggatttaaatgataaacaaaaaaccctttagatttttcttctcttgaatttcacaaaactctggtataaaatttttgggtgtgtattgatgacttttttgtttctgagataaaacataatatctaatacaacttacaaagaagtttagtttagcttatggttccataagtgtcattaaatcagttgtgagacatggcagctaaaggaggaagctcagctatcacatcttcaacttgcagcatgtagcaaggagtgggaactagagctgtcatacagatgtaaactctcaagccctcctccactgacatatttcctccaccagggcattatttgttaaatgatacaatggtttcaaatgatacaatcaacataaaaggattgatttctctgattgcaaacatacctctgtatgtatttatagctctgtaaatatttgaaagtgtttatgtattatgttgacatcaggtaataaaacattcatacatgagagaaagtctattcccacaaacaatttagtcaagattttgacatcacattcagtccccataaaaatattgatacacttctttttccttttttattttttgttgtgttttgttttttgagacaggctttctctgtgtagccctggctcttctggaactgactttgtagacctggctggcctcgaactcagaaatctgcctgcctctgcctcccaagtgctgggattaaaggtgtgcgccaccatctcccagctacacctctttttcttaatggccttcaagcaagtaaataattcaacatgttcatgcaagtctgatgcttcatatgaggtttatattttgagagttttgaacttggtgtttaagtgtgctgtatgtgtgataaatgccattatttaaacgtgatttggcttagagactattaatgactacttctatttctttaggggatatgggactgtttagattgttaacttgatcctgatttaactttggtacctggtatctgtctagaaatttgtccatttcgtccaggttttccagttttgttgagtataaccttttgtagaagcatctgatggtgttttggatctcttcaggatctgttgttatgtctcccttttcatttctgattttgttaattaggatgctgtccctgtgccctctaatgagtctggctaagggtttaagcttgtagaaccactttggaaatcagtctggcggttcctcagaaaattggacatagtactactagaggatcccacaatacctctcctgggcatatatccagaagatgtcccaactgctaagaaggacacatgctccactatgttcatagtagccttatttacaatatccagaagctggaaagaaccaagatgcccctcaacagaggaatagatacaaaaaaaaatgggtacatttacacaatggagtactattcagctattaaaaggtatgaatttatgaaattcctaggcaaatggttggacctggagggcatcatcctgagtgaggtaacccaatcacaaaagaactcaaatgatatgtactcactgataagtggatattagcccagaaacttggtatacccgagatacaagatacaatttgcaaaacacatgaaactgaagaggaatgaagaccaaagtgtggacactttgcgccttcttagaattggaaacaatcacccatgaaaggagttacagagacaaagtctggagctgagacaaaaggatggaccatctagagacagccatatccagggatccatcccataattagcctccaaacgatgacaccattgcatacactagcaagcgtttgctgaaaggaccctgatatagctgtctcttgtgagactaggctggggcctagcaaacacagaagtggatgctcacagtcagctattggatggatcacagggcccccaatggaggagctaaagaaagtatctaaggagctaaagagatctgcaaccttgtaggtgcaacaacattatg

SEQ ID NO: 32420 - DNA, 1119 bp, Mus musculus
agaggtgttgtattctgtttgtcaaaggccttgtttttttttttttttttttttttttttttttttaggatctaatgagatgatcatatcatgtttgcattttagtttgttaatatagtgaatcatactgatggattttcatatattgaaccattcctgcatctctgggttgaagtctactttatggttgtgaataatggttttgatgtggtcttgggtcttattgagtatttttccatgtatattcataagcaaaaatggtctgatgttctgtttctttgttaattttttgtatggtttagctagcagagtgaaccatacaaagtgaattcataaaatgaattaaggtagcgttctgtctgtttctgttttgtgaaatagtttgaggattattggtattagctactctttgaaggtctggtaaaattgtccactaataatctctcatcattcaactccttttatagaccagttttctgtttttttcttaaaagatttattcatttattatatatatatatatgagtatactgtagctgtcttcagacacaccagatcccattacagatggttgtaagtcaccatgtggttgctgggaattgaactcaggacctctgggagtgcagttgatgctcttaaccactgagccatctctctagcccaatagtcaaaatttccaaacaccttgagtattctgtaacaaaaattttcaaacttataaaacacaaaaattcacattcactgtaagaccagcctcattatttttttttcaagtttttatccagtgggtatccttgtctagaagaaggtgttgggcctcttggtgatgaagctgctacaacatgtggtggagaaatgagattttgatctaagagttgtggaactgcttgacagctggacagctacacttgccagcggcaatttcttccaccttcatgatctggatggagtgtgctggggcagagtgttgtgcacccatgtttggtcactgtgtgactgcgccagccatggtcaggtcctggtactcttggtatatgttgtgtgtgccactggggaagtcatagggcagccagatgccaaacctcttcacacacaggggtgacttctcaaacatctgcc

SEQ ID NO: 32421 - DNA, 1330 bp, Mus musculus
aagtacccatcaaatgcatacctcctgttccttgtgactatgagcaatatagttttctttcatcatttgaatctctttaactcagcaaaggactggtgttaaagtgtccttatgctacagttactgaaaaccagactcacacagataagtagctttacaacggagttaagtgtaactgctcatcttactcatccaagccaggcattgtaacactggcctatgatcattgtccttagaaaatggagggaggaatctcaaagtcatgcaaggtgaaaatggttaattgggtgtggtgagagtcccatggatccaactggagattttgattgcctcatatcagccgctcagctagatttcaacttaacccaatttctgctgttgtttctctccatgtggcactgaacgcatatattggctattcctggttgtcaacttgactatatctggaatgaactacaatccagaattggatggcttaccagtgaccctaatctggaggcttggtagataagtttctgacctggatcttgatatggacatcttgatgcattgtggctatggattccagaagattaagacagggtgatctctgagttcaaggtcatctgggattaaaggtgtggtggtacacatctttaatctgggttacaccttttgctggagactatataaggacattggaagaaggaaggctggctctctctcctttgcctgcttcccgtgtgagactgagcaactgctagatccttggacttccattctacagctgctactgaccattgttgggagttggactgcaggctgtaagtgataaattccttcacgatatagagactatcaataagttctgtgactctcgagagcgctgactacactgctgttcatccctgtgcctttcatgtccatacttccatcctgctacatccgtgcctgttagtgcttctatccagctctagccaccaggtctttattatacaaaaagccatgctcttcactcatccacttggcagtggggtcttacttgatcttccccagggtggcttgtctttctttgcggggcaggtgaggaaaggacaaatgaacaaacatttgcatatcctgctagcctggcacaactaacatggcaattaacaattgagaatacagggacatacggtaaatgtgtggttatcccacactcaagtataatagctgtgctcagcctggaagtagttgtccacgtttcttcgttcagggtttatttttaaattctaagtgagttaccatggcattctgcagttccacttaccacattctgaggtgagaccttgggactatgatgatgagccca

SEQ ID NO: 32422 - DNA, 1195 bp, Mus musculus
aaggtattaaatatgttgatgtctttgcttgttgccttggtctgtagataaacacacaaaaatcataatgcagaagagcaaccctccaaatataattgacgtgataaaacatttttataagttatctttgaatacattaacacatactgaagagaaaaacctatgaatgtaagcaatagtgtggcaccttttcatattaaggtaaaagaatatatgctctggaaaaaccctccaaaagcagtctgtgagatgaagccattttacatcacagtcatcttcaaaatcatgcaaagagttgttctggagagaaaccttatgaatgtattttaaatcgtaaagcctttggaaatttctatagccttcatgatcatgaaagtattcatagaggagtgaaactgaatgcaagcaatgtggtaaaccctttgcttacacatcacagttctcaccaaatgcagaaaacaacacatactggtgagaaaccttatgagtatatttaatattgtgaagcctttgcacatttctgtaatcatcatcataactatttatactggagagaaggcctgtgaattcgagtaatgtggcaaacttttttatctgcttccttgtaaaacgtttatttaggatccctgagtggtttgacacctgataacatggaggtggttgtcagggaaaccaagactgaaagagaagtcactctaaggctggggaaatcaggtatttacagagagtcctggagtatggatgaactgtcagggagggagccttaagggtggaagccagaggatctaaaggccaaatagtggtgcttgtggagacccagaagacaagctagctcctgttgtactttctgtatccaccaagctgttttggctcagctcccttccaggtcttccattcttcttggaaactctaagtagctgtcaaagccagaacctcatagtccaccagttgtcagtacccagttgttccttaaactgaggagtccagacgctgtcattgctctaagttatttggtcgatagaaataatgatattctaaagagcatttatagatctccctttgggtaatatgtagtgaaaccatgtaccctttgaaatttgaatttcccctaaactcaatctgggaaagactggttcctccagatgagaatgtccttgttgaataagaaaggaagcaacaattcgcatgggtttac

SEQ ID NO: 32423 - DNA, 1128 bp, Mus musculus
tgatacctgacactcattcagagttttgatggggtttccaggggcagaatagagcatcaacaactaggcacaatgtgattgacggaacagtggaccctttaaactgattggtctttagggaatgaggtgacaaggagttcccttgtctgaggctgggcaacagtccatcctgtggaatgtgtctccacccacaggggggtttccacacattggtctgagcaatgctaattagcctctctctccttgagaggcaagcatttcatgacctttccaaagttcctgagctgaccttttcatttcgtctccatgtttcctcctgtgagtgttttgttcacgaagcatccacaggttggtcttccttcttcttaggcttcattttgtctgtgaattgaatcttgatattctgtacaatttggctaatatgcacttatcagtgagtacatatcatgtttgtgcctttgtgactgagtcacctcactcaggaagatattctcaagttccatccatttgcctgaatatttcatgaatgcattgtttttaataactgagtagtacaccattgtgtaaatataccacatactatgtatctatccctctgttgagggacatctgtgttgattacagcttctggctattataaatatggctgctatgaacatagtgaaggatgtatccttattacatgttggagcatcttctgggtatatggtatagctgggtcctcaggtaatactatgcccaattttctgaggatacatgagattgatttccgaagtggttttaccagattgcaatcccaaaatcaatggaagaatgttcctctttgtccacatcctctctagcatatgcgctaaactgtgttgcttttatttttgttttttgtttgtttgtttggttggttggttttttttgttgttgttgggtttttttgtttttttttttgttttttggctatttggtttttctagacaggtcttttctgtttagccctggctgtcctagaactcactctgtagaccaggttggcctagaactcagaaatctgtctgcctctgtctcccaaatggtcggattaaaggagtgcaccaccacttctctgctctttttttttttgtaagattatatttg

SEQ ID NO: 32424 - DNA, 1765 bp, Mus musculus
cttagggctaggacatcattatattctgttttaagtgtttattttatgtatatgggtgttttcatgcatgtgtctgagcacaatatctacagagtccatgagatgccttgggaatgctgttacaggagatgattagctaccaggtaatttctgtgaatagaaactgtgtcttctataacaacaaccagggctcttacctggtatcctatttttctggcagcttttttctgtgttttaactttattacattttaataaaaatatgttacatcactttctaccgtccttgtcctttctccatcttgtccaaattcttccttgttaagtatctatggatagggatgcacagctataaaaataaaacctggctctttccgttcccagcgcagccatgactcgtggtcccaagaaacacctgaagcgcgtagctgctccaaaacattggatactggataagctgactggcgtgtttgctcctggtccatccactggtcctcacaagctgagggaatgcctgcctctcatcattttcctaaggaacagacttaagtatgccctgaatggagatgaagtaaaaaagatttgcgtgcagcgattcattaagattgatgggaaagtcaggaccgatataacctaccctgctgggtttatggatgtcatcagcattgacaagaacagagagaacttccgtctgatctatgacaccaagggtcgctttgctgttcatcatattacactggaggaggcccagtacaagttgtgcaaagtgagaaagatctttgtgggtacaaaaggaatcccgcatctggtgacccatgatggtcgtactattcggtaccctgatcccctcatcaaggtgaatgataccattcagattgatttggagacaggcaaagtaactgacttcatcaagtttgacactgggaacctgtgtatggtgactggaggtgctaacttgggaagaattggtgtaatcaccaacagagagagacatcccggctcttttgatgtggttcatgtgaaagatgccagtggcaacagctttgccactcggctgtccaacatttttgttattggcaagggtaacaaaccatggatctctcttccccgaggaaaaggagtccgcctcaccattgctgaagagagagacaagaggctagcggccaaacagaacagtgggtgaaatgctaggaaagtgtttgtacaagcctttccaggcaacatacatgctagattaaacagcatggtgaaactactaaataaataaataaataaataaataaataaataaatattaaaaaataaaacctgatcaatccatttctgttgggtgtgtgtatatagttctatggctgaaaacttttgttggatatgcaattaagtatctcattgccacctgaggctaactttttccaattgcacaattccactctttaatgagctagaggagtctgataatgaagcaacctaggctgacatggactaaaatatggagaacagaaaatatggcacgagaagaagcaaagaactgagatgtccctcaacagaaaaatggatacagaaaaatgtggtatatttacacaatggagtactactcaactattaaaaacaatggatctatgaaattcttggacaaatggatgtatctggaggatatcatccttagtgaggtaacccaatcacaaaagaattcattagatatgcactcactgataagtggatattagcccagaaacagaacacccaagatacaatttgcaaaacac

SEQ ID NO: 32425 - DNA, 3042 bp, Mus musculus
accatactgaagaaactctataaatgtaatcacagggtgaagcatttgaacatcacagtagtctctggaaacaaaaaaggaaccatctaggaaagaactcctataaagttctttaacatggtaaggtctttgcacatatctgtagtcttcatcctcatggaaggattcatacagtagagaaaccatatgaacaaaagaaatgtagtaatgcttttgctcatcacagttatctcttattatagaaaaaaggagatattagagaaagatcctacaagtatgatagaagtgatgaagccattgcacaacacagttatctctgactacattaaaggaaatataatgatgacaaacactatgaatgtaaaaaggggggggggtaagcccattatataacatggtcaactttgaatatagaaaagtacatactagacaggaaccctatgaatatcagcaatgtagtaaacacatgaaaccattcatactggagagaaacagtattgaaggtattaaatatggtgaagtctttgtaacagtggtctgtagatacacacacacaagtcttcatgcagaagaacatccctccaaatataattgatgtgataaaccatttttatgttatctttgaatacatcaaagaacacatactgaagagaaaacctatgagtgtaagcaatagtgtaatatcttttcatattaaggtaaaagaataaatgctctggaaaaaccctcctaaagcagtctgtgagatgaagccattttacatcacagtcatcttcaaaagcatgcaaagagtcgttctcgagagaaaccttatgaatgtattttaaaatgtaaagcctttggaaatttctatagccttcatgatcatgaaactattcatagaggagtgaatctctgtgaatgcaagcaatgtggtaaaccctttgcttacacattacagttctcacaaaatgcagaaaacaacacatactggcgagaaaccttatgaatatatttaatattgtgaagcctttgcacatttctgtagtcatcatcatgactatttatactggagagaaggcctgtgaatgtgagcaacgtggcaatctttttattcaccagatgcaaagaaaacatacagtagagaaaccttatgaatgggctcactgtggtaaagcctatgcacatcacaataatccctgaatacatataagaacacattctggagaaaagcccaatgaatgaatgtaatcaatgacataagaaatttgcatgtggcagtagtctttgaatatattaaagaacagatactagagagaaaacatacgactgtttggggaaatgtgaaagaactcataatgtagagaatctgaatataaaggatttggtaagatcattacgttcagctacacaagattattctggagaaaagtagtccgacaaatgtcaaccatctactaagcacagtgttcctttttattttacatgcacctgcaaactcagctggacaaaactactatggatttaaatgacaaacaaaaaaccctttagatttttcttctcttgaatttcacaaaactctggtataaaatttttgggtgtgtattgatgacttttttgtttctgagataaaacataatatctaatacaacttacaaagaagtttagtttggcttatggttccacaccaccatagtgtcattaaatcagttgtgagacatggcagctaagggaggaagctcagctatcacattttcaacttgcaccatgtagcaaggagtgggaactagagctgtcatacagatgtaaactctaaagcccacctccactgacatatttcctccaccagggcattatttgttaaatgatacaatggtttcaaatgatacaatcaacatagaaggattgatttctctgattgcaaacatacctctgtatgtatttatagccctgtaaatatttgaaagtgtttatgtattatgttgacatcaggtaataaaacattcatacatgagagaaatcctattcccacaaacaatttagttaagattttgacatcacattcaatccccataaaattattgctacacctctttttccttttttattttttgttttgttttgttttttgagacaggctttctctgtgtagccctggctcttctggaactgactttgtagaccaggctggcctcgaactcagaaatctgcctgcctctgcctcccaagtgctgggattaaaggcgtgcgccaccatctcccggctacacctctttttcttaatagccttcaagcaagtaaataattcaccatgttcatgcaagtctgatgcttcatatgaggtttatattttgagagttctgaacttggtgttgaagtgtgctgtatgtgtgacaaatgccattatttaaacgtgttttggcttagagactattaatgactacttctatttctttaggggatatgggactgtttagatcgttaacttgatcctgatttaactttggtacctggtatctgtctagaaatttgtccatttcatccaggttttccagttttgttgagtatagccttttatagaagcatctgatggtgttttggatttcttcaggatctgttgttatgtctcccttttcatttctgattttgttaattaggatgctgtccctgtgccctctaatgagtctggctaagggtttaagcttgtacaaccactctggaaatcagtctggcggttcctcagaaaattggacatagtactaccggaggatcccgcaatacctctcctgggcatatatccagaagatgtcccaaccggtaagaaggacacatgctccactatgttcatagcagccttatttataatagccagaagctggaaagaacccagatgcccctcaacagaggaatggatacaaaaaatgtggtacatttacacaatggagtactactcagctattaaaaggaatgaatttatgaaattcctaggcaaatggttggacctggagggcatcatcctgagtgaggtaacccaatcacaaaagaactcaaatgatatgtact

SEQ ID NO: 32426 - DNA, 1181 bp, Mus musculus
atatatgggtcaagatgcctggctttattgtttcagggccgggaatggatttttttttttttgcacatgacaagcatgtgttgttgttttgtgcttcagttacatcttgaataataaaatttgccagagagtattattctaattcccaggatggcacttaattgtgacattaatactgcctgatccttctaattcttttgattttaagagtgagacatttttctacatgttgtctttttttgaaatgtttgaatgactatgaatacatatgcacctctgtgtgcttggtcctcactatagtcaaaatatggcctcaggactcctgaactcagagtcatgaatagttctgagcttccatgataattcctacaattgactcctatatctaagaccaggaagacatattaagcccatgccatctctactacactatgttgtttatttatgaaaagcatttattttgctaatgtttccatttgttcattataactttatttatttatttatttatttatttatttattatatgcaactacactgtagctgtctttagaaacaccaaaaaagggcatcacctctctttaaggatggttgtgagccaaaatgtggttgctgtgatttgaactcaggacctttggaagagcaatctatgctcttaaccactgagctatttctccagccctttaagttacatcttatttatgtcacagtgtaaactgcggaatttcaggatcttggaatatgaagacagaagaattacagtatctatttaatttaattctgagattctttctatttttcttctctgggtttttattttgttgttttaaacgttgttgggtgattttattttgttggttttttgtttttgttgttgtttgatagatttttttttcttgagacagggtttctctgtatagccctggcattcctagaactcactctgtagaccaggctgtcctcgaactcagaaatcagcctgcctctgcctcccaattgctgggattaaaagggtgatgcaccaagcctggtttatttgatagatttttgcagcagagacaaggtcataatgagtagtgctgcctttctggaacttgtttaatagacaagattggcatacaagtcaatgagatacacattcctgtatttcatgacatttcaattaaaggcatgagcaaata

SEQ ID NO: 32427 - DNA, 1120 bp, Mus musculus
tatttcttaactgatataactgtttgaatcttatcaccattagagctatacagtagcactgccattccatgtacattcacaccaatcagatattgcaaattgtacacacattgaatctgtgtatgtccaaaatcttctactgagcaaatagttcatggttaagcagctgttattcatatccttgtcttaaatctgataagtttagtgagaggggaagttcatgagcattaaggatgttgtgctggagaaaccttactccctaccatacgaggaacaaaaagtcaaactgtgtgaatgtaaggtggaaaccctttatttgttattcttttaataggtatatcatatgtcatactggatacaggccatatgagcagaaggattttgaaagaaacagagtatctctctttcctagaactatttattagatcatagacggttgcagtaaatctccaacccaaacaggccccaacaatgaaaatacaactcagttaatatgaacacatgctgggtgcctagactgggtagatctattgctattcactctaccatcttctatatccatgaaaaaacctgagaacttgcagtttctccaggccatgtgccttctgctctgcttttcttcttccttctcctctttgtcctctccctcttccattttctcctccttctctctccctaccttccctttaatgtgcccaatcatcacctctctttattttacaaattaaggtgggaagtaggtttacaggaagtcacatgagggctgactcattccatgttcacaaccactctcaggagaatgtaattaacatcaaatataattagccaagggctatccacaacagtacatgataggccccactttgaggagactttctgaatgtgattcaagtttatagtcacttagattttcagcttcatttggaataaaaccataaaattatactacagaaaatcctatgagcattaagaatatggaatttttgattgtccttcacttttcaaatatgatatgactcacagtgcaataaaatttgtgaacacaattatgaaggtaaatctgtgaattcatgcagttttgttcaagtatctgaaaaacttgatgtatctaaagtctggt

SEQ ID NO: 32428 - DNA, 1785 bp, Mus musculus
ggtgatcacattggtgggtatactatttggggaggtttgcttcatcgaataaatattgaattcccaggttgggggcactctttataaatatgtcccagtgcatttgcccagtgaagtcaactcagaattgagaaggccattgggcgtgactgtgtatttggttggtcaaacatcttttaatgccattccctctactaggaaatcactgcccttatctcttttttatttgaatgaacacttttttaaaatatatttttaattatgtattttcctcatttacatttccaatgctatcccaaaagtcccacataccctccccccccccactcccctacccacccactcccactttttggccctggcattccccagtactggggcatataaagtttgcaagtccaatgggcctctctttccagtgatggccgactaggccatcttttgatacatatgcagctagagtcaagagctccggggaactggttagttcataatgttgttgcacctgcagggttgcagatctctttagttccttgggtactttctctagctcctctattgggggccctgtgatccatccaatagctgactgtgagcatccacttatgtgtttgccaggccctggcatagtcttccaagagacaactatatcagggtcctttcagcaaaatcttgctagtgtatgcaatggtgtcagcgtttggaagctgattatggggtggatgcctggatatggcagtctctagatgatccattcttttgtcacagcttcaaactttgtctctgtaactccttccatgggtgttttgttcccaattccaagaaggggcacagtgtccacactttggtcttcattcgtcttgagtttcgtgcgtttagcaaattgtatcttatatcttgggtatactaagttttgggctaatatccacttatcagtgagtacatattgtgtgagttcctttgtgattgtgttacctcactcaggatgatgccctccaggtccatccatttgcctagaaatttcataaattcattctttttaatagctgaacagtactccattgtgtaaatgtaccacattttgtgtatccattcctctattgaggggcatctgggttctttccagcttctggctattataattaaggcggctatgaacatagtggagcacgtgtccttcgtaccggttgggacatcttctggatatatgcccaagagaggtattgctggatcctccggtagtactatgtccaattttctaaggaacctccagactgatttccagagtggtggtaaaagcttgcaatcccaccaacaatggaggagtgttcctctttctccacatcctcgccagcatctgctgtcacctgaatttttgatcttagccattctgactgatgtgaggtggaatctcagggttgttttgatttccatttccctgatgattaaggatgttgaacattttttcaggtgcttctctgccattcggtattcctcaggtgagaattcttttttcagttctgagccccattttttaatggggatatttgattttctggagtccaccttcttgagttctttatatatattggatattagtcccgtatctgatttaggataggtaaagatcctttctcaatctgttggtggtctttttgtcttattgacggtgtcttttgccttacagaagctttgcagtttcatgaggtcccatttgtcaattctcgatcttacaacgccaggcattgctgttctattcaggaatttttcccctgtgcccatatc

SEQ ID NO: 32429 - DNA, 1158 bp, Mus musculus
atgaccatgaacttacagtgaccagagtcagaatgcagtcaattgaatgtaaaatcttcctatctgtgatgatgcctttgcacatcatttgtccttaataactgtttgcagggaagtctttgaagcttgtgtaagaggaaagtttctagatgaaagtcctccttgaggataggattggagtgttcatagacccatttcctgttctttgtgtccactggtttgttgttaaaagtgaccagtcagcttctttctcatgctgtcatcatattgactctatccataaatcaaatatgatagtgtagaagcaattcccattcagacctacctgattttgctatgtctagtttttatagttttaattttgttgggttttttttttttttttttttttttttttttttttttttgaagacaggatttctctgtgaaatcctggatgtcctagaagagttatgtagactagaatggacttacatttagagatctacctatgtgactcttctcggcagagattaaatatgggtcaagatgcctggcttttattgtttcagggccgggaatggattttttttttcacatgacaagaatgtatggttgttttgtgtttcagttacatcttgaataataaaatttgccagagagtattattctaattcccaggatggcacttaattgtgacattaatactgcctgatccttctaattcttttgattttaagagtgagacatttttcctacatgttgtcttttttttgaaattttgaatgactatgaatacatatgcacctctgtgtgcttggtcctcactatagtcaaaatatggcctcagaactcctgaactcggagtcatgaaatagttctgagcttccatgataagtcctgcaattgactcctatatctaagaccagcaagacatattaagcccgtgccatctctcctacactatgttgtttatttatgaaaaacatttactttgctaatgtttccatttgttcattataactttatttatttattatatgcacctacactgtagctgcctttagaaacaacaaaagagggcatcacctctcttgaaggatggttgtgagccaaaatgtggtttctgtgatttgaactcaggacctttggaagagcgatcagtgctcataactactg

SEQ ID NO: 32430 - DNA, 1117 bp, Mus musculus
tgccagggatcagttcatgtgtgctcaaagagatatttagttctttatttcttttttcttttttttcgagacagggtttctctgtatcgccctggctatcctggaactcactatgtagaccaggctggcctcgaactcagaaatccgcctgcctctgcctcccaaatgctgggattaaaggcgtgcgccaccagcgcctggcacaagatatttctttctttctttcttcctttcttccttccttccttccttccttcctttctttctttcttccttccttccttttttttttttttttttttttttttggcttttcaagaccaaaaaaaggggggggtttcaagtttttctcttctatccctggctgtcctggaactcactttgtagagcaggctggcctcgaactcagaaatcagcctgcctctgcctccccagtgcctgggattaaaggtgtgggcccggctaagatatttcttaattaatgttctcattgtgagtgtagtgatttctccctgggaaagcatatcaattctagaacaactgcatcttcagccttttaggtttctgagacatgggattgtttgattgtgtttccctggatttctttaagggatgtattcattgccactttaaggacctgtatcatcttcatatagttggttttaaggactttttcttgtgctttcagctatgttgaaatattcaggatctgttgggataggatagtttggctctgttgctcacctgtttccctgggttttaatgattatctgcctatgcttgtgtctaggcatctgggtttggggtgattatcggtctaggttttgatttctgggttcatcttgcaagggagttttgttcctgggcttctggttgccctttgtatttccagagtgtgttggctggatgatggctattttattggcctgcttgcctggtgtgttcaagtgggaatgcttgctggtgttggaggcttgatgaagatgaggccagggagatatgatcttagctatccataggatatcatctattcatatatgaagagggtggtgaagttgaccctgctgttctggtccattgcttaggacaactgtgaagattgagtttgggataactg

SEQ ID NO: 32431 - DNA, 1101 bp, Mus musculus
gatgacttacagtttttagtccaactccccaccaatggtcagctgtgatagggaagtccaagaatctcatagttcctcagcactttataggcctactttttcagctggttttctgtagaagtcggttccaacaaaagtgctggcaagtaaatgtaagcaggtgaagaagagccaatcttccttcttccaatgtcctcatgtaggcctccagcagaaggtgtgtcccagattaaaggtgtgtaccaccatgcctggatctggggcttgctttgtcccaggctgaccttgaactcagggatctccttgcctcagtctcttgggattacaggcatgggctggcttttgatggctgctgtgccgcaagatctccatgtcaagatccaggtcagaaacttgtatctcccagcctcaagatcaagatcacaggtgtgccttccaattctggattgtagttcattccagatacagtcaagttgacaaacagacacagccattacagggtggaaaggtgggattgtctgtggtgtctgcctgaggcatggacagtaggagaggaagctgcatcactagggccaaccatgagtattgggtcccaaggtaacagagactggggaagatctggaggcatcctaccttgtcccatacccaacatcttaatactgagacatcaggttcccagggatcatgtatttacttcttcattcattaggtttctattattgatcaaacaatatctttgtttgtttgtttgtttgtttatgggataaaaaatactatgtggcctgggaaggtcactcagtgagtgttcttcttggagttgacctgaattcagatagcaactctcaagtgaggaggctcacaaacacctgctatgccaaatccacaggatccgacaacttctctggtaagtcacctgtacacacatggaaagcattctctgtcattcacacaaatacaaacagaaaattgaggatacacttgttttcaaaagagcaaaacaagctctttagctgaataatttgttatctttcatttagttttgaaaagtgtgcatttcctcactctggtgtagacttacatccaatcatcatcaatcatagg

SEQ ID NO: 32432 - DNA, 1728 bp, Mus musculus
cacctgcaaacacatctgaacaaaagctaacccttttagattttacacttcaattacacaaaaaactcatccaggtgtaaaaactttatgggtgtgtattagtgccttttctgttgctgtgataaaacagaatgtctgaggcaacttataaagcagtataatttgccttatggttcacactgtcaaagtagcattacaagtttcagacattgcaattaaaaggggaagctcagagctcacatcttcagcttgcagcatgtagcacgggagtgggaactagaaatggcaggtggatgtaaactctcaagcctacccccattgaaataattccttcaccagagcagcctttcctaaatctacccaaattatatgataatcttagaagaactgacttctctaactgcaaatatacagtctttccattacatgaccaaacctgcgggaaacaggtgcggccgcatgggccaagatgtttactgccttgcccgagcatgcgcagtgaggctgcaggcgtgagcaggctgtactgttcctcgtgatctggacctgtcagcctatcggtgactgacctgagctcgtgcctggagcgtgtgtgaattctgattggatgaggtgggtggagctagatgaggtcagtcggccagagtataggagttttgttgttgttggccttgccgaagaaggagagagttgtaagagagaaagctgcaagaaggacgaggaagaagaagctgctggggaagagagctgtaggggaaaaagcccgaagtaaagaagttgctgcgagaacccgccttggtgtccgtgtcattcctgtctccaccgggaagaaaggacggcgacacaaaccatgataaggaaaaactgttggtagccctttggatccctaaacagctttattgcaggaatgagtgcttacacgagaaaaacatgtgtgagtgaaaaaggtatttgtttaatgatttgttttaattttagttatgtgatgtcagtatatctgtatgtagctttgtgctttttacatgctggtaccagatgatgttagcctttggatcttctgtgaatgggtgggggctcttgttcctgatattgtttgtcatattttcacaaattccctagaggtgttgtttattattcaacctggcttggatgtcagtaattagttagggctacatagaactcttgattatcatgtgtcaccctgctgagtacaactctaagaatagaagatttacccgcaccccccccccatgtatcctgttttgtcaacacactcatacaatgttaatgttgaaatgcttaacaagtccaatcacaaccacaattgctctgaaacatagttatctaagacacaaaataacaaaaactgaaaggtctcaaaatgatagtattaatacaaactagcacagctaatatgacgtacagtaagatgtatcctcaagaaattaaaaactgggactggagaggtggctcagtggttaagagcactgactgctcttccaaaggtcctgagttcaattcccagcaaccacatggtgcctcacaatcatctgtaataagatctgatgcccttttctggtgtgtctgaagacagctagctacagtgtactcatactcataaaataaataaatctttaaaaaagaaagaaagaaagaaagaaagaaagaaagcaagcaagcttttacagaggacctgggttcagttcccatcacatgcacaggccctca

SEQ ID NO: 32433 - DNA, 1203 bp, Mus musculus
aagtttccactgcaccagatttccataccaccctctaaaatgttcctcaatgttctagctgtctctccacattcccttcctcaaccacatctctctccccagatcctcccacttcccccatctgccccttctcaaaccataaaatctattttacttccccctcccagggacatccatgtgtcccaccctcagtcccttcctctatattttaattctctgggtctatgcattataggttggctatcacttacttaatgccacatagaagtggatacgtactatagagaaatttttaatccagcaacatggctactctgacaaaagatcacatccagaaactgttttgtaggtctgtgtgatctgacaacattcttgcattgattcaccttgcaattctttggtggtcatctttaggctttgcagatactggtcttcactgacaacgctcttgcattggtttgcattgctttctttgctaatcattgcttctcatggcttcctagaaaggaaaatcaccaaagaacttctgattgtatgctgcctgcttcttgctgcttctgcagacttgtgcctactggtggatcttcatggtttcttctagatcgagccactgctactgattcatgtttggtgtttgctaaattgcctggactgccactgctgattcatgattggtgttttgatagtaaactggactgctgacaacaaagattcgaatagctcaaaagaactatttctaaacaggtccctgtttcttattaacctttctattacgccacctctcgtgagagatagcctagaagtgaggctgactcattaaaaaaacatagttaaaataggttttgaaaaaaaaatttatgcctacatccagttctcatgagaacagatagtaaagagaggtgacttaaaaagtagtgaggagagaatgttgaagtcagtttgattgagttcagttgagttctgaacagttcagttcatggagttcagaggcagttttgccaagcaaagtaattcaatgagaaactgagagaagccagtttgaatcagacagctaggaaagatatttgagctagaacatctgagtggaaagagccagctagagttcagaaagagttagtaggagtgaacatatttagcaataagcctccaaaatgacaattgcatctggcaaataaaagatacttttacaacataccacattta

SEQ ID NO: 32434 - DNA, 1097 bp, Mus musculus
tgcagaaaagccaaatttcccatgagaggttgcagagccagcaagagaggctggacttaggttaaggctggtcagattgcttcagtccgtcagaacgttttcttatcaccccttgctaggtaggctttaggcctctgctcagctctgaacctctgagacctagtgctttccgtgctggtggaaggcatggtcagaaggcattgagcatgctccatatattatcatatatagctcagaagtgctatgtcagaaaaccttttgaggaaaataatgttttgctgggcatagtggcacacacctttaaccccagcacttgggaggcagaggcaggaggatctctgagttcaaggctatcctggtctacatagggagttccaggacaaccaggacagcatggagactctaagaaaatagaagtaaatgaataataatactattttagtttattctttgagaatttaacatgttttgatcatatcttttcttgtcccctaactccttctagatctttcccaaccccctactcacctgtcttcatgttctttctctaagataaaatgaagtaaaataaaataaagcacagagtccattttgtattggttgaccacacttggccatggggcctgccctgaggtatgtggttgatatacctagtgttgctccattgaagaaaacggattttccttttctgagtagttatcagtttcaaatagcttcttgactaggggtgggattttgttgtccatttcctattgtccatgctgggctgtcatctggcttgagctgggacagttcttgtgcctactattcacagtctcttgtgagcttatcagtcctgttgtgtctggaaagtaatgtttccttggaggcatccaccactctggtcctcacagtctttgtatcccctcttctgaatagatcactaaggggaagggtgtgttatacatatcccatttaaataagtaaatactgaaaatacatttacgcggtggaacaccattcagctgcttggagaaatgaagctatgaaacttgaaggtaagagaatggagctagaaacagtcattctgagtgaggtaacccagaaagacaagcatt

SEQ ID NO: 32435 - DNA, 1099 bp, Mus musculus
ttactggcttgctcagcttgctttcttatagaacccaagactaccagtccagagatgatgccactcaccagggtgccaccccaccttgaacactaattgacaaaatgccttacagttgaatctcacggaggcatttcctcaactgaaactcctttctctgtgatttaactccagcttgtgtcaagttgtcacacaaaaccagccagtgcacaactcaacatgagttctgattgtaaagcaggaattatgactggcagctatgttgggttgtagtactaagactgtgctgtgacacaagctcagtgttttatgactgagtctggttcttacatctccagaatcagtcatgaaggcatcctatagcacttgtgctaaatctaaacaccagcactaccaccccaattaacaacaggctcatggtttactcagctatccccctattcctactataatccatcatggatgtgtctgtctacaactttcctatgacagtagcaacttgctgagggcaatgatgaaaactcacctgtatatgagtcctacaagaacccaggactaagctccaacttctccaaaccatcgcatcttagagcagcattcaatgtggaaaatgaagcagagctcaagaagcagatcttgatgggcaccacgattccatctgctagggatcaggtcttcttttagaaatgtgaatgaggctgaagtaaactgctaactgaaccctggatccttcctcttaaagtcaggatttggagtgtgtgtgtgcgtgtgtgcatatatctccagatcttcctttatctgataccaactcaggtgtcagtctcaagtccaacaattacaaagataggaatgcctcactctttatgtttaacatttgtgtctcatagttcatccccagaacaaaaccaaggtattttgtcctgtattcagtaggtagaaacttatctcttcaatatcaagaattgtccacccatcatgaacaacatgaccatcattctccatggattgatccagctacattttgcatttaaaagatatgatttgcatttaaaagatcgatctaaaagatatgcaatgcaaatacaagttgattgcacat

SEQ ID NO: 32436 - DNA, 1165 bp, Mus musculus
gttcgctccgtcagctaaagactactgatatatctatcaaccaggttccctccatgatctcagggctactactgatgtggtatcccccttttctgtttctgcgtgtgtctgtaagctactccttacaatagcaaccccctcacaggattagatgactgagaacagagagtgtatttacacgccattctgcataaatgcgggggtagaaggtggtgggcactctcaggagacagataagccaggcagaagggacagatttggggagcacttgaaaggtgccctgcaaggatcctaagtgggtcgttaggaggtcaagcctggaggcacctctgagcctgatgattctagggcttgctgggcagggcgtgaggagaagtgaggagagactggtgtgaacctaatccgggcgagaggaaggggagaaacaaaggctgaggaggatagttcaaggggcagtgctcagccaggagagttaggggagtcttgagggctgcttgctgggttcagtgatcagaaagaactctttgggccagaggaaaggagtgttcctgggatacttgagagcattctggaaaggagccacggggcctcccaagcatcattcacggacctgtcaaaaaggtaactgggctggatctgcaggttgttatatgcaaattgtcgtgaaggaggggaggccaaggcagagaccagtgacccagacaagcaggctgtgccagtgttctgagttgtgcaggataatcaaacaatgagggtcaccttagaatgtaatcgggctccaaggcagcaaggaggtccagcctcaatgaactgaacgtcaggctctttctttttatttagcgtttactttaggttgtgtctcctttaggacaggtacttctgggcagcagaaaaacttttaaaataaaataagaattaggttgcatagttaaataatatgtgaagatttaggtggaggtagtctttttttttcttcacaaaagttgttttttttgggggggggggttaaaaagtttctcaaaccaaaactcctcatcaaaggaaacatcacacccctgaaactttggtccctcttgtggactgtttgctgtactcaataatgcaagacatcgcatatgtatcaggactgtcttgtaccaagtcatgccaaggccctaaagctcct

SEQ ID NO: 32437 - DNA, 1211 bp, Mus musculus
gatgtagaggagatgcacgcagcttctgtgtgcctagaagaggccactatgccttccaggggaagcaatcaggacctcatgcggggttccagtatcttacctcccctactaaaatccaaacatctggagccctctgcttccgagtagcaagctcttccgggatctggtcagctctggaagttgtctatgattgagactgtagcaagagtgactgcaaaactgtgctccatttcctaaaacagacacaattccattctgtctatcctttgcatggcttccccctctgtctccctgaaaccctgtcgtcgggtttttattttcttggtataggaagaagctgcccttcccgtgggctcccctgtgtcagggccactcagtaggacgccatctccacagcctccccacaacacagactatccgtgtgatccacttctttctcccctcagctctgaaatgcagatatcctggataaccagcttcccttttgggtatcttgtgtggtcccctcccctcttctctcccgtcaaccctgcagtgtagactccccagatgactcccttctctctcctccacagtgtagacctctcagacgacccagttctctttcaagatgcccgccccgacgtgcttctcctgtcacaagacccgtgctgccctccgtcgcccacgttctgggcaggcgctgtgcggctcctgcttctgtgctgcctttgaggctgaggtgctacatacagtgcttgccgggcacctgctgccgccgggcgctgtagtggccgtgggtgcctctggtggcaaggactccacagtgctggcacacgtgctgcgtgagcttgcgccccgcctgggcatcaccctgcacctggtggcggtggatgagggcatcggcggctaccgggacgccgcgctggaggcagtgcgcagtcaggcggcgcgctgggagctgccgctcaccatcgtggcctacgaagatctcttcgggggctggacgatggacgccgtggcccgcagcaccgcaggctccggccgcagtcgctcctgctgcaccttctgcggggtgctgcggaggcgcgcgctggaggagggtgcgcgccttgtgggagctacacatattgtgacaggtgagcactggtgtgcagcaggaacggtgtgggtgtggaagagtagtgtgccaggaagtgcaagatagtggggtgggctggggtctccactcc

SEQ ID NO: 32438 - DNA, 1207 bp, Mus musculus
ggcagagcgcctagctctggctccggcagcaaagccccctcctccaggcacctgctcccgctgcggagccctggccagccacaagctctgccaggcctgtgccctcctggatggcctcaaccgaggcctgccgcgcctggccatcggcaagggccgccgtgtgctgcaagttgagcctccacagcctgggaacccaagcctagtcaccagtgaccctgtggccccagcaggaccctgcacctgcaagcaaccgaaagataaagccaacccatgcggcaatggaggggaccgggcaggagccacctgtgtatcgcagtgtgacctgagccccgggaatggagaggaccgggcaggagccacctgtgtatcgcagagggacctgagccttgggaatggaggggaccgggcaggagccacctgtgtatcgcagtgtgacctgagccccgtggcggagtgacctgagctctgcactctacattgccctgtgtccggggaagtgattgtaccccactgccctgcaactgtggagtaatctatacactgtgaagtgatttcccttcagtgcacggcaccttgggactgacctgtttccgtgtggagtggctgtaccctgcagagtcgcttgagccctgcagattatttaaagtgtccagtgccctgcaacctgagccccgtgtcctacctgtaccccatggaaggatgggccctgtagagcaacatgaaccttgaagtatagggcgctctaggcacagctaccagctctaagagagaagggaccaacacccatgcattcccgcacacctctgtgggctcagagagccctggccctccttttctgttttcccaagtcaggtaaacaaagtcacatgcgtactaggaatattcacaatcgtcactatacccgtctcatccaggcacagctctcgcacctacgggaactggagaaagtttgttctgaaccagttgggaccttccatgggcgggtatgtgaattgaggttgcctgggaaactgccgtgggagcagttacacaaacgtttacagccctaggacaatagaaagtcattaatcaagacattggtcaagtatgtcggtgtgaactgcaggtagacaggttatagcaaagctgaaatcccttctgtcagtctgaggaactatctgatgactttcttagcttgtgggtctttggaagccagtggtctgctgag

SEQ ID NO: 32439 - DNA, 1196 bp, Mus musculus
ttacctagctgagaagagaaggaagcagcatacaaaacccacaactgtcctgactctttcttctgtcacctcggggaaactgccaactgcgtcagtacatccgcttatgtgaccaataggatttcacgcatgttgagcaagttaactggatggatctttcccctacgtgcgtgagaactgaaacatcccggtgccattctgaccctccattgtactagacaaggaagtcaagatgaagtcagctcccttgcccagggttgcacaaagccatgtagccacatggagatctgaacctacctgaagggctcttcccaactgtagttgggaaatattcaagtggacggtacagccggctaagtggtgagattaaccccagataagaggaaggacgcctattccattgtccagggaaggaagagggaaagggcgaggttctctgtggggcgtgggtcaggtggcaggaagcagaggacgtgcctgtctaatggctcggttgggttttttttgtttttgttttgtttagtttactgagagaactcacccagatcatcttcaggagcacacatgctcaggtgatgggggaagggcactgttttggcaagtggccagaacaaggaagccaggaaagcacctgccttgatgctgagccagtggagttgaggatggtcagggattaggtccgggtgaaggagaagcaaaggcgggaaggcttggtggtgagacctgccgtgggatggccaggtgtctggggaatagaacaacagctatgggtgtgctgtctgcagcaccctccaccagaagcgtgcctcagagggggcagttcttcctggaggagataagaggctcagctgggctatggaaaagggagtgggggtagtgggaggcactctgcagccattggaagattattgatctgtaaagttggtagtacttccaggctcttgaccttttgttgacaggtgctgggttaggcagtctgtaaagaacatatcttgacccccacatcttctctgggggttcactgtcacaaaatgacaatgaacaatgtcacaagtatgtgacaatgtctcaagtatccaggttggtcttaaactctctatgaagcttgcaattctgctcttcctgcctccacaagtacgatttcttttggaggtgggagtgggattcttccctgtgttaggtctcgattccctgca

SEQ ID NO: 32440 - DNA, 1176 bp, Mus musculus
gattgatccccaggctttgccgggccaggcgagtgctttaccctcaaatcatgtccccagctccttacacaaggattctaggcaaagtctctcccactgagccaatacctcctgcccctcactggtggattttaggtagctctactgctgagatctatccacagaccttttatttatttatttttaagttactatcactgtgtgtgtgatgtgtgtgtgtgtgtgtacagcatgcatgtggagaagaccacttcatgaagatgtttctctccttctccctttacggaggttctaggatttggattcaggaaatcaggcttgtgtggcaagcgcttcttctacctgctgagccatcttgtgaacaccacaggactcttttaagtacattctacttctagacagtcgttactaggtttagattgactggactcttgaacacactctgaagccacccccggctttgaatttacaatactgttgcttcagcctctccacacctgatcacaacaaggactggctcgtgtgtgtgtgtgtgtgtgtgtgtgtgtgtgtgtgtgtgtgtttcactcactcactcattctttttttttttaacagagggtcttacatagcctaggttggtctcagtttccagctatatatgtagccaacaatggtcttgaacgcctgatctttctacttccacctcccatgtgatgaggggtgcatgccactgtgctataaatttcaggcttcataaggaattttaacatgggtttaaagtaatttttatgtgtataggtgttttgcctgcatgtatatgtgtgtgtgtgtgtgtgtgtgtgtgtgtgtgtgtgtgcgcacgcgcgcgtgtgcgtgtgcgtgtgtgcgtgcatgcatgcatgcagtggccatagtggtcagaagagggcattagttccctggaactggagttacagatggctgtggtctgccatgtgggtgctgggaaccaaacttgggtcctctgaaagagcagtggactgcttttacccactgagctatctctctggcctcttgatataatatttttaatatgataccttacacttattctgactattcatgggtacagtagtggcatggatgttgcaagggtagctaatggctttgtggctggattgaaggcctgttccacaggaggaactgtgtacaacc

SEQ ID NO: 32441 - DNA, 1431 bp, Mus musculus
agggtggaagccacttagggacatgttcactataccctggaaattccaaacagtcctagggctgagccatgagaccaagaccagtctctgtctcatttgccccacattcccaaggacacagcaacctcagtctacagcatgcaggtcagtgtagacaattgaggggtaactgtggcacgtgcctataatcccaacattccaggtggctgaggcgggaggatcctgagttaacatccagactggactacatacaaaaataagtgagtaagattgggggcggggagtatagaatgtatcgaaaatcttctaccttgggaggtagaagcaactttgcccacataaactgtcttaagcaaggaaacagggaagtgttacccctaagggtcctgggttctctaaaaccaagtgtcagccattctcttgggtggatttctgagcactgggctatactgtcccccttgggactttgcatggccctaggaccttagaaagggagggtattaatattaccaggacccctctgatgttcagcactgggctctgaccatcctgaggacatggtgcccccagggacctttgacaccctggggtctgaggggccctggcgacaaagggagtggatggggaagctgtggtctttgtgagtctcaccagcctttctcctctccctcctgccaacagacagaggcagttccttcagacaaccaggcttccctccaggtaagcagagagctgcctaaagtgctaggacaaacagctcagtttagactctgtgctgtcagtgtgtatgcttgcggacccccttgatgtccagcactgggctctgaccatcctgaagacatggtgcccccagggacctttgacaccctggggtctgaggggtcctgactacaaggaggaatgaataggggggtgccatggtcttcgtgtcccttgccaacctctgtcccctctccttcctgcctataggtggtttctacaaacatcctacttcccttcaggtaagagcagaaagactgtctggagtagaagtctaatgctaatcacatgaacttggtttacacaattagaccagattgctaagagacatctctgtcatgccgctcttgggaacccccatgatgtatatagcactgggctctgaccaccatggtgatatgttgtgcctccaggacctttgacatccaggagtctgaggggtttccattctagggggatgctgggtgggagtgtagccctttgtcacctaccagcttgccctgtgtctttgcagcctctgcgacagcattgcttctagccctcttgctattcttaccttgagactgtgagggccatggctgagagagtgctggtgcccacccagataggccggggggaccgctactacacatacacggagttgttggctatctcacggcgtttcaagcagaa

SEQ ID NO: 32442 - DNA, 1431 bp, Mus musculus; identical to SEQ ID NO: 32441

SEQ ID NO: 32443 - DNA, 1431 bp, Mus musculus; identical to SEQ ID NO: 32441

SEQ ID NO: 32444 - DNA, 1189 bp, Mus musculus
ctgtctgtaacccaggtgactaggaagcagcttggggagcgcccaagtggacattcccatcctatagcacttaatgccaagctcggtggccccaaagagaagtgtgcatgttcctagccacaccatccatatggaaagtgagccacaggtggctattggttgtgaatctagggtgcttatggccctagaattaatccccctgagttgaagcttaaggccatgctaagatgtgtggccacatcagggtccccacccctctgcctccacatggaccccaaagcactacatacaggccatcttgaattttttactttttcaatgcaacacttacatagtattttaggtataggccgtacttccatggccttttactggatgtttgacactttagggccagtctccctagtgtaaaggcttaacattgcaaacttttctaatgcagcatttttactttatattttattttgagcttatgtgacactttggttttggggagaggagaacccccttttgtaaagattttgctttggggaccttgtccccgttttcttttaaccatgcccttcccttttgaagcaccttccagccgggtctggtctccctggctgcacagatggcccctggccaatgcagatctggatttagtggaggggtgaggtgggcagccctggaacttctgccttcgtgagtttctattaaatggctggttcattgccctctgtagggtgtgctgtttgattcggttccggcgtgggtagaatctgggtgatgagctgggtccagagcaggtgaggcacaggcgcacttgcccacctttggcctgtttccagaggatactccagcggtctggtgaggaaaggtgggctggtgggggccagtcacagccactggctggccttatcccctacctcagagcctgcaattgatcagaccctctagttcaagctgttcttggattccagggtatgctccttagcttccttaggctcttaggtcttgatgtacctcccccagataggaaacctctcaagacagggctggggggctctggggaatgatgaacacaaggcaatgggcatggggctccaggtgatggcagtgacacagtggctgctggtaggctgttccttagtaggagttaagccctccctcaagtgtcacctggggggctggcaggctccctcaagtg

SEQ ID NO: 32445 - DNA, 1164 bp, Mus musculus
ggaaagagagcagaaataggggcttggggtgggcatggactttggaagcaatatacaaggctgtgtacgagtccagggagggagctctgggagctgagaggacaggagaagaggccgtttctgcggatgtcaggaagaggaggcccaccaggtatgtctcaggtcccaaggaagtggagaaggctgggaacagttggctgtggccttggacctgccccaggaggaagctaggagtcactgaaggctcatgagctgtgcgatgtgccagagcagcttcaggaagctgaatcagactgtacttgcagaccgtgggaggggtggagctgggagccttaaaatgggagtggggcgtgcatctggtctcccaaggacactagagcttggaaaagcactcaatccctgtccccaccctgatgctctgccttacttccatccaaggacgcctgtccctccagaagtgccttgtccctccactctcccctgcctctcacaacttctgtgtatgcagctccagcgggacaccccgagatgggccggctgggggaactgggggctcagggggccctgggggctccctgggcagcagaggcagacgtaggaagctctattcagcggtacccggtcgctccttcatggcggtgaagtcctaccaggcgcaaggcgagggggagatctctctgagtaaaggcgaaaagatcaaaggtgacagagtggggctgggtgggggcagggtgaggggaagctcaaagaccgcctgtgccctctgcactctggggactttaaagagccctgagaggccccttttggcttggaggagagagaggcactatatgggacagtgtgaagaagagaggagatgagcatggattgtcccatgtgtgaatgaatgtttgaatgcatgtgggcacatgtgtgtgctggtgtttgtgcatgtgtgtagtgtgtatggggaggccggaggttgacatcaggtgtcttcctcagtcagcctccacattttcttttttgtgagagagagggtctctcactgaaccttcactgactcaaccaggctggctacctgaaccaagcaagctccaagaacctacctttctctgcttccctgctgggggttacagattctcacagctgaatctgacctttcacatgggttctagggattca

SEQ ID NO: 32446 - DNA, 1203 bp, Mus musculus
gtaggtgctgcgaatccaaacccagatctcgcacttgggcagagaggtctcgcctcagtccccattcataacctcctgtctctggacctccacttcctgttgttagagcaggactgatatgttgtcaatctcccagggtaccctgaggtactagttatattgtcacatctcaacgaatgtttgctactgtattcttctacctgtcatttgccttcattgccatcaactgcaacaaagaacagagtagatttatcccgcttgccaaacactgagtgaaagcctcgtacaagttaaggtggcttcccaaggatagatagcaaaatttttcctgcattgtctctaagcttttgggggtcttgtccttcagaaatgccctatgacggagaagcaacatgagctagagagaacaaaacctggacacagtcttcaggacctgctacccacagaatgtgacagccacagactgtaaaacaaccattataaactgggaccatagcagaagcacagaattcaaactcagttgtactgagaaagtagtcagggcaacactgacttggccccacatgacccatgacctctctcttcactctttccagatatttccgtgagcctgctgtcagtcatcgtgacattctgtggcatcgtcctcttgggtgtctccctcttcgtgtcctggaagttgtgctgggtgccctggagggacaaaggaggctcagcagtgggtggtggccccctgcgcaaagacttagcccctggggttgggctggcaggcctggtaggaggtggtgggcaccacctaggagccagcctcggtggtcatcccctgctgggtggcccacaccatcatgggcacacagcccaccatccaccatttgcggagctgctggaaccaggtggtcttgggggctctgagccgccagaaccttcctacctggacatggactcatatccagaggctgctgtggcctctgtggtagctgctggagtcaaaccaagccagacatcccctgagctgccttctgagggtggaacaggttctgggctgctcctgctgcctcccagtggtgggggcttacccagtgcccagtctcatcagcaggtcacaagtctagcacccaccacaaggtgagaaagggtatcgggcttggggcttcactatgaaactctgcttgtctgtctcattcttatctgtggctcttctga

SEQ ID NO: 32447 - DNA, 1474 bp, Mus musculus
ccctggccctgcctgtagtgactaggggacccagcccctcccctctgtggccctggccctgggccatcctcatcacttacctcccttcctctctgcctgtctctgtgtccacctgtcctgcctgcagtggatgtacatcattccagttgtgctgttcctcatgatgtcgggagcgccggacgctgggggccagggcggcggtgggggcgggggcagcagccggtgagcagctgtgccacctagagccccccccagagccagcccaagaaggagttcctgtccccacatttccctattgcatgaatatggaaggctgtcccttcagtgagccctctggccttcctgtaagcccctctttctgtccctgagcctctctctcatcctgttgactgagagcttgggtggacctccctgtagccagctcactgcaactgtgtcccaccatgtggcactgtgctcctctgtctgctaaacacccaccagcctgccccaccccaccccaccatacactttgggaacttgccaagctctctccagcctctgtgcctttgccctgcaggccccgtgcgcccctcactgtcactctccagccctttgccaaggatctgtggcccagaggcctctgctcttagtggctaggtcagcctccagcccactgtccaggtggcatgctgtcttctttgcccccctctctggtgccccagaataccatggtgacctaccactatcctttctgcctttggatgtcatagcctggatctgtcaccaggagaggattgtgggcctccacgttagtctgtgaatgcacacttcgagtgacttgtgtgcaggttttgagagccggttttgcactagctgctcgacagctgctggcatggccgtgctcttgcacatgcgccgctgtgggcatggggattgctgtgcagcctcagctgtgttgtgtggctgctgattaaactgtcccctaaacagccactcttcagctcacttcctgccttctgtgcttgtgaatagtcctgagttgccgctgtggtttgcctggtttatgtttgaatggctttcttagggtatgttacagaggggtgcctgagcagattaaagttgctgtgagcaaggacgccttccgaactctgggaggaggctggttcctgaccctcctaacacatttcttggttcattcccggcacagctacgcgcttgctggcccatcaacctcaggggctcatttcatatccctcatcctcacacgaggattgcactgggaccttgtgtgttggtacagtcggtatcaattgggatcccagcattccggttgctgcctggaagtagccacaaagtagtgacttttttttttttttttttgttttttcaagacagggtttctctgtatagctctggctgtcctggaactcactttgtagaccaggctggcttcgaactcagaaatctacctgcctctgcctcccgagtgctg

SEQ ID NO: 32448 - DNA, 1173 bp, Mus musculus
gtagtgcctgtggacatcctccctcccccctctctctctcagggaccctgatggggcagtagcccatgccaaggacgtcatctcggacctgctgtgcaaccgcatagacatctcccagctggtcatcaccaaagagttgacccgcgcagcagcagactatgctggcaagcaggctcacgtggagctggctgagaggtgggcagccacacagcttcctgcagctggctccactccaccctccccaaacctcatccaacccccttatccgcaggatgaggaagcgcgaccccggcagtgcgcccagcctgggtgaccgagtcccctatgtgatcattggtgctgctaagggtgtggccgcctacatgaagtcggaggtcaggcccacctgggctgggcccctcccagaatttcacttctgctttcctggggcggccatgcccctgggccatacttagtgtagtgcctccctgggcagagttggctgctgcgccctccccacctgggttgccaactctatttgtctttgtcatctccaagcctggatgcttctgacccctgcaccctatccatggcccttctcccatggggaaactaactcttggcgatctgagggtccccacccagacccgagtcacagttccaggcccacccctttatcagagcctgcagatacagtgtgtagctctctagcccctagcccatgcccctctgcagccattggtgaccctggcctgcccacaggaccccctgtttgtgctggagcacagcctgcccatcgacactcagtactacctggagcagcagctggccaagccgctcttgcgcatctttgagcccatcctgggtgagggccgtgcagagtctgtgctgctgcgtaagtggaccgcccaggagggagtgtgagcggggaaaggggccgaggcggaggcagggacaaggccattcagcttccctcctctaggcggtgaccacacacgatgcaagactgtgctcaccagcaaggtgggcggcctcttggccttcaccaagcgccgcaactgttgcattggctgccgctccgtaatcgaccatcaaggtgagaccgagttacagcccttatacccactggtcgggccctgccacaggactccattctgcctgcactccagcggagggtcctcgcctgccccgggg

SEQ ID NO: 32449 - DNA, 1185 bp, Mus musculus
tggcacagacatcagggtgtagtgatgtcatcctgcacttccacccgtttgtgaagctgtgcggctggggcgagaggcctgtaagaagactggggacctggtctagctcaatggcacagccgcttcttacaagcttccagtgaggggctgggtgtgacccagtgacagagcctctgcttgctctgtatgagaccctggctgcattcctggggggtggggtggggtggctctttgtcctctgagaacgtacactttggggctgcagtcctgtctgataggccgatgcttgaaagtagcaggagtgggtcctccccgacccagcggatccagcttctgtgtcctcatcctccctggttttgcccctaacagagtgtcactgggttcgggcggcagatgattgagaaaaccaagcagcttgtggagtccaagtacaccgtggaaaatggctacgatgccaacgccaaggtcagggcctgcccgctctccagggtccccgggcttcctaccatggcagctcctgggttgagaagaggcatccctcacgcatgtaccctggcaggtagtctacggtgacacggactctgtgatgtgccggtttggcgtctcctctgtggctgaagcaatgtctctggggcgggaggctgcaaactgggtatccagtcacttcccatcacccatccggctggagttcgagaaggtgcgtgcatcctctgtactcagctcagtggagacattaggggtcttatcaattagtgatggtctcctatgacagtacagtagtgtgggggtccccaggctgggagtcttgcagtgttctgggttgtagctgaggcccctgttgtgcaaaccagtggtacattttggatctgtctgcatgtacgtggctccagttctcgccagaagctcaaacatgacacccctggcttctcatccagggttatctcagctcagggctcacttggtcctgtctcttcccatggctgcaagactttacagtgtcacctgtctggatttcataatttcggggccagccttaggcctatggcattatgtcaagtgggtttctggggtgctggagagtgctgggccttcttgggattcattccttgcctgttgtgtttcctggtctcgggattcggggcggaggaatgtgcacaggccatggaggaatgtgcacaggctccg

SEQ ID NO: 32450 - DNA, 1179 bp, Mus musculus
accggaggagggacagcccttgctccccacaacccagggtcttcaagctccgcctttatgtccgacccaagggccttggaatccccagggagagggtaggacacacaaggtccgtaggatggtgacttctttccttagaacaaggactggaaaaccctttaccgatgtaatccccactgccacctgtcgctgtcatcgcgaccggtcgcctcccacgcttgttgtggctgtggccgcctccagcgggacgctaacagggagagaactacaaaatccgtgatgctccgcggtgtgcggatctttgattacaggcagtggggggccagaggcttcatggggattgttgttccctctctcgcaccctgcaaaatgggatgccctcttccctctcctttcttccttaaatccagaggtcaaacattcattttccctccccgaaagttacccaaatggtatatccttccatggaaagttgatttttttttttaatttgtttaattggaaagaagcatagctgctgtggcccggtgagcttgtaccctaaccagggcgtcttttgaagaactgcgcctgcgtagtccttctttctgcccggtctgttgaacgagactgagcacgcgccagtcccacgcgcgggccgacgtttttgtccccacggtcaaagacagccacatagggccccaaaaagacgtccccaaggatccagaggggtcccgcaggcttggggatatccaaggcttggaagcccaacaggcagaggccaacatcgctctgaagaatctgcaagatgacaacacaggatactgtgtatcacggggctccgggtttgattgtcccatctacacccagaagaggacaaggaatatttctagctggtcaggatgccatcagcctgtgatgccagtgctccagagacaaaggcaggagggtggggagttcaagaccagccaaggctatacacgtaaactccatttaaaaggaaggaagaaatgaaatgaaatgaaatgaaatgaaatgaaatgaaatgaaatgaaatgaaatgaagtgaagtgaagtgaagtgaagtgaaagagaagttatgaaatggctcagccggtaaaggtgcttgctgctaagtctgccgatctgagttcaatcctcagagctgctcgtagtaagaaaaaagttgattcctttaat

SEQ ID NO: 32451 - DNA, 1099 bp, Mus musculus
acaaaaacctctaggaacacgtaggaaaaggaagacaggttaatcagccgcagccccgaggagctcagcttgggggtgggggggttctgccagctgctcttgggcttggaggacgccagctggtgcattccacccacgcccgcctccagggatctgctccctctattcgctgcatggacttggccctccaggcccagaaccctctacccactgcagtctccactctatcccaagaggtgagactagtaccctagacttaaggagacagaacctggcaccctgcactcccacaccccacggactccggcgccccccactcctcacctccatcactccatccatcccccactggcctggactgcaccacagagtttttccactcttcccttgcacctccgctcacttccagccttcggggttctgacagtcctcaagaccctgacattgcctagacacccctatatccccaaccccagacggccccaactccctgacatcacactcctctgtcccctggcgcctctggcgcaagaccttcccggacaagctccgtctgtctgattacagagagctcccatcccattccagtattactgtctaggcagccccctcctcaccgccctctccccccccaccccatggtgccaaaacacactttcttcatggccaccagagtttcccagagcgtgggactcccgttccctcttcgtgtgctgaagtttgcaaagtgcacagacgaccaagtgttttaaacttgtgtgctctttgcaggctcacacccggctggtgcgtcctggcagcgcagcagttgggtgttgccactgaaagcaagtctaagacaggatgggacccaatgctaaaagcgcttgcttaatgtgctaaggtcccagggttcaaactccagcaacccctcttcccctactggtgggcaaagaggacatacccacctcggctaggatctcagcctgcccttcccagcttccttgcccactacgtgccacattctcggatggaaaactttctcaaatctcgtcttggctccaggatgctacctcccccaagcccagagaccacactggtcccagaatccttagcgaac

SEQ ID NO: 32452 - DNA, 1578 bp, Mus musculus
aggagctggaacagatggaagacttcttccttgatgccccacttctcccaccgccctccccaccaccacctccaccaccagcagcagcaccctctctgcccctgcccttgcccttgcccacctttgacctccctcagcctcctaccctggataccttggacctgctggctgtttactgccgcagtgaggccgggccgggggattcaggcttgtcaaccctgcctgtcccacagcagcctcctcctctggcccctctgccttcacccgcccgcccagccccttatcctagtcctgccagcacacgaggggaccgcaagcaaaagaagagagaccagaataagtcagctgctctcaggtaccgccagaggaagcgggcagagggcgaggccctggagggcgagtgccaggggctggaggcccggaaccgggagctgagggagagggctgagtcagtggagcgggagatccagtacgtgaaggacctgctaattgaggtgtataaggcccgaagccagaggacccgcagcacctagggtacaggtccaggctggagagggaggtctcgtgtacgtctgtctccagcgtcacactacccctccattccactttcctatccagtccatctctaggcttcccctctgcctaacccactgtgggctatttggcagagtcagtttctgtaccccttcagtgcaactgagaaagcaaggccctcagggaactggaggaggagccagcctgatccctggcctctggagtcttaaagcaagtgtgtttttgcaggtagtcctagttgggtgtagggggaggctgccaggcctggcatgaacataaagcaggaagccactctgggtgatggcagatgagaacctagtcagggagggagggttttaaggaggggacttggaacacaagtgagaagccagtcaagaaaagggagccaggacctcagaatttatactggcctaggggacaggaaggggtgattgtagttggtaactaggggtcattttagctctgtgagagaatcagtgttttgtgagggtgtgggggaagggttgcatctagtggaggctgatcctctaggggttatgggcacaaataaaatgcagattttcctgtggcctgtgtgtcttatctttgagaggagacgctggggagagtgagcctcggggtagtcttaagacaactgagaataaagcaaaggactggggctgaagctcgacagtacacatgtgcctagcataagagaaagaagttgggtgtggtggctcatgactgcagtctcagcatttgggaggctgaggaggaaggattgcccaggccagcctgggctaaagactgaccccatctcaaacaaaacaatgaagccaaacaaaaggtaactagtaacatttgttcattgtcaagtacacccacttggcaagaacatgacaggtgaccagcctatcagtaaagttagagccatgttgacactaaggctggttgtatttacattggcagcaaaagacaagccaaaggtaatatagcatatacataccaagaagaataccatcaaacacagtgtgatcattgcag

SEQ ID NO: 32453 - DNA, 1095 bp, Mus musculus
ttggcagcctttacccactgctcagtcattgtattttcttttagaaaaaaaccctgacttcacctcttttactctccctaccccagattcttagccatatgatcgttctgtgtgtcccacctccaaggtttctgtttccagccatccctgccgacctctaaggttttgcccttgctctgactttcttgcagtccttgctctcttgctgaccccactagataattatttcttgatcctgtccaaaataggacatttatattccatttagtaaaagagtccctcttgtccttcaccggggatgatgcgtgaaccctgttttctaccccatgttcatgtacatggctggcattccatgtgaaagtcagtcagtgtgtcatatttgtagcagctgagagactgaatggttggagatagagctcaagaatgctcgtctgtttttaacaccagaaccttagtctctgtccaagcaccacatggattgggcttgacttgcctgtattctcaggatttgggagatgggagaaaagaaatcatgagttcagggtcatactgactggcctcaatgtgttttaaaaagaaaaagtccagaggccaggcttgatatctcacctacttaggaggctaagacaggagtattgaaagtcaaggtcagggctggagctgctttgagatggctctggtggtgatctctaaactcaaccctcctgagttccatcctcaggacccacttggtagaaggacaaaagcaactctagacggttgtcctctgacctccaccacctgtagtgacaggtctacatactgagtaaggggaggaaaaaagctcaaggcttgccttgactagaaagtgagttcttggctgtctagagaacttaacaaagatcctgattttaaaaaaatatgtaatgggctggggttggaggttggtggcagagtgttggccagaatactgctttccagactctggtgtccatccctggtactgtaaaagattcagagcaggtggggaatactgattttgaaagttacaagtccttgagataattccccttggaatgggcactctttttttttttttagattttatttatgtaa

SEQ ID NO: 32454 - DNA, 1095 bp, Mus musculus; identical to SEQ ID NO: 32453

SEQ ID NO: 32455 - DNA, 1123 bp, Mus musculus
ccatctctccagccccacttacttatttcgaaacagggtcttaagccgggcagtggtggcacttgggaggcagaggcaggtggatttctaagttcgaggccagcctggtctacagagtgagttccaggacagccagggctatagagaaaccctgtcttgggggaaaaaaaaaaagaaaggaaggaaggaaggaagaaagaaagaaagaagctggcctcagactttttgatcctcctgcctcctaagtgctggaattacatgtgtatatcactaagacaggcttccttatcttttttttttttttttttttatttatttatttattttattaatgtaagtacactgtagctgtcttcagacactccagaagagggagtcagatcttgttacagatggttgtgagccaccatgtggttgctgggatttgaactcctgaccttcggaagagcagtcgggtgctcttacccactgagccatctcaccagccccccttccttatctttttgaggctgactgacagtccatggatggatgtttgtttggcccttcattgtttttgatgaactgatggtcattggttgggatgtttttatcctatttgggctggtgttaccgttctggggtggggtactggggtctgggctcttcattgaaagaaactgacttctaggcacttccagatttgctgcctggaaagtgcctaggcacttccagtggctgccacaccctacagcaccaattcatctcttctctggccaccctaatgggtgtgtagtggagcctctttgtgatccagcttggattttctggacgatggtggtgataagcctccccaaggagcagtcctttcttaaaatgatactgtgacctgaggccaccaccccttcccaccctgagtaggtagcttctccatatgtccttaacaatgggcctctagtagattccctggacccttccctaacaatctcttggggaagcctgacactacctcctggggcttctggtactatcataagcagagcttgatgttgtctggtgtattgtcctgtgtaattcacttgtgtctgcctctgttggcactaaagaacaggtagttagctggaggagttggtttattttgctt

SEQ ID NO: 32456 - DNA, 1438 bp, Mus musculus
tgatgctcagctcaagcgcatggcacaggacctcaaggatatcatcgagcacctgaacatggctggtggccctgcagacaccagtgacccattgcaacagatctgcaagatcctcaatgcacacatggactctcttcagtgggtggaccagagctctgccctgctgcagaggagggtggaggaggctagccgtgtatgtgagggccggcgcaaggaacaggagcgcagtctgcgcattgcctttgactagccacgcgtgagtggggggaggggctccttgggttgcagggctgctgcctttcccgtggttggttgttgagaaaaatgctctttgttttgattccctgttatcagaagtgttttgcaaaggcatgatgttcatggatataacctgtgtgctctggagaccaatgtgaaggtcactgaactctcggccagcatttaaagaacaagggcaagtggtgaatccagcgctcccttgcaagcttcagctctccttgtggcagaactcatccttcagccactccagtactactgtgagggtggataggtgctccagacgagagactcacctggggtggagacaggcttctgtgcgtctctaattcctgtcaagcccgtgtcctccagaggctctggcacatagagtggagtcaccaaagcaccacttttgcactggctacctctcactcctatcttgtgcgcttctgtggcagggactgactgctgatacgtctttgaggccaaagtggatgcagatttgcttctgaatatcccagtgtcaaacctatcttagatccacagtggtgaagctggcagtcatgtctattttatttctctgcactctattgtagcctttgtggtccctgatcaaaatgtttgttgcttttctaaataaaggaagatttgtgaaaccagacttgctgtgagtatgggtagtgggtccaagctttggcaggatagggcaggacacagctggtgtggtggtggtactcctatgccgcccgggttggaagcgctggctgagccatagggcccagtctctaccttcatggggtgggcaggctgcaggtgtgagaagagtcctgtctaccattgtgcctaagtggtaagtcatccattaccctaatacgtgcaggtgtcattgtgatgtcatcagcagtgggaaatgaacactgaggggtgatttccagatgctggtctcacttaggcccggcacttggctataggactgggggaccttgaaccagcagtggggccacttgggtcatgttgggtcatgttggcacaggagaaagctgggggtgggatgagcggctagatagagaggtagtcgctcagtggctaagaacacaggttggctgctcttccaaggacaggaccctattttgattcaatgcacccacgtggtagcttacaaccaccctgtaattcagtc

SEQ ID NO: 32457 - DNA, 1112 bp, Mus musculus
gtttggtccccagcaaactaggcgtggtggtgtgcatgtgtgacttgagcactcaagaactggatgcatgagaatcgggactccaaagttacctttatacacatagtgagtttgggtccaacttgagtacttgatcctggctcccagagtattaagaaaccaaactaaataaccacaaaccaacttgactctaatgttcatagccaaaacagatggagactcgaaggctttgggtagttcctgtgtggaacaggatggggccagaaagcaagctaggactgggaaagatcccaggggagacaggtgtgggaattgggggagctcagctgggacggccgcgtgccgtggaggggagttgcattgcagtagttgcccctcaggatgaggagtgatggttgcggcatcctgagcccctctatcctgctctggcccacagggctcggatggcgtctgggcggccagaggaactgtgggaagccgtcgtgggggccgccgagcgctttcaggcccgcactggcacagagctggtattactgactgcagcgccaccgccgccgccccgccctggaccctgtgcctatgccgcccatggccgcggagccctggcagaggcggcccgacgctgcctccacgacatcgcacaggcgcacagggctgccactgccacccgacctcctggtcccccaccagcaccacagccgcccagccctgctcctagtccaccacctcggccagccctggccagggaggatgaggaggaagatgaggacgagcccactgaaacagagacatctggggagcggctgggcggtagcgataatggaggtgagctaatagggctggcactgcagtggggttgctggttaactggacacttgtccagggtgttctgtgggtccttggcgctgcattccttccaagcctcacacaagagccaaccacttgatgggagtaataacacaataatgttgtgcaaatgtagcacaccagggttgggagattgcctttgagagcttcttgtctggccaagcaactggtgagaagtgcgggtgtttctggaaaggggtaggggctgccatcccagccaagggagacacaagtttcccaagagt

SEQ ID NO: 32458 - DNA, 1160 bp, Mus musculus
ctctacagccctcctcgcccgacctagaccgaatagcggccagcatgcgcgcgctggtgctgcgggaggctgaggacacccaggtcttcggggatcttccgcggccgcggctcaataccagcgacttccagaagctgaagcggaaatattaagcgaacagaaagccttggcctgcgagaggccactgcctctcggcccagcaagagaacaattctttccgggattggctggctcaggttgggcggggccggttctaaacgctccaagggtcaactctgtttcttgcctagcaaacgaagctttgcccgcacagccttgactcgcggccccagggcggagcccagctgcgggagctgccgctgctcagccagtgtcgggaagagttgcccgccagccttccagagttcccctacccgattggtcccggcctcctgggagtgtggccaagccctccctaacccagaattggcccgaggcctttaatttcttacactactagggctgttaatcaattgtttttgtttttgttgttttctttgcctgagtcctgacaattgtatcccggttccccaggggacagtctgggtccctctctggtctgacgctccctataggttccaccgcacgacagcctgtccatcaaaacttgtcctgtacccaggacagtaccagcttcctgtcccccgaccctaacaggtgccttaaaaggccctctcccacccaaggtgggggggccaggggggcctcactttccggccctagacttgggtgcgggagagtgggatgggggtagggaggggcgctctgagattaaagttttacctctgactagtgagttcgtgttgtgtgtgagtgtgatgctatgaagcgttcatgacaattaaatgaagttcagggttcgacacccagtcttgggggcgtaactgtgggagcggtagaaaggcaaaccagggaatctccatttcccaacatccaaagatgagaaagggggctagaggggctagaggactgtcaccttcacactattaatattaatatggattgcctcccttttgttactttgctttttgggatgatttcactttgtagcccagcctttctcttcagtttttgtgctgggatttccaatctgccccatcataccgagctttagcgtattt

SEQ ID NO: 32459 - DNA, 1230 bp, Mus musculus
gtgagtgtaggtgtgcaccagtgagcctggcttccgtggcttttttggaagagcagttgggatgtcctggaatgtgtatggcagagccaggccccctctcccttatattggcctcattctgaatgtgtgagactaactggcctttccccttctgcttcgttcaccagcctttccagagcccagggtagaaagctctgtcagaagtagggcagagtaggtgagtgtagataccagccatttccatgaaatcagacctgtgtacagatggtgacagtcattgcttccatctgggtgcatgaccactactaacacaggcatgttgtggtgctgggtgctttcatctattcctcaggacacttttatgtacctagtttgcactggaggctaaaagtcccagcgtgcccactagggtccattgaagctaggagtggaggctggagaagtatattcccaggggtcccagatctcacaggaggaaggaggagttaggtgtaggccagttgcagtggcccagagcctctagctgctgggcttgcgctcctcaagatgcctcagttgtgccaccgctgtccctggcttccttgactatggagccacagctggcggtgcagaccaagcgtgtggcggcacaagtggacggtggcgcacaggtgcagcaagtactcaacattgagtgtctgcgagacttcctgacgccgccactgttgtcggtgcgcttccggtaagtgcgagcagcaccgtgtgggctgtagggcagtgaggcagtgtcttcagggatggggcccagctgagctgctcctcatctgctcaggtacggtggcaccgcccagtccctcactctgaagctcccagtgaccatcaacaaattcttccagcccacagagatggcggcccaagactttttccagcgctggaagcagctgagcctgtgaggggcggggctgaggggcggggcagggctgagggcggggcctcagatgcctgacagtgctttcaaccttccagccccctgcaggaggcacagaaaatcttcaaagccaaccacccgatggatgctgaagttactaaggccaaggtgagacagacgggcgtttatcaggtgctgggaccagttctcacccctgagagtttagcctgcagtaggctggaggcttctcagctctgcttccctaatacccatgtcgttgcagcttctggggtttggctctgctcttctggacaatgtggatc

SEQ ID NO: 32460 - DNA, 1193 bp, Mus musculus
tgatcagcacatggtgaggtgcccggccgccccaccctcaagtgcctgaagcccatgtcttgccttctgccctgacattccaacccagacctcctgtccccagtgtgtatgccctgcccagtttccaagaaaccttcttccttcctcgataactccttggctgcctgggactgtcctcatctctgatgcagtaccttaacaagatttgcctatttctgagcctagagagcccatagcaaggccagtggactgactgccttgcaaagactgaccccaccctagactcccattagcccaccctgctcctgactcctgagctgacttaccctgatgccagggctttcccagtgacacccagcatgaagtccctcacgcctgagctccttgcagggagtggtcacagctgctgtcagcctcatcacctgtctctgcaagaagaatccggatgacttcaagacctgtatctccctggctgtgtctcgcttaagccgggtgagtgtgctgtcacactggccgtgggagggtctggctcccctgtgtctgtgatatctgtctctcctcccttccctaaaaggcaagccagcctgtgcttagaagccaggactctgcattggcttcctcgggctgtgtgcccccaggcaaatggcttcacttctctttgcttcttttcctgtgtggttcaggggctggtgtcagtgcggtctgcagcatggttgctgtggtaaggtgctgacagctcccctgcctgctcttcttcctcctgtttgtctacacatccctcctttgcctcccaccacctccacccttgtccccagagcgccgccccgagccttctgtgtgcctggctctctatgtctgagtcagaccttagggccgccctgtcctgctgagagggagtgtgacggggacggtgactcagtcatagactgccaacaagggctgtgtgtcagcatcatgggcacctcgcggaggtcctagtccagtttgggagacaggagagctcctggggatggcaatccaaatggagactcagaatgaaaaaaatgaaagtgctgtccgggaggccataagtgtctcagtcctcggggagaaggaacacctatgcctaccattcaagcccctagttaccacacatctgaatgcattaggtgccaggcccaacagggtacagagatgaggtcactgtcagccgc

SEQ ID NO: 32461 - DNA, 1195 bp, Mus musculus
cacaattatccggattacgtttcctctggaggtggatttgggcctgtgagtgaactggactgggtccagcctctgggcagctggagggtgggggacggtgccctgcgggcgtgaagggtaggctgggctattggcttgcttcactctccctgctccaggcccatgaccatgggtatggtatctcctacatcttcatgggggaaaacgcaatcaccttccatatctccagcaagaaatcaagcacagaaacagtaagaggaacttaagtgccttctttctctctctttaaactctgggattgagcccttcagatcccagaggtccctgatgtagcctcctccctcagaactgcctcccgggcctcctccctcagacttgtctcccgggcctcccctagcgccttatctgcttctctgcaggactctcaccggctggggcagcacatcgaaaatgccctgttggatgtagcctccctgttccgggttggacagcatttcaagcgccagttcaggggggagaattcggattatagatacaactttctctcctgtaagactgtggaccccaatacccctacatcctccaccaacttgtgagcccctcagcagggagctggtctccctcaggatggaaggtgttgctcccagggcttggctggcgcagacaggggtatcggggattcccacacccacctggtaataaagatgtgagttgggtgcagtatccactgtgcttttctgcggggcatgggtggagtggggggtggggcacccctttcaccccaccttgacttcccagttgtcatcaccttaaccacagcccgcactaccacctgagcaggctccatcccaaactccctggccagacctgatcagtcagcttctcacaatcaggcacctcattcctgtcacccaacaccaaaggtccgtcagaccatctccacactgaggtctggacagcaattctatcctgcgaggagaaaggatcgaggcagggtgtcctgtagttcaggcaggctgctctggaacttcctatgtagccacactcttgattctcctgtgtctgcttggatgatggactataccactgtatcctactattgaaaatcaactcagaggtaggaggatgctgagttccaggctagcctgggctacatagcaaggtccaatctcaaagtgtgcttgtgtgtgaaccg

SEQ ID NO: 32462 - DNA, 2215 bp, Mus musculus
gggctgggcgggggccgagatcatcagtgaggtttctgtgtgatgagcagcgtcgggcatgcctgaggcttatcacagccatagagctactcgggaacagggcagaaagctctaaagttgaagaaagttagtggtaaccctcaaaaaggaagagttgaaatggggccatagagagccttgagtcactctgggagggtggggcatggcccagtggtcgggtgcctatggtattctggttctgggttctaccactagtcctgttaagaacaagggggagtgctggacactgaagaactgttccaccaggctctgctgtcagtcattgagtgactgagtctgatccctgtgtaactcaggaaacacaggcaagatgcaggatcactagccctcaaagccttgctggtggtgaccttgtggggggtgcaatggcaggtttagcatggcgacacccaggcaaagtctggaactgaccatgcccacctttcaggtcctgagtccccgtacacacactggaagcagactgtgttctacatggaggactacctaacagtgaagactggcgaggagatctttggcaccattggaatgaggcccaatgccaaaaacaatgtgaggcctgatggagagtaaacatgatacggagggtgtgcagaaaagtcaggttctgggtagagttgaacagtgccagcttgggtagcatagcgggtacccgaggaagccccatgtggctgctgggttcagtgataaccttgttcagcacccttcctgtgggcactgaaatcacctggctcctgttacaggttagagtggcaagtgccagagcgcagtgtgatgctaggaacacctaaccctggccctcttgatccatgggtggagggggcttcaggatgcttgcaggggccctgaagtggtgctggcactccagcgctgctggtgctggttccctcggtggcagaaacttagactgtggctggggagcatggggtgcatatggccgatagtgctgtcagtaggtcagggtgcagggtgtgcagtgtgctggctggcagacgttgccaacactcttgcctggcccttggctgatggctctgtctcccacctgagctctgtttccctcttttccctgcagcgtgacttggactttaccatcgacctggacttcaagggtcagctgtgtgagctctcttgttccaccgactaccggatgcgctgaggaggtgccaggctggccctcctgcagaagggggctcggggggatgggcttgggggatgggggggtacatcgtgactgtgtttttcataacttatgtttttatatggttgcgtttatgccaataaatcctcagctgaccatgccacttctcgccctggggctggggtagttctactgttttgcctatcactccctgaggactgtccatttctgctctagggatgtggacctcaagctaggtaggattcctggctccatcatggctggattcccagaccttcctgagattcttttgttgttttggttttggttttggtttttcaagacagggtttctctgtgtagccctggctgccctggaactcactgtagaccaggctggcctggaacctggaactcagaaatctgcctgcctctgcctcccaagtgctgggattaaaggcgtgcgccaccacgcccagctcttcctgagattctttggagcagaggttgaggagtcctcagtgcgggtcagacccctgagcccctgagcccccaccccagagtctgccttccatctcccgctcttcctgtgctgttcctgttttcgggggggatgagggggttgagacagggtttctctgtgtagccttggctctcctggagctcgctatgatccatgctaacctgcagcagaggttcacctgcctctgccttctgagtactgtgactaaaggcctgcaccgtggtactgggccatttgtgtttgtttgcgtgggctttttttgttttggtttttggttttctgagacaaggtttctctgtgtagccctggctgtcctggagctcactctagaccaggctggcctcaaactcagaaattcgcctgcctctgcctcccaagtgctgggattaaaggcctgcaccaccaccacctggctgtttgcgtggttttgtttttttgttttttttcaagatggggtttctgtgtggtccttgctgtcctggaacttgttttatggtc

SEQ ID NO: 32463 - DNA, 1134 bp, Mus musculus
aagaagtaaatatccttttgtgagacccccacccagcccacttccacataagcttacttgctatacatctggctccccaagaggtctaaccgtcctcttgcttccaaccagtttcctctgctgtgccccctaaccccttaggacagagcccttcctggccccagctggcttccccagaaccatggctgcttccttaactccatctccagccctcctcccctgcccttccatgtgtctgccctggctctgccctctctccctccctccccagctgtgggctgagctagagacaggccatagagcctggagagatggtaggcgaggcggctgctccctggatggtgctctgggtgggtcctggaagtggaaacatgacctggggaagaaagatgctggagggggctggagggttgtcctggtatgatgaggggctttttgcaggttgaggagactctggggaacccacctttgaccctttgccactccccctcttctaggtttcctgtggccaagcagaaagtagtgagaagcccaacgctgaggacatgacatccaaagactactactttgactcctatgcccactttggcatccacgaggtgagtagagactgaccctacagccagtatggactgaaggaccacaagaccagacagggctctgagtgtctcagcacgttcactgctccctttctgcccctggtccacttttgaagactgaattcttccatctctccagaagccagtgcaagtgcttcctgccccagtgtaccacagacctagggatgaggtccggccctgtctgtctctggcgccctctagtgactggcagtggggctgcgtccatggctcatgctgcactacaaccctttttgataaaggagacaggacttggtgcaaatcaaatgacattctaaagaatcctcgtcttttttccatggggctttaaaaacaacaacaacaaaaaaactactagaggctgggattggggcaaagtggcggagtagttgcttagcacgtgctggatagtggcctccatccccagcatcataaatggggaaaaaattggaaaatttgcataaaataattgagcttttggaggcctagggacgtaccccagttattaaagggcttg

SEQ ID NO: 32464 - DNA, 1103 bp, Mus musculus
ggaggtcctgtatgactctgagggtctgagtgctgacgagcggggtggcaagagtgacaaggaccggaggcgttcaggggctgcatcctcatcttcatcctcaagggagaaagggtctcgacggaaggccctcgatggggaccggggccgagacagggataggtcatccaagaagacgcggccacctaaggactcgacgcctggctccgggccactgcccaaagcccccccaagcagtggctcctcgtcctcctcgtcctcctgctcctctcgcaaggtaaaactgcagtccaaggtggctgtgctcatccgagagggcgtcagcagcaccacccctgccaaggattcctcgtcttcaggcctgggctccattggggtcaagttcagccgtgaccgtgagagccgctcaccattcctcaagccggatgagcgggctcctgcagaggtggccaaggtggccccgggtagcaacaagcccaaaaagaccaaggccaaggccaaggctggggccaagaaagccaaggggaccaagggaaagacgaagccttcgaagacgaggaagaaggttcgcagcggaggcagtagcacggccagcggtgggcctggctcactgaagaagtccaaggccgacagctgcagtcaggcagcaagtgccaaggggacagaggaaacatcatggtcaggggaggagcggaccaccaaggcccccagtaccccaccacctaaggtggccccacctccacccgcactcaccccggactcccagactgtggatagcagctgcaagacccctgaagtctccttcctaccagaggaagccagtgaggacactggggtccgagtaggggcagaggaggaggaggaagaggaggaagaagaggaagaggaggaggagcagcaacctgccactaccacagccaccagcaccgctgcagctgccccaagcactgcccccagtgcagggtctacagccggagactctggcgcagaggatgggccagctgctaggatctcccagctgccaacgctacccccacccatgccctggaacctgcctgctggtgtggactgtactaccagtggtgtcctggcctgtgagtctt

SEQ ID NO: 32465 - DNA, 1149 bp, Mus musculus
tatgtcctgggacaaatcaccctcctagaggtacctgagagccctcatcctagtctgtctagccccgctcaccaactgggagtaccctaaattccaaacagttgctccattcagaccccaagcactccccgaggctctaatctcctgatcattgcccagactttgattctaagactcagctgggaccactctgtcctaaaacaggcaccctgtaacccctgcttgaagaggatttcccttcagacctgagatttcagaaagatcctgctacatgaccatcctgggaaaacaccaatatctggcataccccattctgctaaatgcagccccccatcctacccccaaggaaaaccaaccatttctccatcctaagttccccactcaaactccttaccctcaaccctgaaaactctaagtagctcccatgtcatctccagatttaaaaagaaaagcatagaactcaggtttttcacagcctccagagacctgttacttggaaggttctaggtcccataaatagacctctcctacatcaggaaccaaccctccaggctgttctcacccttgggcatctatttactttggggtcctaatcatccccccacacacaccaaacctcatcctctccattccttgcaccccttttagcctcagcccttagcaagcactctagagaggaagccaccttcagcctcagcagccaagttcagaaaatccagcccagccccggaaacctccacccagttcccacggggagcctccccacatcagggcaacactaggaaagtgagggcccacttgctgttgtagaagttcctgggtgatggacattcacagactaggagcctccggcaatgccgttgagaaacctacagtgggaagaaagagtccaaatttgagcccctagcaccaagggccaaacctggagatggccagaggcctggttggaagtagcaggacacagtcaggaagggagaggcggggataagggtggggctgcctctctgaagcaggattggaacctagaccttcccaggggaggagacactggaggctgcttatggaggagggagcaagaggagggaaggaatggggggagggggggagaggaagggaagagagagacagcaagatcggcagctactttgc

SEQ ID NO: 32466 - DNA, 1343 bp, Mus musculus
actgcgtaactctggctagtctggaactcacagaactctacctgcctctgcctccaagtgttgggattaaaggtggtcaccaaggtggtcttggaagttctctgtcttgattcaacattttggtagctaactttgtttctatgggttttcatcggccacactgagttaggccctgaacagtcgctcttatcactctgctcttgggatcctgagtatatctttccagcctggagaagctaagccactttgtcctctgagctcagtcactgaggcatccttaacaaggcctcccctgtgccctcctagctagggatctgcaccatgatttcttgccattggaagcagtgtctactgcacaggaacctcagaatgattctgtcccatctctccgcagagcgggcagttccaggacggctgctgaagacacgggccatgcgggagatgtacaggagctatgtggagatgctggtgagcacagccctggacccagacatgatccaggccctggaggacacgcatggtgagctggaccagggaggatgcctggacctcagaggagggatatggagttatgggtgggtgctgccttcctgaagctgaggattgggcctgggaggtggagggttagggtctcgggagagcgagaggcttctggattggtctaaggatggtcactggcacttagtcctttgagaggaaagctagagcctgcaaaggaactctggcgttggactcggtgatcccggggagtagggggttgggggaaccctgttcgtggcagctgctgtctgctgacacccctgctcttgcagatgaactctatcttccacccatgcggaagattgacggcctcctcaatgagcacaagaaaaaggtcctgaagcggctgtcactgagcccagctctgcaggtgcttgggggcctgagtggggatattgcatggggctcagatcaggtgtggagacccggctgtgggctgtcagcaactggaggttacttgagtatcttccctagagcaaggattactgcaaggtcattactgtcctggggcttggtctggagatgatgagggctaagctggagaggcccctggcttcccaacagccccccgggggacgttaatagagcatgcctgggcctgaggcttttgtctaaccaccctatcacctgtctcctgtccctgtgagacagaactgtcaaatcccagggctcactcctgcctgtcagttccctctggaatgacccgtcgtactggatggtgcatcccagggccaccctgagaatcttgaggtccagtgctgacacggtgccaaggattctagatttaatgtcgtgggacaggg

SEQ ID NO: 32467 - DNA, 1802 bp, Mus musculus
cccagctcctcccttctgtgctcagccatgcccccagcccctcacctagcgcccccaaagtcggcgtccacctccttgagccagccacccgggatggggcgccccagccgccgcccccacccccaccacctatgcctctgcagcttgaagcccacctccgcggccacggcctggagcccacagccccaagccctcgcttacgacccgaggagagtctggagcctcctggagccatgcaagaactgctcggggctctggaaccattgccgtcagggcctggggaccctggtgtgggaccacctaactcggagggcaaagatcctgcaggcgcctacagaagccccagccctcaagggaccaaggcaccgcggtttgtacccctcacgtctatctgcttccccgactcattgcttcaggacgaggagcgcagcttttttcccaccatggaggagatgtttggtggaggggcagccgatgactatggcaaggccggacagaccgaagatgatggagaccccaagactggtgctggtccaccccctggtcccactgcttatgatccctatggaccctactgtggaggccgggcatcaggaactggaccagagactccaggcctgggtctggatcacaacaaacctcctgagcttccctccacagtcaatgcagagccactgggcctgatccagagcgggccacaccagtcagcaccgccgccgccgccgccaccaccgccaccaccacctgtctctgagcccaagggtggcctcacctcgcccatcttctgttcaaccaagccaaagaagctgctgaagacatcctcatttcacctgctgcggcgccgagacccccccttccagacgcccaagaagctgtatgcacaggaatatgagttcgaggctgatgaggacaaagccgatgtgcccgcagatatccgcctaaacccaaggcgcctgcccgatctggtgtctagttgtcgctccagaccagccctctcaccactgggagatatagacttttgcccacccaaccctggtcctgacggcccgcgtcgccgtggccgcaagcccaccaaggcaaagcgcgatggccctccccgacccagggggaggcccaggattcgtccactggagggccctgccatggcggggccagcctccataaccactgatggggccaagaaacctcggggccggggcaggggcagaggcaggaaggctgaggaaatgggaggtacccggttggagcccctgaagccacttaaggtgagggggactgggtgtgggaggggttgggatggactctgtgagactggaggtgtcagatgccctaggcatcaagagttgtggttgtctcattaaaaagcaccagagtcacctagaattccggtgtttccatgagataaaatgttgtgatgttcatgtgcagacagggtggcaggactcaagttctaaagtcttgtgcatggagggatggactggcattcagagcctgtgggcctgagtactggggaagatctgtgtctgggagggactgttggcctggcctcctgtctcaagtagtcagttgggctgaaatctgagactccacaaatttgttgcaggaatttggaggtggtctaaagtgaggtggggggggaggggtgcagcactccggggtggatccctggagggtgggcccctggaccgtgacactttgctatccccgtgtctagatcaagctgtctgtgcccaaagctggtgagggtctgggagcaccttccaatgatgtcatctcgggtgtagaccacaacagcctggact

SEQ ID NO: 32468 - DNA, 1134 bp, Mus musculus
cctcttcttggctgattcgttcacttatccattgtcaggcctctctggactttttgacactggcctccaccacgcgggctcagcagggcccgacgcctccgtcatgaacctcatctcggccctggagtctcggggcccccagcctggcccttccgcctcctctctcctttcccagttccgaagcccttcctggcagacaggtaagtgctatttccagcgggctggagaagggctgtctcgtggtccgctctgaccaatggtcttcttcatccctagccatgcacacaccgggccccacggaactcttcatctctggtgccctcccaggttccagcaccttcccgtcttcctctgccctgtctgcctaccagcacccggcttccttcggcagccgccccttcccagtgccctcatccctcagcctccaggatccacccttcagtcctcctgctaatgggctcttgtcccctcatgatgtgctccacttgaagccttcccaggcacctacagtgccctcgtcattgggtttcgagcgcctggcagggggtggtgtcttggggcctgctggcctcggccctgctcagactcccccttaccgtcctggtcccccagatccacctccacctccccgccacctcccgactcagttcaatctgctggcttcctcttctgctgccactgctgccgagccctcgtccccccagctctacaacttctcgggtgctgcccccggtccaccgccggagcgggccctgccccgacaggacacggtcatcaaacactatcagcggccggccagtgcccagcccccaccgcccccaccaccagcccattccctgcagcactatctgagctgcggaggcagctatccctcaatgggccaccgggccagcttggcttgcagccctttgggaggtggggaaccttctccgggtgctggagaacctagcaagggtgggcctagtggagccacagctggagcagctggccgggctacaggcccggagactgctgggggaggtgcggctgggggtgggggagggtaccgccccatcatccagtcccccggttacaagacgagtaagggaggttatggaccagccacggggggtgccaccaggccaccgccacctc

SEQ ID NO: 32469 - DNA, 1156 bp, Mus musculus
ttcgaaccgggaaggccttgggaagatgggaagggttggcgaagcaaggcctggacttgccccccatctttggattcccggcgtgctgacccctccccccgggcgcccctggctctgcaactgcaaaggtgggaggaaaagagaatcagctcgcagacctggggggctgcaccccctcccaggtcctattgttccggggctgcaggaggccgggccactcggtccctcccccctccaagaaattccccgcgcagagtgggcaaggggccccgcccccttcttaaactagaattctgtgtgtttgggggggtcctgagattagggacacgcccccttctgctccccaccttgctcaaagctgtgaatcctggttgatggcgcgctgtttgccctctggtgcaaggccacggatttgggccctttctggaacagagtcgtgtctcttccccgtttgtgtttgtgtgtgtgagcgtgggccctgtgcacgcgtggctagccgcgtgttcacccgtgaacctgcctcttgtagtttaatctgtgtcctcactcttcacctgcccttcaccctcctccccctccacacttagctttccccagcgtgtataaatttttagagtgggacttcacactcgggaccttttcttttgcacgggtgaattgaactcctgtttgtacacgcatctggcttcacttaggccggtgcatttgaacctcagcccctagggatgcaacgaattcgtgtcaggacttgtacctgggactttccctgtgtcctgtcccctccccaccttctccccttgccatttgggacacaagctacctcctgctcctggcctggctggattcctttcctaattcagggtccgtgtcgtttcagcgggtcttgggttgtccgtgcgtccttgcagtgttggacctttcgttctgttgtggcatgggaggacttcaagggaggaccacacctttcacgttgactatttgcttcccctgactttctccgtccccagtgtgtcctcgcatgcccgtgtttgcaaacgtgggactcttaagtgctccagaatgacattttttaaccccctcccccgccatgggatgactggattccctagtgttatctctgggttctttggagtaacacctccattcagttgagaag

SEQ ID NO: 32470 - DNA, 1273 bp, Mus musculus
agagcgcgacatcatcgtgctgcagcgggtgagttgccattcgctcaccgcagccctcaccgcagcccgcaccccatcctagcctgcactgcaaactgtcccctggtgtcatacccacctgtcttccacccggcccccttttgcccacccctcacgtttttcctccctatacactgttggctcttctatggcactgttttctttctaatgccccatcctcctccgcccttgggctcctcccctttgtcaaagacactcccactgtccagactcttcgatgttctgaatgccctccatttcctgccctgggacttatttctctgccccccccccccccaacagaacccccactgctgctgggagcccagcctgtgaggcacctccagcttgttcttttctctcctctctagggcggcaccggctttgcgggctccggagtgaagctacaggcagaaatgtctcggccagtgatgcaggcctgagccgtggcctaataaacgtggatgtgaacatctggatgcctggcgcctcattgtaggcccggcgacagaaggagtgggcctgcggtgtgggcctgggctcctgggatttactcagtcacttaggaccaggcagaaaccccggcgtgaacctgtgggtctcctccagcctcaggcaggacttggaagagggtgccctgaacaagaagtgcaagtctcgtgatagcactcccaggccagctacctcccgagacccctagacatggacctgcccccaccaagtgcccctcccccagcgatccctacagacccattacacactgcacactgcttcacatgcacgtaccctcctcctcttctttccctgaacacctgagaatatctctcaagagccaacttcccttccccagcccccttaaacttgctcaaagagacgcagaccaccctcatccctgcctccaagtaaaaatagctttcttttctctttgtactggcaaatgcacacactaagcaagtgttgagttccttaatgtatatctaagggaggggtttgtgcacatgagtccaatgcctgcataggccgtactaacctgtcagacccctggctctggggtcaggcagccttgagtagcctagtctagatgctgggggccaggcttgggtcctctgccaagagcagcaagcactctaaaccactgagccatcttcaccccgtgtttccatcccatcacagaagagaactgctgcaaaattgaggctactttgtgctgtataagactgcctcagaataagag

SEQ ID NO: 32471 - DNA, 1195 bp, Mus musculus
ctactgcctgcacgcaggtgggtccggaaacagagagagaaacggaaagagacctagagacagatccggagaaacagatgggggccgaggcctagaggagagaagccaggcagaggaggggccctagggacagcctggtggggatgtcccccgtgggccctgcctcctgctgaccactctgcccacaggatggccggctgagcaaagctgagatcttgagcaactggaacatgtttgtgggcagccaggccaccaactacggtgaggacctgacaaggcaccatgatgagctctgatccccatgtctctcagacttccgaccacatgaccacatgggggacaaccgcggggccactgcagccagccccgcccccaggacacagactcagctctggtgttcctggttcttgggccctcagtcaccttctctccctgagacccctgtcaccaaccctgggaccccccaacctgcccaggatactcaggcactcaaagataagtgacacccactgatagcatcccagcactgacgcggggccacatcctgacctaaccgcaatttgaactctgaatgtcaacagcacaagctaacctgtcctgcctaggagcaataaaagctgttgctggggtcccctgctctgtctgtctgtctgtctgtctatctgtgggtggggggaaggatactgtgaggagatggaggagcatgctggcgctgagtgcggagggcctcaagagggcgtagtccagcggtgatgtcccctccacagggtcacatacattacgattcataacagcaaaatcaccgttaggcaatagcaacaaaaatgattttatggttggtggagatccgtcaaaacaagaggaactgtgttaaaggttgaggagcactgctctcgggcatctgggcatgcgagatgggtgttagtggacgtttgagggcgttcccagaggccgagaataaagccagcagcctgggggccgcaggaaagccaggcaggaaatgcagcccgcccctaagtgctccagggtggggaagcacaaaaccacagctggagaaacaaccacagctctcagtgaaacaccccgcggtgagggttctgaaaatggaatagccaggaatgaggagggaaagcgcctctgtgtcagctgcattgagccacacggagagtgatatacacccgtaatacagcaacgc

SEQ ID NO: 32472 - DNA, 1203 bp, Mus musculus
cccaccccctttcttctttgctgtctatctaccctgtcaacctacctgtctgtcagtgtctctctgtgtgtctgtgtgttttttctggcaagatcttggggtgggcagcagggtgggagacaggggccaaaggcaaaggctctcatcacagagtgtgtaggcagggttggggccacctcaagtgctggcacatggaagaaatcagagcaggcttacagctgggagtgggctgctgccaaaccttgtgtgttaggcaaccatgccatgaccaagccacacccacagcccacaaatcctggggtgtcttaaagtcacattcagcgtgcaggcctttccagggctgcgagtctactccaaaaatgctccaaacgagtaaacatagaagctgttttgggaggcaggcctaatgacgtttgccccgggaggcttccaaccagatacagcaggaacttcaagagaggctggacagaggcccaaggggtgtgcttaggagctagtgggtggagttggatgccctcagagttctccagtcctaactgtgtacagacaggatgtaagagaagaactggaggctctaagcagaggatccatcggctgcaggcagagggaagagggcctctgtgaggaacaggctgagcgtcagaggaggaggcccaggcctggttctctaggtatgagggaccagcaccccaagaggaaagagggttggggcctggagctccaggtctgagggaggagtgttatgacctgagggggagagaggaggctggggtctgaggaaggagagcaggaccccgggcacctgagtctgagggatgaagccggagcctagggttttgggtttgaggaaagatcttggaactggactcctggatctgagggaggtggaactggactcctggcttgggtttgagggctcctgaggctgaaatctgagcccctgggaatgagggaggaggagaaggcctggatcctctggtctgagggaggagaaaaaggaaataacagaagtctgagacaaattttggtctgtctagctctgtaattaattaactaaagtggatcaaatgagaaggtgaaagttcacagaggaacactcctgtctgtcgtcttggactgggtctccatcccaccatccagcgtcctggtctacgaagagtccacagggaccttgtgaagaatcaacaaggcggggtccagagg

SEQ ID NO: 32473 - DNA, 1781 bp, Mus musculus
caggttttttccccttgatggagactgaggcccggacctcgtgcgctctacggcagggctgcggtcccgacctcgctgtagttttcagtgtgagcgcagctctggcctcgatgagcttaggcttgtcttaaacttgccatcctgcctcaacctcaaccgggatgacagatccggcccaccaggctcggctacgtggacataagcttgaatcccgaatgagtggatttgtatgttttggaggtccagtctggctgaaaagctctttttgatctcagccgtgagttctgcaggctgtggaggtgttagatgggacgcagtgtgtgagctaaactagacttggggtggttggagagccctgaccagccggttttggcgattggggcaaataaggttgaaggtaggaaggaagaaatattgtctctgatttccttgaactttacctgcaacctcaccaaattctcatccctacagacggagcgtgcttaccaaaagcagcctacgatctttcaaaacaagaagcgggttctgctgggagaaaccggcaaggaaaaactccctcggtactacaagaatatcggtctaggcttcaagacgcctaaagaggtacaggaccctccagcagatgagatccctgctgccctgcacgtgtgggagcacagccaccccgcccccttcacagtggcttcccatgggcccctgggaattgtagtatgggccctgaggcgtcatccttggttctgtttaggaagtggtaatctaaaccccactttcttaactttgcaggctattgagggtacctacatagacaagaaatgccccttcactggtaacgtctccatccgaggtcggatcctgtctggtgagtgggatgttggaagggtggttctaggttcctgcgtccaggggcgctggcaagtgatgtctgttctcacgatggtcttcagatgtcctctagggcactgctgagacagccagttgacaaagctgatgccataaatggagcttcttgggagccccgttcaactgactcctacctgctaacacctttctgttactctcccaggtgtcgtgacgaagatgaagatgcagaggaccattgtcatccgccgggactatctccattacatccgaaagtacaatcgctttgagaagcgtcacaagaacatgtctgtgcacctgtccccctgtttcaggtgactctggtagcttgggataatgactctagacaagacagtcactggctaggctggaggtgtcccatgggcagagcagtgtggggtccaggagtgtgtagactgctgtgtgaacgtctgggaactagaagttgtagtttgttagtcttagcaactgcgtagatggtgactggttgggtggagcaagggtggcccccacccctttggcctgtctggatgaaggaattgctggggaggcccctcctgaagactccttgtctgaccccacagggatgtacagatcggagacattgtcacagttggagagtgcaggcccctgagcaagactgtgcgattcaatgtgctcaaggtcaccaaggctgctggcaccaagaagcagtttcagaagttctaaggggactctggccaatgccctagaacaaataaagttattttccaacgtacagaacaggcttggagtctcatgtgtcctgggacagagcaaagattgccagggctttcctgagctggaggtatctgctgcatttatgagcctctaaatcttggtaaccaagtagaacacccagggtcagctacctggtgcaggca

SEQ ID NO: 32474 - DNA, 1781 bp, Mus musculus; identical to SEQ ID NO: 32473

SEQ ID NO: 32475 - DNA, 2345 bp, Mus musculus
atttacctttgcctgggagtccatgatgagcaacactcaccatctttcgtttgagtctcacgactgtgagatcaacccatgcaccgctctgagactcgccagcccctgctttcttgggacccctggcctaaaaatacttttggagcaagagatctgccttccaagaggctttgctgactaatctccaactccctgttaactctaggccggaaggtggtggtcgtacgctgtgaaggcatcaacatttctggaaacttctacagaaacaagtgtgagttagggctggggcagtggtcttcaggcgggctgttgccttgctcctggacaagcaggctatctgctctgctcttgggtccaagggtgcctcacatacttttgtcctgacagtaaagtatctggcctttctccggaagcggatgaataccaacccctcccgaggcccctaccacttccgagcccccagccgcattttctggcgcactgtgcgaggtgagttggtgatgtggtgacatgtaggacagggtaggctctggcagcttgtgatgagacatctcccactcatgttcgagttgctcgactatgagatgactctacatgcactaccatctgaggctgttctagcccttgccctggggtcagacggggttctcagcacctctgatgaggcccgctgttacccccacaggcatgctgccccacaagaccaagagaggccaggctgccctggagcgcctcaaggtgttggatgggatccctccaccctatgacaaggtgagccttgcaagcctagccttacagcctctgcgtccagcgtctgtgatgttctgctattacctacattgtttgagcctcatgaaaaccccactggctgagacgcctaccctgctggccttcttgctaggtgttcccaacaggtctctgagcatctctttctctcaacagaaaaagcggatggtggtccctgctgctctcaaggttgttcggctgaagcctaccagaaaggtaagctctaggttacaggttaggcttgtgagcctcaagactggcacatgatgttcttattctcacgatggtcttcggatgccacagttagggcagtgccgataatgccaaaggctaagctgatgccaggagggctcccgtgctggggatgagtccttgaaatagggtccctaggccctccggctcacccttgtgctgctggggcacattccatgtccttacagccttgtgcctctgcagtttgcttacctggggcgtctggcgcatgaggtcgggtggaagtaccaggcagtgacagccactctggaggagaaacggaaggaaaaggccaagatgcactatcggaagaagaagcagatcttggtgaggacggacactgagatccaggattaggggggcgcaggtgagaagcaaccgctctgacatgtgtcttttcacaccacagaggttacggaaacaggcagaaaagaatgtggagaagaaaatctgcaagttcacagaggtcctcaagaccaacggactcctggtgtgaacccaataaagactgtttgcctcatgcctgcctggcctgcccttcctccgccgccaactagggaagtggggaccaaaggttccttaggcactgctcctgtgggtagaggggacattagagagctgacagcgcaccacctgcatgagtttttattaaagtgcaaaccatgggatgaatcagttgagcttcagtgttgaaaatgagtagcagggctgccccacccacctgaccaagtaccctattctgcagctatgaaaatgagatctgcacatgagctggggttcacaagtgcacacttggagcactgccttgctccttcccagcagaccacaaagcagtatttttctggaggattttatgtgctaataaattatttgacttaagtgtgtacgatgtgtgctgtgcagagaggggcagagggcaccagcaggtcatctgcatggggggcccctttgggtgaatccttgctcacgggataggctttgttgctcaaaagttgcagatatacatcttgggtcctgtcctagatggtgttactgtaagtcagcaccaagatacaagagctggtacctggactgtaggaggtcaggccatgacacaaaggctgggactaaaggcatttaccacgcctgagtcttctggttctttaaacatcaaatccttccgggggctggcgagatggctcagtggttaagagcacagactgctcttacgaaggatccgagttcaaatcccagcaaccaaatggtgcctaacaactatccataatgaaatctgatgccctcttctggagtatctgagaacagctaca

SEQ ID NO: 32476 - DNA, 2345 bp, Mus musculus; identical to SEQ ID NO: 32475

SEQ ID NO: 32477 - DNA, 2345 bp, Mus musculus; identical to SEQ ID NO: 32475

SEQ ID NO: 32478 - DNA, 2345 bp, Mus musculus; identical to SEQ ID NO: 32475

SEQ ID NO: 32479 - DNA, 2345 bp, Mus musculus; identical to SEQ ID NO: 32475

SEQ ID NO: 32480 - DNA, 2345 bp, Mus musculus; identical to SEQ ID NO: 32475

SEQ ID NO: 32481 - DNA, 1172 bp, Mus musculus
atggtctcgggtgactcggcaaagggtctgtcttcagctgtgagtgggcaggatagggacagggaaggagggcggtcccgagaagggaggtaggggaggaggaggaggagaagaaaagaaggggggcaagatggccagagagctataccccagctcccaggaagtagaaacaggaagataggcactcaaggtcgtccccagcctctggaacatagtgagtccatgccagaacagagtaacaacagaaagtgtcagggtggtggagttggtagctgagggcacaggcacacaggaggcctctctggagaatgggccctgcagaggactaggggcatccagagacccccagagggaaaaaggaagaaagtactgagccccctcttgacactggctggtgcatgggggagggacaccctggggacatcagtctctagtcctgagaaggagttagagtcatcagtgcccatggcatatctggctttccgtgggtgctgagagggggtccacggagagtttggaagcttgtatccccaggggtcatctacatcagtctggacctcaggtagtgggtaccttgctggagctgggtcagaagcccagagagggctctggtgcagagtccaggagaccaaatcttgatgttctgcagacagacttgcagagagagccagtgcgtgctctagaaggaagcagagctccatgcttgcggtaaggatcaggttaacagacctcctctgccccggtggtgtagttctgactgcaagagtcacatccccctcctccatctagtctgtggctgtctcagaacccttgacctgccctcagtacatcctgatcctggcaattccaaaaaggagtgggcagagggaccctagggagtccaggggctctgggaggcaccccaaggatcaggctgggtttatagttgtcacccttcagggagccagaggtgctgggaaaatactgataggggccttgagggttcccaggcctggaagaccccacaggctccagatcagtataaggctccaataaacaggctgatgtaagcctccatgggtcctgggagtccagctctgagactgatgggggtgtattttgaggccttactcaggctttgagtaagaatggaaagcgctggatgtctggtctcagcgccttcagcttcctgt

SEQ ID NO: 32482 - DNA, 1148 bp, Mus musculus
tctgcaagttcagggagtttttagtggtcttttcgctccaggaccaagacctgcatcaccatacagccagcccgtctagttcctgtgtatacagaggatgatcttcctggggaactagtgaagttttcctgaaaggacatgtatgaggctttgagggtcatgtaggagtttgttctgtgcagcattgtacattccaggctcagaaatgaaacttccaaggaaattaatgataaattatggtgggggctggtcaggttacagagggaggattctgggtaccaggtcaactctagagctatatgagagatgaaaaactgttggctaagctagaccagagatttgacgaggttgacagagaaggaatgggcagcttgctggctgtggcccaaggcgtggctgcgagcgggccggtgggtgtgcgggcctaggtccagcccacagcccctcaccctgtgctgtctccgcagttccagaggcatctgtttgtccacatcagtcagcagtgtcccagccctggagcaccacccctagagagtgtggacgtgcggcagatctacgacaaattccctgagaagaagggcggcctccgcgagctgtatgaccgagggccaccacatgccttcttcctcgtcaagttctgggtgagcgttcctgaggaatgaacgaccctctccgccaggtctgaggagggtcttgggtctgcctgcgctacccttgaaaaccaacaactatgtgggagagcatgtaggaggcatgtcactgcttctgaggacctgctctgtgacagaaggagttgagtgcagatcgtggggacgtggaggacagagcatcttcagtctttctcaggcccttctggtttggtgtccagttgcatgactggcactgaagatctcggggtggaggagggtatggtcctccaaaggacgtccacacgggatttcagtcagcttggtctccctggctgtctggttctaaagcttcccgagccttctatcatggtgcacgcctgtcaccctcatcccaatgcgcagcagtctgagccaggagaacccagagttcaaggacagctgaccctacttaacaaaataaagggactgaagagctggttctgtggttaagagctgctcttccagaggacccaggttcaa

SEQ ID NO: 32483 - DNA, 2354 bp, Mus musculus
tccaggctagcctgggctacatgagaccctgtctcaaaccactaaacataaacaagccattaaaagtcacaactcgggcttatttcaagggttgaaaggtatagagatggattctgcaggatgacaaagactcttaagggtatggtaggagctgtgtaattagccagtaggtatgttatacttcagggcctgtgaggtcttgaagcctcaagctcagcgtggagatgctattgagggagtttggaggtcactggggtttcagaccatgacagaggagaaggggggggggggtaccttgtttgcaggttcagaggcctagggtctctggtcattaaagttgaggttgcttgagggactctggccaagggagttgacagtggcctctcagaggctaagggtgaagcttcggtcctagggtggccgtgatctctctcagctactgtgtttcccactcccagacggaacgggcccagctggaggacgggcgctttgtgtaccgtctgctgcgctctcccatgtgtgagtacctggttaatttcctgcacaagctccgtcagctgcctgaacgctacatgatgaacagtgtcctggagaacttcaccatcctccaggtgatacgctggggcaggcagaccctcagctcctggggactccaaagatgagattgcttcatccagaacatggtgggggtgggggcgggaggacaggaccgagctgtcctatgtggagagcccatcttccctagggcagctgagatacctcggcttctaagcatctggcttctctgagaagttcagagaagggagttcctttgatttgggggttgtgctaatatgatctgctgaccctctctctctgcctggtggcatggtggggaacccttttctcgggaatgtgatatgatggggaggccccttcctaccatctctcagcttaggggtaacctcattgcccaaggaacctgagccgcaggacattcttcttggggtacatagcatggcaggtttctctttcttgataactagggtgggcagggcagtccatgtcctgtaccccatccccaccctacaatgtaagcctgttctggcaggttgtgacaaacagggacactcaggaactgctgctgtgtactgcctacgtctttgaagtctccaccagtgaacgaggagcccagtaccacatctaccgcctggtcagggactgatggagcccccgccgctggtgtttttcacaacacccccttcctgggaagggcccttttgctctctctgtaagagagatttggagaggggcccatgatttttaaaaaggcctaatctcagaagcatgagccacgggggctggctcctcttagaaaggaaccggaagcctggttattgagctgagtgagctgggtttgagtttagatccccaacacgaggacctcagagacaacatttgacaggacacaccactcctgagcatcagggattggggacaggagtgagctcacaggtacagcacgggcctccgttctacagggcccctccttgctcttctggaaagggagctgggctatgtggggtgtcttactgactgccttgtaaccttcctgcttcccacgtgtctcatatctgcctctccccccacaccctttctctgggaactgtgacgtcacaacccgaagataatgttttcccagcttggggtagggtgaagtgggacctgaaaaaaaattttaatataaggagatatttatacacagtgttagggatgtaatcttatctcagctaggcagtggggtgggacttcttaatctcccccaccccatttaagtgagccttggaccaccctgccaccttcctttccccaagagtgatggtttatgtttgaaggagaataaagctatttttaccaaaaaaaaaaaaaaaaagccaaaaacccaaaggggatttatttgaggtgtcatgtgggaggtggcagacagatggtgtggggaggagggagccaggaagggaaggaagctgggcacaaaagtccctggccatgtggggaaagtgaaggctgtcgatagggcagacagctgggtccccaggggatgaggcctgaggcatgggctccaagcctgtgaccaaccaggaaggaaacatttcctgactgcatggaggtgcgtgggtgccgatgggtgggctggggcctagcggtaccgggccagccggtcatagacgtgatccagatttctacacaggaatattgagagcgtcatgaagccgagctgggaaaaaaggagatacttcagggttggagaaagggtggtactcaaagggagaggcaaagaatgggcatacataacatctgtgcgtgattggcagcgt

SEQ ID NO: 32484 - DNA, 1717 bp, Mus musculus
tgatgtgttccagacctacacgtggcgtggcgtcagaaggcaggccttgggagggtaaggccaggataaaagaccgagactgaaagggcagtcccttatatgtaggcgtgacctactcaggggcatagtatgccagcagatcctaagctggactgggctactagaaaggtagttatggaaggggcggagtcctctgagggtgagaggcatgatctaaataagggtggcacctggaacgctggcccagggcaaggcttggataagacctgggtggatatctaggcattgggtacctaaaaagggatccaagggttcccttggcttaagggtgagttgcagaagcaacgcagccactacacgtcttctgcatccccagggctgcgcgcagagcctccagaagtggctgcacaacaatatcatctccatagtgggaatctgtctgggagtcggtcttcttgaggtgacttgaccccgtccccatgagtgatttgtctattgtagatgtttccccattgccgaggtaacgcgcatacttagcggaggcgttatttatcaagcaatagcatggggtggggcggaggcctggcttctctaaactctgaatggctgtactcgcagtgctgcctcctcccctctcccgcaggtgagcgggatggcgctgtgtctgcagctacagcgccgagctctcgctagagagcacgtgctgccgctgtcaggagccgagggttcgaaccctaccccagggctgaactctgaaggcagcagcgggcgctggggcggtctaagcagcggcagcggacgcagcagcaccccgtggggcagctggggcatggcgggtgcctgcccgacatggggggccaaggctccacaaggcaagctacccatggcgctggggccctggtccttgtgggatgcagaggaggagccacttgagaccgagagtgtgggtgctgaggaggtcgaggcacagacggaggctgttgcggagcctccagaataaaggaccctagctaggcttgccttgagctttctcttttgcagactgctgctgagctttcgctctcaacgctgccaatcacgcacagatgttatgtatgcccattctttgcctctccctttgagtaccaccctttctccaaccctgaagtatctccttttttcccagctcggcttcatgacgctctcaatattcctgtgtagaaatctggatcacgtctatgaccggctggcccggtaccgctaggccccagcccacccatcggcacccacgcacctccatgcagtcaggaaatgtttccttcctggttggtcacaggcttggagcccatgcctcaggcctcatcccctggggacccagctgtctgccctatcgacagccttcactttccccacatggccagggacttttgtgcccagcttccttcccttcctggctccctcctccccacaccatctgtctgccacctcccacatgacacctcaaataaatcccctttgggtttttggctttttttttttttttttggtaaaaatagctttattctccttcaaacataaaccatcactcttggggaaaggaaggtggcagggtggtccaaggctcacttaaatggggtgggggagattaagaagtcccaccccactgcctagctgagataagattacatccctaacactgtgtataaatatctccttatattaaaattttttttcaggt

SEQ ID NO: 32485 - DNA, 1450 bp, Mus musculus
gcacacaggcctggttcagctgccagcatggccgaaagagaaggtaaagaagcctgtgcatgaagattctacacaagggaaatgaaatggattgtgtctaacaccacaagaaaaagagaagcaaatgccatgcagtagaaatcccagcacttgggaggccgaggcagcaggattgccaagaggaagggatggaaggagaagagaagagagaaaaagaaaaggcgacaaagattgtatatggaaagcgcatgcatggaactgtctgacacaggggaccccagtgtggggggcggggataaggaaaagataattcactttccatcacttttttttttttttttttgaggcagggtctcattagatatagctctgcctgtcctagaactccctgtgtagacctggaactcattgggctctgcctgcctctgcctgccaatcactgagattaaaagtgtgccccacgcttctcgctgagcgccgccaacatggtgttcaggcgttacgtggaggttggccgggtggcctacatttccttcgggccccatgctggaaagctggtcgcaattgtagatgtcattgatcagaacagggctttagtggatggaccctgtactcgggtgaggaggcaggccatgcccttcaaatgcatgcagctcactgacttcatcctcaagttcccacacagtgcccgccagaagtatgtccgaaaagcttgggagaaggcggatatcaatacgaaatgggcagccacaagatgggccaagaaaattgatgccagagaaaggaaagccaagatgacagactttgatcgtttcaaggtcatgaaggcaaagaaaatgaggaacagaataatcaagactgaagtaaagaaacttcaaagagctgctatcctgaaagcttctcctaagaaagcagctgtggccaaagctgccattgcggctgcagctgctgctgctgctaaagctaaagtcccagccaagaaggccacaggaccaggcaagaaggctgcaggccagaaggctcctgctcagaaggctgcaggccagaaggtggcacctcctgctaaaggtcagaagggtcagaagaccccagcccagaaagcacctgctccaaaggcggctggcaagaaagcgtgaggctacacagaataataaaagttctttttgacggtggtaaaaaaaaaaaaaaaaaaaaaaaaagtgtgccccacaaaccaaaaaaaaaaaaaaaaaaaaaaaaaaaaaaaatggctgggcagtggtggcacacacctttaatgccagcacttgagaggcagaggcagacgcatttccgagttcaaagccagcctggtctacagagtgagttccaggacagccagggctacacagagaaaccctgtcttaaaaaagccaaaaaacaaacaaacaaacaaacaaaacccaaacaacaaaaaccaaaaaccaaaatc

SEQ ID NO: 32486 - DNA, 1284 bp, Mus musculus
attgggcatctggtttcttgggatagggcagtcacaaggggtgccctgccacacagtgctaacctcatataggccgggcccctccccgcttccacacagagaccgggaccgggaccgcgagcgggagcgcagagaaagaagccgagaacgagacaaggagagagaaaggagacgctcccgctctcgggaccggaggaggcgctcccggagtcgagacaaggatgagcggcgacggtccagggagcgtagcaaggacaaggaccgagaccgaaagcgacgaagcagtcggagccgggagcgagcacgcagggaacgggagcgaaaagaggagcttcgaggtggaggaggtggtggcggtggtggcagtggtggtggtggcggcggcgacatggctgaaccctctgaagctggtgatggagctcctgatgatgggcctcctggagagcttggccctgaaggccctgatggcccagaggagaagggccgggatcgagaccgggagaggcgacgtagtcaccggagtgagagggaacgtcgtcgggaccgagaccgtgatcgggatcgagagcacaagcgtggggagcggggcagtgagcggggcagggatgaggcccggggtgggggtggcagcggtcaggacaatgggctggaagggctaggtagtgatggtcgagacatgtacatggaggcagagggtggtgatgggtacatggccccagagaatggatatctgatggaggcagcgcccgaatgaagaggcctgtagtggacatgctcctaatcttgctgtctgccttcctagccttttccaccttggcttgcctctgagggtagatttttttttttaatccggtcccttggatttaaaaataaaattaattttctgttgatagtgggcatgtgatgtcttactgcacttgctgtctttccaaaaggccacttcctactgctcaactccctttggtatactgcacgtgttataacctgaagtagaggctgttctcccaggcactgtagctgctttacaagtgagagggaagccctggctctcataacaggctgcatctttaagtgagagaacagcaggcaaagaggcaggatgccagccatcagcagttggtacccacacatttctggatggaaggcagctgggagagctttgagtatggtgggccctgaggaagctggggccagcctggcacagtcctgaagaaaggctgaaggtagtcccattgagggctgaatgatagtactccaatctgctgcttaaggcttataagtctt

SEQ ID NO: 32487 - DNA, 1142 bp, Mus musculus
tgcctgcctctgcctcccgagtgctgggattaaaggcgtgcgccaccactgcgcagctgtttcctgttttttttgtttgtttgttttgttttgttttttttaagcaacccaaattacagaactcttactatagacattttcttgtattgataatggcctagctcattgttagactgtgatccagcagctggaagtctgggtcctgctttgcagtagtccaacctgttatctatacctagtttaacagcctagcatgtggctgacctcttcgctttgcctgtgctcctgtgtgaaacacagccccacctcactaaaccttcaggtggatggtgcaggaaaccaccacaggcagatgggattctgagacatgaccctccttgccaagtcactggggcaagtggctcattagtagatccctgtctgaaagataagactgtcacctgctcccttgtgctattggttgggtgaaaatcacctttatagaccacgtattgaatctgcaagtttgaagtattcgtggcacatcagaatctggggaggtgtggtagtgctttctttgaacagttggggaggtactgatggcctctaacagttcgttggagcgtgctatagtgtgatgagcagggcagggtctgagttggtgctttgagactgacagggaagtagaaggtacagagacaaggaaggtgagctcactcctcagaaggtaaatgttacatggctaaggtggggagcacgaggcagctgagaaggctggaaatgtagtgtaccctgggaatctaggtgtggcaggtgttccaacttctgggtttgttttgtttcgtctcaccacgtagtggctgacctgaagctcactgtgggccaggctgcctctgctccaaagtatgagattaaaggggtacaatcccaaacctagcttctttcagcttttctatgagttcacactttggactttatgctcaaagtacaaattggtagtggactagcctaaataaaacctcaagcctcaggtaagatggacagcttgggagtcaagaaggttcttgttggggtgtcctcagctctagcactttgtaaaagtcttgtggataacatggctatcctacaaccagtggacatggaagtgattggcaggagattat

SEQ ID NO: 32488 - DNA, 1181 bp, Mus musculus
acccacctatatccctgccagttcctgaaggtctttccactcctgttcatttctgttctgatgtctctttcctcacactgacctcccctataaaaacacacagaaaaacaaaaacaaaaaaacaaaaaaataatctggtgtggtctggatgtggtggggcccagtgggcctcctgcctcagcatggtgtctagggtgcatgcctgggtgtggaggagcctagccagcctcctgcccagcatggtgtctagggtgcatgcctgggtgtggaggagccctccccacagcagaggccagcattcagctaacctccagtttctttgcagcaatttggccgccctggcaggagggggctgctccatcatgtgaaagctgggggaggccagagtaaatgttttacccccccaatagcacttgggggtgccaaaaaggaatcaagcaccggatggagcaggcccttcagggtggggagagggcggtctggctgttggttgcctggctgactggtgggagtgtgagtgtatgtgtgcagatggggtttgaggggcagggatgctgttgtatggagccttgtctgactagaggaccttctggggaattccccctcccccacatctgttgcagccgcttacaagcacgcagatggcaagaagatagatggcaggagggtcctcgtggatgtggagaggggccggactgtgaagggctggaggccccggcgcctaggtgagtgcagtattccttctgggtgcctgggcctgtgattagagattattcttccttcagtctccccaacccatacgcctgttcctctccatttccagcttgtcttctcatcatcttcatggctttggacactggtgcacacagacacctacacatgagcacccaagcataccctggtctttcctgcatgagtgattgaccagcagcagttcttgtgcagtgtgggtaacttcagcactgacctcagccaccttatgcccatatacttggtatcatgggctgggttggagggtatcactggctctagctttgctcttgctctcactgagtggcttcttcattcactctctagctgagtcaccagcccaattcctggcttcacatctgaagcaagaaagcagcagcctgtgctctgaccttgcatctgaccctcctggcctttctggtggttgtggg

SEQ ID NO: 32489 - DNA, 1169 bp, Mus musculus
cagctaactgctgagccatctctttagcttcccctgtgtgcccctccccccttattttaaaattttcagcattgcattctgtagttcaggctgtcctcaaaatcttagcattcgcctttttcccacttaaactttttctatctcttctatgatctcttttatttgacacttgcagctatattctaaggattaaatgaatgagagagccaggacagctaataagatggtcacagaatgtgtagcactggggtatagcttccagtaaccccacaccccattaggattgcttaatagattcttggtctttttctgaagacttaatacttggtgtccaaacggaacagggttttgatagttctctgtaccagttgatcttggtcatttgcttttagcactagcccagggtccctgctttagactatagggtatggaagagaaaatgtatccttaactgtcttccttcctttttgagacagggtttcactatgtaggccaagctgagttctgcccccttagtacataggccatcacaccccacctatcctagactctggttcctagtctgaggtctgagactgtttgctatcaggcttctccctgtgctttggtttcagtcagtttgccacaagctagctcaagtcatccctccagagagattgcatgaattcagttactgctcagttcaccttgcactgcatatggctagccaaagtatatagttctaaagtggcttttaggtttgtcacagccatcggtttgacgtcatttttatcagagcagcctgttgtcgtcatctgtcaatcaatctagaaaaagccattgaactttagtgaaaccagacctgaaacatgtactcacgcttactaagtcactgagcttttctggggtgggggtggggcactaggttccatcttcatgtattcagtctcttcccatcactcttctacccaaaattgtgagcactgtctactttaaagattttcttctccttgtacaggggaccctcacaatgatcccaatgctcagggcgatgccttcaagactctgttcgtggctagagtggtgagtactcagttcctgtcctgagtggttcaagggctttagaacagtgtgcttctcatataactccgctttatgtcttgtagaactatgacacaacagaatctaag

SEQ ID NO: 32490 - DNA, 1180 bp, Mus musculus
tagattctgtgagctctggagtcatgcagacaggatgtgatcactctgggtcctgatggaaaaagggttagggtataaaagatagacagaggcagagactcagataaagggacagagacacccccacacacacacacaacacacaattctctgtgttgtgcagggttataggactggaatcattttagggccatgcaaagctgagatgtgtgaccccatgtgtctccgaacagttgagtctgatgacttctacggtctcatgggacttgtgttactgtgagtcctgtggaacttttggttgaatttgactgtatgtgagggccattttaaacagtagatcagggtcacagcacagataaaactaactacaagggagcaagcatgggcacgtggatgtgtgtggcccgttgaacaagtttactcagggttatgcattgtagagctggtagtgtctgtatctctgggtccccctgcccgaagcacctagaaagacgatgggaactagtaacctgcctgtcttgctcatgtgggacccatatttctatgttgtcccatgctgtagtacaaagattcagaggctggttggagccacaaggaaagaaaacacagtagggcaagagtaggtacttgggaaaagatgtggcaggggacagagatctagaagaaagaaagatggagagaaggagcaggaggagcaggggagggggaaagagggaagggaaggagggagagacagagcaggtaaagaggaagagatgtgggggggggggggagaaggacctggagcccaagggtcatcctctctattctctgagtcataacagactctaagccatggcgtcagcatcccttagagccaaggaaggtcaccacactcctggaggtgctctgtgtttcctaggacagaaacccaaggctgtagtgtgctgtggcttccctcaaggttacccagcacgtcataggaccaaggctggtgccaggtggcctgcctgtgacacccccacaacttctggtgtgcaggtattgcctgaggccactggtcctgtgtcctttgtttttatcccttaaaacagggtccctctttgtagtgttggctgtcctggaactcactacgtagaccagcctggccttgaattcacagagctcttcctgtctctgcttcacaagtgctgggattaaa

SEQ ID NO: 32491 - DNA, 1200 bp, Mus musculus
aaagacaagtgcagaggctccacctagtcacagcctgtgttcggggttgggttccagcatccagtcaggccagaccatgtccctatgagaccccagagtggccacatccctcccccaggacagctgttcctaataatagacccccccctcccagcaaaagggcagacaacagctgggagggggaggggtgctccagtgaggccctggccagacgaagccaggttgggacagagttagatcaatggcctggagccatacctgtggtctccggaggagaatggctaatggggactgaaatagaacatcgagttttaggaaggtggcaattggtaggaaagtacagtcctggctgatagacacgtgacacaggtgacaaaacaggccaatggggagaggagaaaggtagtgggaggggttacagagggccacagatgaggccgtgggtgaggggaacgtgagacagctgagctcagttaccaggctggggatgtaagccggcgaggaatgcgggccaggtcttctgagcctccctttgcctctccctcaggtgtattttgggcgttggctgatcgaggggggacccctagtggtgctcctggatgtaggagcctcagcttgggccctggagcgctggaagggtgagctttgggacacctgcaacatcggggtaccctggtacgaccgcgaggccaatgacgctgtcctgttcggcttcctcaccacctggttcctgggtgaggtaggcggtactacagaccccacctcagccttcctacccagacttgaaaccatcatcatcatcatcaccgcttgggccagagagtgggcttcccctgggaattctgggaattgtccatccactcttttaatccaaggatcgtctctgaaaagagtctagctgcttttctcagagaccagaagtgtcaacctcagtttcatttcctctatatccaggtgtaaacacactgcgacattgtttccagggagtcctgccagaagagggttgggtcccaggaattctgggagttgctgtctactttaatatccattaccgttaagcactcagggtaacttttgatacttaccaaccttgagttggtttcagaaccagaaatctgggctttccccaccccaaacccattctagaatttttaagagaagtttttaggagacttaattgggatgccttaggacaaaaaa

SEQ ID NO: 32492 - DNA, 1050 bp, Mus musculus
gaaccaccgaatcctcacggagcctgtttcctgctctctgaaacccacccgttcactgcccaccaggctctgaatatctaccacgaggcaggcactgttctaagccctgggaacagcagatgcatgtttaagaaatgaggaagagctgaaaatgtagctcatggtagggcgttcagcactcacaagccccggcacggcataaagtgggtgtgatggtccatttctcttaattctaatacttggggagtggaggctggagggtcaaaaggtcaaggtcatactgggcagcatactgagccaggaggcagttagagagagagagaagagactggtgtggttgggtcggcatgtccctgggaggatcgtaagtcatgagacagtagggtgacagtctttccgaacttgtgtgccagggtgttcctctcagaatattattcctcctgtttataagacagggcctagcagtgctctgtccaagactcattctaaccctaataatagctgacatttctggaaggctctctgtgtgctgggctttccctgacctctcggactcctctgcaaccacctgaggttgactctatttttacactcatctacaagaggagtcactgacgttggagaggaaaggccaccattcccagccacctcaaggaactcaagcagtctccaggtccccatcttccagtttgaggtcccccggggtgtggattctgaacccagacggaagtttctctggtgcccacaatgcctgacagaacatagtggctgtgatgtgacattgtttctctccgttccagggacacagccaatacagtcaaggagaaatttgggaggaagctctacgaatcccttttagtgtgagtgtcagcccctagctcttctcccatgattgccctgacccatcccgtcacttcattctgaaatgcctccccctccccttgcagggggagcctcccggacatgaacaagatgctggacaaggaggacttcactatgatgaagagagccatctttgccactcaggtatggtctttacccctgagcaaa

SEQ ID NO: 32493 - DNA, 1194 bp, Mus musculus
acatttcctcacaagatgtggagtgcctctgtttagctgggatttttttgttggtttggtttagctttgcttgtgatagttaaaagtcgggctccagtcaggagtatgctgacctctgctggtagcttcttcagagccctgtgaccgccctccctcccctgacccctccctcatgtctcctgtctacagcggcagtctttcccaccagtgtgcacccacaacatgctggacgactcctcagaccccatcttgaccaccatccgccgaattggccttttcaacagcagtgccgaccgtgtgaaggtcagggctggcccgaggttggtggggtgtggctggggaaagggttcttggatatcatgcttctcctctacctagtctgtcaattgtactgtttagaaagaaccctggcttctgaagccaaatgaattcagtttaagtctttagcttgttgtggacttgctgtgtgtttctagagaaatgtaccctctctgggctactctaggtggctagaagtagctcagcccttctcctctgtcgacaggtgatttttcacccagaattcctttcttccacaagccctctcctccccgtggattatgaggaatttgtccgcggctgtcaccttggggtcttcccctcctactatgagccctggggctacacaccaggtgagtacaggaggtgaggggtggcggattgctgggtcctgttcagttctggcatgaacctgcaacacggttcctctgtttcaagatgatggtagtgacccatcctgtatccatgtgtcacatgtttgtctcacagaaggctacagagctcagactagatgactgatgttcatttccggtcgtcgacactgataacctcagctccaatttgctgatgttggagttgcacatgaaccaggccttccccggtgtctctcagacttgctatgtagcccagactggtcttgaactcctgatcttgtttccagattcggagtgctacaccactgtgatctgtttgtgcagtgcgggctgtagaagctggggctctgtgcctgccaggcaagccctctaccctctgagcttctcctcctggtccctagtgctgctcaacctcttcctctcctcacctctcttcagccctgagcttcgagttagaattgcttgtgtgtaattctccttcaccgagaggatcctgtggggc

SEQ ID NO: 32494 - DNA, 1427 bp, Mus musculus
gcccacaccagagtgaggatgaggaagagccacgggatggacccctgggggaagacagtgagcgttatgatgaggaagaggaggctgccaaggaccgccgcaacatccgggcacctgagtggccacgcagggcctcctgttcctcctccacaggtggcagcaagagaagcaactcggtggacactgggccctccagctcactcagcacacccactgagcccctgagtcctaccagttccctgggtgaggagcgcaactaagctcccacccccatcccattccctgcctgtccagtgctcctctcgcagagggcctatgcagatgggagggtgcctgaaccccactccagactcttgagtgggacccctacccagtgtggtccatagcctaacctctgtttcagacactccagcccttgagctccaatcttggagttcccgcactccacgccgccgtgcctttcttggattgcaggatgcattctttgtgcactgatctggagtctccaggcttagactgggtcccagaggccaggcatctgccattgtttttcaatgccagaggttttaggacacctggtttattggcttccaggctgtggcttcttcgtttgatcctataatcatacagagtatgctttgctcaggcctgcctctgggaccacctcatgttggattctgtgtggcttcccgaatcagccaagttcagagttaggacatttcagggattaacataattgaaaatcagcctgcaaggtagctcagtagctctgtcgacagattgcttgtctagcatgcccgaagccctgggatctaactctagaacctcataaacctggtgcggtgatacacatctgtaatcccagcactcggtaggtagaggtagacggatcaagagttaaaggccatcatcctctgctacatagggagttcaaggccaaactgggcaacatgagacactgtctcaaaagcaaagtaaaggtggtggaatgctcacggtcctccatttcaacccacgactgcgatgctgggacatgctgcaaggttggcctccctgggtgtgttcttcaaaggagcatgcggagttggaccagacacctttctgccttttttctggaccagaccttcttttccttggtccagtgtcccctctagggaatgcctccattgagggcagaatgtctgtcaaccccacaagtgctcagcccactgtgaaaccactgggttctgggtcccagtggctgaatcaggagtcttttgtcactgtgctgcaccccggtcccctttcctgatacaaaaccgagcccaccggcttcttgaagccccacatgtacctcgaggcctttctgcctgcaagcttcagtgaatgggcgggcccctcctcacgtgtgctgtgtctggcccagtgcctttggtttgcatttggga

SEQ ID NO: 32495 - DNA, 2736 bp, Mus musculus
catgttctcaggccccaaaattctcttttgtgagacacccagaaaaggacctcgaagtcatcccctccccagggtctcagtgacccggagcccagaaccctgcgacccctccaggttgcgcctccggatccggaccaccgcccctcccccaagcctccatttcacaaggcctcgcgctccagtcccgtgacttcatctcatgggactgggtgggtggggagcgaggttcccctcagctccggattggtcaagtatacttttccgtctccgcctcacgccaccgccgattggttagtctcgggcctggggcacccctccctccggagggtcaacatgctataaaaggagcgctccttgcccgggacttagagcagcgccttggaggtcccgtggatctgtgtcttgcttcaacagtgtttgaacggaacagacccggggattcccactgtactcgcttccagccgcctttacaagtctctccagtcgcagcctccgggaccatctcctcgctgccttcagctcctaggaccagtctgcaccgtctcttcgcggttagctcctactccggatcagccatgacctctcagattcgtcagaattattccaccgaggtggaagctgccgtgaaccgcctggtcaacttgcacctgcgggcctcctacacctacctctctctggtgagcagctcggggttgccttctgaacggggggggggggggggggtccatcacacccaccctcctgcgcatgcgcgggccttctttgttccatgcagggcagagactgtgctccgacctctccctctccctgcgcgctgtgtacatagtagttttgtctgactggaactcgctgggcagaccgggctgccctcgaaatctcacacgtactgcctctacctcttgagtgttgcgattgaagtttacagtgtgagccgagccaccgcgttccgttaactcgtatttgtaacctcccgcagggcttcttttttgatcgggatgacgtggctctggagggcgtaggccacttcttccgcgaattggccgaggagaagcgcgagggcgcggagcgtctcctcgagtttcagaacgatcgcgggggccgtgcactcttccaggatgtgcaggtaagaagcgggggtattgggcactaccgagcatgtgcgtttacttgccatccccatagtttgggcatccggatagacgtcttggaagggagtggtggcaggactagtgtagacaataggagtatgtagagcaactaaacccaccaggatgtcagaaactggaaaatgggggtaattacagaatacagatgaggactgctgggctggggagaggcggtgtctctctagctagcatggaaatcacaatgtagaccaggttgcctcctatcaagagatcctcctgtcttctcgcccagtctctcagtggtgggattaaagacagtatcccattatttttccccactgtgcccacttttcctgtgcagtcagttttatattggctgggtgaaggatgtaatctaggcttgatattcttgtgtgcagaagccatctcaagatgaatggggtaaaacccaggaggccatggaagctgccttggccatggagaagaacctgaatcaggccctcttggatctgcatgccctgggttctgcccgcgcggaccctcatgtaagtaccttgctaatcatttcttcccttctctgacaaaacctagactgttgtgtgttggctttcagctcccaataatttaatcctcctgcctcccgagtgcagattgcagaagcaccacacacagtactgaggacacacctacctacctacctacctgcccttgagggcaggattttttttttttaaagcttcctgctcacacctgtctcttagaactcggtgtctgatgtctcttccttcctttacagctctgtgacttcctggaaagccactatctggataaggaggtgaaactcatcaagaagatgggcaaccatctgaccaacctccgcagggtggcggggccacaaccagcgcagactggcgcgccccaggggtctctgggcgagtatctctttgagcgcctcactctcaagcacgactaggaggcctctgtaccttccaaggggctcccccctctgctctgcaccagcccgccctgggacctccacctgaatgaacctctcaagccactaggcagctttgtaaccgccctggagcctctgtcaagtcttggaccaagtaaaaataaagctttttgagacagcagctggtgttttttctatatatgtgggaggggtgcacgagaaagaagaggttggctgtatgtactcctgttttttgtgggaacccacatgtgataacttacagcgatctctgtgtggtagtatctgccttttcatgtggcaaatccaggtcgtaggagtctgtagcctgtagcagtttgccagtccttggtttatgttactgtgcagggaagtgaaaaggcttaaacatccaagttcagaaatgagttaaacatacaagtagaaggccaggaggtgagcaagctgagccctgggtgctggctgagcgagggtggggagccagggtgtcttgctggattccgaactagatgctgggcccatcaaaaagaggatgtgaaacttgggaccattgcccaaatgggaactaaaccattgcaaaggggttagaaacatgggaagttggtggggtggggggtggaacaccggacaatactg

SEQ ID NO: 32496 - DNA, 1167 bp, Mus musculus
gctagaagcttgcaggcctagggtcaactatcaaaagtgtgctcttctaaatttaaattgttccccaagattttctacattaacaaaaaaaaaaaaatctttttttttttttttttttttttcaagacagggtttctctgtatagccctggctgtcctggaactcaccacccggctaacaaaaacatcttaacctaactatactaactacatctctaaattctttctgaggccgaatcctttttttttttttttttttttttaatttatttattattatatgtaagtacactgtagctgtcttcagacacaccagaagagggagtcagatcttgttaaaggtggttgtgagccaccatgtggttgctgggatttgaactctggaccttcggaagagcagtcgggtgctcttacccgctgagccatctcaccagcccagaggccgaatccttaatctgctccaacagcaatgctcaaaagagatcaatcattattattgtaagaaccaatgatacttgctgaggtgatctttatgtgcgcttgcgctgtgcaaagattgtctctgtattattcaaatgctggtttctgagtaggcaggccagattttggtattgttaatcatcacctgttgtagtgttttgtaaacacttccttcaacactgcctgatttaataaagaactgagcgtggtggctcttgtctttaatcccagcactcgggaggcagaggcaggcggatttctgagtttgaggccagcctggtctacacagtgagttccaggacagccagggttacacagagaaaccctgtcttgggaaaaaaaagaaaagaaaaaaagaactgaatggcctatagctgagacaggagaagaaaggcaaggtttctggggagagttaagaactcggggaaagaatctgaggcaggagatttgccagtgagacacagaagaagccagaggagaaataacaagccacgttacagaacatagattttttttttttaaagattcatttattttatgtatgtgagtacactgtagctgtcttcagacacaccagaagagggcatcagatcccattacagatggttgtgagccaccatgtggttgctgggatttgaactcagaacctctggaagaacagtcagtgctcctaaccactgagccatct

SEQ ID NO: 32497 - DNA, 1157 bp, Mus musculus
gggccgagtagtcacttattatcttcctttagattcaaaaattgtgggccccaacagagctggtggtgaatggagagaggaaggagttccctccgcctgtccttgggaaggactacaattttgtaaatgggtcatgcatgctctatgaagccaaccacgtgcgtgagtgcctgcgtaaaggtgaggaggggcggagggctgcactggggctacatctgaggggactgttgtgttctagcctgccctgaaacgcaagtagctatttagaactacatctcccaggattcagagagatagccaccttctcaaactaccctgcccatgccgcaaagacttctgggaattaatagtcctcttgctgtctgatgcgtgcgttttagacaagtcttcctgtggtcactcttcccaggtcttaaggagagtcctgtagttcctctggcagagagtgagctcttggctgagatccttgaggaggcgaggaaggccattggagtcaccttcccccaggataaacgctgatacagctcctgcgacagatgtgtgtggcaagcaaccttccctcctgcttggacctctgtaacctgactctcattgctttggagttgttgttgttgttgttgttgttgctgctgctgctgctgcaaatcagcacgtgttctctccctttctgggtgttgggagccagctttgatgagtcagggtgtggagtcaggggagtctacagacaccaaagcttctttctaggacaaacaggttctctctttactttagggggaaacacacgcacacgcacacgcacacgcacacacacacacacacacttgatggatgaagctaggctccaacaactttatttttcccccatatcccccagcaaactctttgaagaagtataaaaattacaatgtggttacattctatctttaagtggatgaataaatgaagtacaatgagttcaagtaaaaacaacaactacaaagcccagcaggcccccagcacccttacacaattaagcaatttatatattacatgcagaaaacagattattaacatgaatccacatacattcctgtctaagcaacttgttatagactaacaaactgtgggtaaaaaaggtatttttttctcagccagttctttgactggcaagctgcaat

SEQ ID NO: 32498 - DNA, 1188 bp, Mus musculus
agggcatcagatttcattatggatggttgtgagccaccatgtggttgctgggatttgaactctggaccttcagaagagcagtcagtgctcttacccattgagccatctctccagccccctcttttttttttttaaacacacacacacacacacacacacagagagagagagagagagagagagagagagagagagagagagagagaaagagaggtgaggggggaggaatgtgcttttgttttaatcccggtgtggcgtgtggggctgctgcagactgtccacagcagctgactatgaactgcctcatgttctggcagggatgtgattttgccagctgtagatagtttctgtgattttgtgacatttggggttctggggacttttcagagggtctataaatgcttaggccaagagccagctggggtggattgttggtgcgttgcgatgattttggcttgttaagtagtgatgggcaaggaagaagcaagaagacatcagctaccctgacggtgtagatcaatcttgcttcagggaccttgatgcctctaatcagcagaaactcgtctagcgtatcatactcccttccccctccatcctttccccctctcctatctagtgttaggggcttgaaagaatggaagaaaaggggtggagaagggtggaagaaaggaaaccccacaacatagcaaagacaaactataaagctgtcccgtccctgactcagaaattcacagctcttgaatcgctccacctgctggaggccacgtgtacaaacatctgattttgtgaacagctgaggttccaaaccttatgccagccaagcctagaacactctagctgtgtgtgtgatctttccagttgtttccagccaggcctagaacattccagttgtatgtgtgatctagctttctagatgtttccagacactatgtgtgtctcaccagaggtcagcttttcctggatttctggaatgccagagttagaaataaatcctgattttggtctgaaggtgtggctcaatggaagactttgatagcatatatggtaccctgcacttgaaatgtagctgccaaagaaaggaagtcctgctgggcctagaggtgaaggggaatgacaagtcctaggccatcctgggctccagagggatttcaagggcagtctgaactactcaaccagaccctcaaaaat

SEQ ID NO: 32499 - DNA, 1461 bp, Mus musculus
aggcccctaagacagaagcaggggattcgtgactgagtctcaggctgaggaaggaggcctgagaatcctgtttcccgtgttgaggaattttatctaacatcattctcctgtttcctctgcagatgacgctcctgtcccagctccagcaggtgaccagaaagatgtgcctgcttctgagaagaaggtcccagagcagccccctgagctgccacagctggattcccagcatttataactcctcagagaccccagccctcaggttcccacagacagtgtggaagccagatgaagtggccttgcagcctccctggggaccaacgccctcatggcctcctgggagcagaacaggggctaccctgttcctcagatgtgcttctgctggtctaccattctctgctctcagcctctgggtccaggttctgcctccctctctcgctccctccctccactgtcagggattaactacaggagctgaagttgcaggagagctcgctcacctcacctggagtgcacactccaggcctgcccacctgcctactttgctcttctctgttccaggctcagcctctctgcttcctgtacctagtgtcactggatcacaggaccttggcttagtgtctctgactctgccttctgtggagccaatgatctcaattccttttggtggctagaggccaccaggatgtggggtgttcttcaagtagctatcagctctgcctgggactcctggcctttaccaccaccccatcagcctaccctaactcccaggctcaatacctaccccatggccccaggaggtacccagatatggctacacccctagctgaggtccaaccctgctcagggctcctgaaaattggttcaccaacttccctggcttcaggccacactgctgtgtcctgctctgtgccccagttccatccaaatatagcccggcacaaataaacattagtgtatctgtgtgaatatcctgccctcttccaagccctgcctgcacgcacgccacctgctcacctccctggtatcctagggcacatgactttccctgccaggagacttgccaggcggctttctgtgtgctcttgccacaagggcctcgctgcttcatttttgccatgggaacagaaaacctaaacctgagcttgaaaaaaaaaagtttactatcttaaataattaaaaatatatattattaagggtctgtggctcagttggcataatgtgtgcctagcatgacggaggccctgtatcccacagtccacgtaactggggtacagggataaatgcccgtaatcctagtgcttgggaggtagaggcaggaagatcaggagttcattgtcatcctaggctgtgttataagttcaaagccaacctagactatatgaagccctgtgcccaaagacaaaaacaacaaaaaaatgaccaaacaccaggcagggaggctgagagatgtgggtgggtcct

SEQ ID NO: 32500 - DNA, 1109 bp, Mus musculus
aaaagggtatgccaccatgcccagccagaatgcatgctgataagaacaggtcctgctggcctacaggccatggccaccattgtcctctgctgagagacctcacgccctcccacaatcccttctctagcttctcccttagggccagactcatgcagccctgtcgctaacatatctcttctcatccctagacatcaacagtgatggtgtcctagatgagcaagaactggaagctctctttaccaaggaggtgagtgtaatggaagctttgtgagcgagacatacttcagcctcttacgccctaacctatcctctgctttcctgtcagtgagggtgcaggaaaaactgtaagtcccagcagcccctagagacaaagaagccatgaatagtgaagcaggcgccactggtcctctggggggggggtaagtcccccaagagtggcggtgttctgcgcccctcagcgtgtcacgcttctcccttcaccctgcagctggagaaggtgtatgacccgaagaatgaggaggatgacatgagagagatggaggaagaacggcttcgcatgcgggagcacgtgatgaagaatgtgagagacgccatgcggagggtgggcagtggacaacaggctcagcacagtcactaaccttggtctggctccccaggtggacaccaaccaggaccggcttgtgaccctggaggagttcctggcatccacccagaggaaggagttcggggacactggggaggggtggaaggtgaggacacgggaaaccctcagaccttagtgtctcccgggtccagcctttccttcagcacctctggctctctcctgcccttccttctggttccgaattctgccattccctatctagacccctgttcttctttctgtagtctttagcaaacactctgtttccagtcaggtagcacacacatgcaccccagcctccgcccctctcccgctcagtgaggctgagcttgccctaactgatcgcctgaccctgtcctgtgccctgcagacagtggaaatgtccccagcctacacagaggaggagctgaagcgttttgaagaggagctggctgcccgggaagctgagctgaatgccagggcccag

SEQ ID NO: 32501 - DNA, 1121 bp, Mus musculus
tattcacaatcaagcatacactcatgcatagtacttgtgtggtgttcagtgcaacttgaggaattcggttctctcttcccgccatgtggggtggagctcgggtcatcaggcttggcagtaagtaagagcacagctgaaccatctcagcagtccctcctctgaacctcagtttacccctccccaggcacagccctctccctcctgttgtgtgtgtgtgtgtgtacttgcatgtatgtctgatcaccccttgcatgtctggtgccttcagagagcagaagaaggagttggatcccctggaactggagttacggacagttctgagctaccacgtgggtgctgggaattgaacctagttctctggaaaagcagccggtgcggtgcggtgcggtgcggtgcggtgcggtgcggtgcggtgcagtgcggtgctcataaccgcaagccgtctctccagccttccttaacacagagctcaccctcagtccttgctttttctgctgtgcgctcaggctgtgctctccacatctccgtgcctcagtttccatctctgatatgagaaccattcccctttctgttggggatgctgtagtcagtccataaaggaggtcaaactgtcccttaggatgttcccagagcctgggcagtgcctgccttgctgaaggctgatggccccagggccttgatggtgaaaaggacaacccaggtgcactttaccagactctgtggtgtggcactctgggaaatcttcatcagcccaacagctgtactatagaacagccagtccccatggcaacgaaggctcagggaacacctagggccctcttgaattccctccaaagatggatgtgaagaggacagtcccttggccactgggctcccatcttagctgcttcacatcacaataaagactcagagttgccagaagctcacccttaacttacccttgtcctcctttccttaggctgatgtttattcaacacccgcaacgaaccacattccgttatggggagtggtgtctaagcagggaaattcaccttccacagtgaggagaacagatactggctggggggctggggagctggggcctggctcaacggtagagcacctacccacaattccccttg

SEQ ID NO: 32502 - DNA, 1110 bp, Mus musculus
gattcccctacacactggggcgtctatcgaacctttataggtccaaggacctcttcttccattgatgcatggcatggtcatcctctgctacatatgcagctagagccatgtgtactccttggttgatggctcagtccctaggagctctggggggtctggttggttgatgttgttcttcctatggggttgcaaaccctttcaactcctttgtagccgccagcagccacaggttcctgggttcctgcaaggaaagatgtggttggatgggaaaggcggtgagagaaataacaagccaagacaaagttctctgatcaaagcctaatgtttacttatgagtctgagcttatgggtgtgggggacccatcccccaccattccaggatctgctcaggaaaacaggttcagcctctcagcaggtagtgccatcttggaggaagaagcagatgtggtaggacaatagactttacctaggtcagaagactccaccctaagtaagctagctactgtggcaaactaggtttgccactgttgactgctcaaggctggggggagggcacactccttcagtcccattacagatagatggttgtgagccaccatcttgctgggaattgaactcaggacctctggaagaacagtcagtgtgcttaaccgctgagccacctctccagccctctaactctctttattatattttcatttatttaatatttgtttgtctctgtgtatctctttatgtagtttttttttttttttttttttttgggttttttgagacagggtttctctgtgtagccctggctgtcctggaactcactttgtagaccaggctggcctcgaactgcctgcctctgcctctgcctcctgagtgctgggattaaaggcatgcgccaccatgcccggcttctttatgtagttctgagaacagcttagtggcattagctttctccctccaccttgtggatcctggggattagactcaggctgtccgggttggcagcaggtgactttaatgctgagccatcttgccaggcccttctagagttcatttgagccagcatcttggcttagctaggttagcactgagttcatggcagtccacctatcttag

SEQ ID NO: 32503 - DNA, 1154 bp, Mus musculus
gggagggacatccttagaacttctgatttttctattttctgagtgctagagttacaggcatgtactaccaattctctctctctctctctctctgtgtgtgtgtgcatgtgcacacacttgagtgagtttgtctcactttctagcctaggctggctttgaactcagggcagagctctggcttatgtttcttgtttgctgagatgccaggtgtgaacccacatgcttacggatgggttgggggtggtggtggagggactgctcctaattctctcccttttttctttccccagcccctgggccgcatgggccagccagccgaggtggcggctgcagccgttttcctggcctctgaagccaccttctgtacagggcttgagcttctcgtgaccgggggtgcagaactggggtatggacgcaaggctagtaaaagcagcctcggggaagtccccactctcccacctaatgtacactaactatgtcttgcccatccatttctccctcccttcctttcttgtagtactggagattaaacctggatctcttgtgtgctaggcagaggctctatcactgagtcacactccagtgccccactggaggattctaggcaggggctctcccacttaactttcaggtcccaaagaaactcaggataagctagctgctggcagcgaggccctctcagtacctgctacttcccttgcccctgctcctaacctctctagcccagggactttgcgcccctccccgcagcttgattcctataaaaacctgccattttggatgaatgtgctgttcgcccttggctcctttcttggtccacttgccctctctcttctctctctctcctttcactttctctgcccctccctccctgatctcatggaccagtttagtctggactctacccgatgcctctggctatactctcccttatagctacaataaaagccatccccccagttataccttggagtggtcgtgtcctcttttcattcatgaagcacaacaccagcccctcaccaccacaccggggcattccaggcagtgctgctccactaagtcacacctccagtacttccctggggattctaagccagtgctccacttctgagtcaagccccacctcttactaggggctctaccatggagctaca

SEQ ID NO: 32504 - DNA, 1139 bp, Mus musculus
cctcacctccgacacacagcccaccgggtcctccgcgagccaccgagaagcggtcggcgtgcggccagagagtcaccacgcgactcgtccagcaagctccgatcatgtctctgattctccggtccctttacccctggagagtgttagagcagggacggggaaaggccagagaggctccgggtcccagccctttcctcaggctgacttctctttggttctggaagcctcggtttactcggtcctcccacataccatcgagaaacccaaattgtggtagagctccgcgtcgcgctcatgtgacgtcacccgtgcaccacagagacgccagttccggatagagtgtcccgcattgcgtcacgagtgcgtctcgcaggccgctctttccccgcccactccggcgcggttccgtctttccggacctggccgagcaggaggcgccatcatggtaagctcgctgagcggtctccccgagtggcccatccgctgccatcctcagcaagtcccgctcgtagcgcgacggaggggtgcaggcggtgccaaggggaactgcgggacaggctagggccttcgatcagaacttgccggagccggtggccggtcccgggagcctcccgaggctcgtcgtcttccttacaaagtttggctccatgagccaggctgattgcagctcccagtgagtccagtccggcctcgagcccacggccgctccctcgcaccaatctttcgagtgctgcgtttccaagcgggaccgctgctcccagtgtccctgtttcttaacttgccattgggaagttgagtgctacgatgagcggagccactacacgttgccgggtttggggacaagcgtacgtcagtccttcccggaacactgctcctagtgtgtttggtgtgtagtaatcctgtccctgccttgtatgttgggaagacgtttatgaagagccttgaaggtgcaatgaaaccgctgttagtatcagtaactacttcaggatgctaacagcttggaaaacgagtgggggataaaattaacccgagcacttggtctttctagggttgatttgaaggacgtagtgtaaggctttgtcacaaacacgtctccacgtctagaatgtactgttggcttctttttgactgtttttcag

SEQ ID NO: 32505 - DNA, 1208 bp, Mus musculus
gggagaggggggagcctggacacagtgccccaaccccccacatcaccaggagttgagcgggatgggagagctgtggaagggtcctggcttgggggtggcgcaggcagtcccatgctcaatcttttcctttcccttgcagctgtacaggtttctggccagacggaccaactccaccttcaatcaggttgtgctgaagaggttgttcatgagccgaaccaaccggccacctctgtccctgtcccgcatggttagtagtcagccagagggcgcttcacatgtttgggggcggtggggtaaggccagcagaggatgcgggcctctgtgctttggtctttttctacctggggatttctctgacctgggtcacttctggggttggaaagaaagatttcaacaatcagtcatagctggcaagctcttggggccctgtcactggggggaggtcggcctcagccagtggaggtcttggctgtttggtcttcccggtgacagcttggcacagaaagacttaacatgcttgcccccatcagatccgaaagatgaagcttcctggccgcgagaacaagactgccgtggttgtggggacggtcacagatgatgtgcggattctggaagttcccaagctgaaggtaagtgaccagcatgggccaaagggacatgtctccagtcaattagggggctttgctatgtgccagtggcaccctgccatgggagctgtaatcaaagctgctcttcgttgtgtcccctcaccactgcagaatgatgctttggagtctgtttgccctgaaagcattgaggatgcttgccatccactggggagactttagtggcagttgtttatcagggtctgctaccgggggtgggccgtgacagtccccacagcctctggtgtgtgccttctcaggtgtgtgcactgcgggtgagcagccgggcccggagtcgcatcctcaaggctgggggtaagatcctcacctttgaccagctggccctggagtctcccaagggccggggcactgtgctcctgtctggtcctcggaagggccgagaggtgtaccgacattttggcaaggccccaggaaccccacacagccataccaagtgagtatcagagctttggcttcaggtagttgttacccatagtggccactaggatgtcaagttcacttgggtggggggtggtcacaaatctgggctagccagggcctctg

SEQ ID NO: 32506 - DNA, 1095 bp, Mus musculus
tgaggtgcaaagctcactggagctcataaggtagcctcaaagaaattgttcattttgtttggcctttgtccctcatttctctttctctgttggatagaacccttgttacttgtatgagtcatggctttttgtagttctggctgacctcaaattctccatgcttctatacacctcatgagttctgcaccacacaccagggcctgtggatacagttatgtgcaccacataccagggcctgggtgttttttccttctggttcttggtattggtagttacctacaaggattcaggagctaaactgctagcattcaaaccctagcttgagtagctgtggtcttaagcagtttatatcgtaagattatattgtctatctcaaaactgttctttttttaagatttatttattattatatgtaagtacactgtagctgatttcagacacaccagatctcattacaggtggttgttgtgagccaccatgtggttgctgggatttgaactcgggaccttcggaagagcagtcagtgctcttacctgctgagccagccctcaaaactgttctttgtgctagaggcaggcatggttcagtggtagagcactgcctgacattcaggagtccctttgtgttccacaccggtatcatctcaaaagcaaacaccccccccctccccgacacacacacacacatacacacacacaccacgaatgtgtaaatccacaaacagtttgcagcagtgtcagccaccaatttggcatatgtcataaaaacattaacttgagccgggcagtggtggtgcacacctttaaatcccagcacttaggaggcagaggcaggcggatttctgagtttgaggccaacctggtctacagagtgagttccaggacagccagagctacacagagaaaccctgtcaacaattacttggacttcaaaccctctgatacagttgtacctataccaagtttcctatggcaggcaggatattcttaaatgttgccctatcctttttgttagctgaggatgcagaagacagtgttgtggccggtgggtcctccaattcctggtacccctgacattcctgcccattttttgttg

SEQ ID NO: 32507 - DNA, 1341 bp, Mus musculus
tcctgtcaccttgttaggaggctgatttgtatgaaagcttccagcagcccaaggataagtcatcttacctctgtcctttccccgtgtttctttcctgggccctggctttgtatgggtatgggaggggcttctgagacagagtctggtactcacactgaggtctgactcctacactctcttgtagtctggctcccctgtggccaccttcaagcaacatatggcccccgtgacctctgttgaatggcaccctcaggacagtggggtcttcgcagcctcaggtgctgacaaccagatcacacaatgggacctggcagttgaacgggacccagagtcgggggagacagagacagaccctgggctggcggcactcccccagcagttgctgttcgtgcaccaaggtgagactgacctgaaggagctacactggcacccacagtgcccgggggtcctgatcagcaccgccctgtcaggcttcaccgtcttccgcaccatcagtgtttgaggtggccaacacttggcctcaagacttggctccacatgggaactggatcggttaacttggcaaggatcattaggcctgtagactgcacctcaggaaggaagacttgttcaactggcctacgtggaacagaaggaacggactctactgacctggtatctctaaggatttggattgacccttggccctgccttacaccaaagactaggtgcaggcaaagatccttgcctgtcccagatacggcctcaggatgagatttttgtcagtgttgactcctggcttgaccccaaggacctctgaccagggacctaattctggctgttgatcaacttcaggaactttaagggttttgccatagctgggccaagtctgggtctgtgtcactccagtggaatttaattctctctctgccttctggccagttagatttggttgagatccaagtagggagccatctggggtgccctcctgtgctgaccactactgtactggaggagggtctggggcttctgctgtaataaaggaccacaataaggccccagacaccaagctacaagtcctctgagcttctttgctgtgagaaacctaatggtggtagggaggggtttggtatagagctgtcccctgcagcccttcacccatgcgactctcaccctctgggctttcccatgttgtctggctccgaatgagtaactctgtttctttctggacccctggctcagtaaggcatcatcctaggggagctgagaacccacacttcctcccctttatcacttactcagtatttcctgctgagttccctaagccatccgtgcccttcagatgcctctatttcccatgtt

SEQ ID NO: 32508 - DNA, 1217 bp, Mus musculus
tctacctgcccggcagagggccgccactgagcgagggagaggagctggtaatggatgaagaggcctacgtgctgtaccatcgtgcgcaaactggtaggcagagggacctgactctcgggtccagggaaatgaaaggcctgtcttggggtctgggggacgaagggtctggagtctgaggattgtgaccctgcagactgccggcctttggaggaggtggaggccgagttcccagtctctcgttcctactcagcaactctaatctccccgcccatccctaggcgccccttgtctcagctttgacatagttcgagatcacttgggcgacaaccggacagagctccctctcagtctttacctgtgtgcgggaacccaggcggagagcgcccagagcaataggtgagacccaggacctttgcaagacatccacaaggccccacgcattagggctctctgctaatgccagacctaaaagtctgggaccccagcctccctcctccttcaacatcccggcactcagtttctaacccgtatttgcttccccagactgatgatgcttcggatgcacaatctccatggcaccaggccgtcaccctcagagggcagtgatgacgatgaggaagatgaagatgaagaggatgaggaggagcagaaacctcagctggaactggccatggttcctcactacggtggcatcaaccgagttcgggtacagtctttccaggggcttgttaaggattctctgcagcacacccctccccctagatccaaatgtctctcagtacctcctccagcccctcagcttctctccctcccccctcattttcagacattttcactctatgagctgataaacagataataaaggctgaaacagctcctgattgtggtgaaacgcaagggtgttactgagctgttgcttaggaactgaggcaggatagaatgagttcaaaggcagcttagtggtagagcgctcacctcaagttcaataaatagagcactttatgatcaggtagatgagcaaaaaagggagacggtatacaaggagcatgtagagcaaaagccaacccgtagctggacctgtctctgttggacctgtatctgttacattattcccagaaggtttagcctgtagacagaaagctctgggcccatgaacataacatactagtgggaaagggaacaagagaaagcttgtagtttgttacaagatgctgagt

SEQ ID NO: 32509 - DNA, 1567 bp, Mus musculus
tgtctagtcaaccctgctagtctgtctgcccctttctgtagtgattcaggtttctagtcagcactactgaaaacaaagcatgcttgtggccgcctctgctcaggccttgtgtcatgattcttgttccacccctggttgatgtagacccaacctagtagttcaggatgcagagttctggggcttccctctcctcgtacagctcccagcggcccttgctcggggtgggaggtgctcctctgtagagtggtaggtaaggcctaccttgtctctctctccacagtcctgaaggggaagaagctgagcttgccggcataaccctggcctcaccagccttctctgaggcagggcaggaggcagaggaaggctgctggagcccgagagccttccatccagagctgactttgtaaagagctcgcctctcctggctccccacccctccagctgggttttggggtctatggacgaccctgctcctggggagctcaggacctgagctgtttgtagccttttgccttttagagaagaaaaacaaaaaacaaatctttccactatttagtttttgattctgatgacttttttctcttctacctggccctgattttttataaactgtgttttgagtgttctctggatcagggccaggggaggtcgacccccttctccaaaatcccaccccagccccatggttgccaaacactacgtctgccaatatctgcctgcccaccttggctgtgacaacgatgctccttacatgttcctggattggtggtaagaaggaggaaagttaaggagggtctcctaatttttcatgattttttttcttccccagaatttgttagctttttgtgtgtggggtgggggaggggagggttgtcctgtttttgataaattaggggaagctatgggcttaggcaagggaaagaggctggctgacccaggtggtgacccagactacactctaacaccatgtttttgtacagaatttgatggctgattctttgttctcttgaaataaaccaagaaacctgtccttctctttgctgttccctgcccgctttggttagtaccgagccagttctacttttgcatcatggaccttctggggataatcagcaatctgaaaggagcaggaagatgagaaatggggctcccaggactctccagggatccctgaggccttgaggttctgcagggacgaggttgggagaatcagattcattgtttggtatagaaacttacctgatggctatccagacctaaccagctcagaggaccttgaagaccaatgcatatcctagcccgtggatgggacagcccccatccttcccgcaactgtcattcacaaaaaattgttttatgtgtatgagtattttgcctgcaagcatgtatgtgtactatttgtgtgcctggtgcccacagaggccaggagtggctgtctgatcccctggaactcaaattaagacagttgtgagctgttatataggtgctgggaattgaactcaggtccgctgcaagagcagtcaatgagtgcatgcactcaatggctgggctaccaatccagacatac

SEQ ID NO: 32510 - DNA, 1224 bp, Mus musculus
ttggactgttcccaccacctgaattgccacaactggacccaatggtcctaggcactccagaggccacgcaggctgcgctgggtagcagctacccctcaccctgaccacttactaccaggccctgcgctgacagggtcccaagctccgcctcctccgtggcaaactgtcagttgtggcaactgcatctccttcctggactttcagttgttgacaggctattatttctgctaggccattaattttgctatgctatagacgtaagagtagccaatcggggctgctggcagttgctaggcagcctcctgaggccaaccaatcaaagccgtttatttcaacttgttattttatttcttagacccgcctctggcgggaacctcaccaaggtcgctggaggaggcgggacttggggaggctcacacagctgctggattgcagctgccagccttggccacattgagatgggccaggctgtgaaagctgcatgggggcggggaggagggacgggggtgggagtgggggaagctgctttattttctatttaacctgcgcagaactgctcgccacaggcacctgagccatttgcccctggcacacagtgggtgacagacactgggcacctcagccacaggcagccggtcagaatgtctggaggaacctcttcagaccccacgtaagatgagccatctgttctgcagctcatctgctctggttggaggcactggaaacttcatgccccaaagaagaattgcaggattccaccccaagatcactccagcccaggccccagcaggctccgtggcccgctctgcctcgctgcagcaatccccttagtctgggtctccctgtctgtgcaccctcttccaaaggaataaatcatgcttaataactctggagtagtgtggctgcaggtcaaggggggttgggaatcacagtcctggaaagagggtgtggctgggtctgagactcgacccttagaagcaagcactcatgcctgagcagagttttgcctgcgagagtctggatcccaaacaggaagggcaggagggcagattgatcaccacgcaatggcgggcagccagaaagtaggtgcctgggaaatctagctggtaccccttgcctgagagtagaggaaggtgtcatattggctgtagaggtggcctttgttggtgagggaagggttaggttctacaatggaggggagaaccttttgcaataggaaacagc

SEQ ID NO: 32511 - DNA, 1139 bp, Mus musculus
ggaggagctttagtagcccagtaattcttgccactgtactcttactaccattttctctacctaattcttcatcccaatgcactgctctgttcctaaaagtatgggctcagctattctagcttaagcacgtgtgaggctgtacgagaattccacctgctctattgtaaatgcacagcactttacacgatggcagcagcacatcggcttttgaaggattccctatgtcgttttcatgatagatgcatgagcactgctctaacagtccatccacattcatccacccacagtctatccttctgtgctcctgtctagaacgtcagtgagcaccaagagtctacatcctcgagtcctgcagtagtattacactggagtccatttctgtaatacaagttgcacttggaaatccatgactgtggctacagaggaacatgcaagaatactcctgttttactgagtccatgtgtgctcagttggatttccacatgtgctgcactagtatctgttgtagcctgtgctccatatcagggacatccatgtgttctgataggctgttaggacgtgtacatatgactccttgagtgcacccctctgctcctgaacaagagccttggtgtccaggtgcagtgctgcattctgataaatctatgatcacttctgctgcaggcatttgtggtgcattagtggcataactgtgcttgcagttgtatggtaaatcccatttgcacggtgtgctgcacagtgtgctgctccatctcccttcagccctgtaatactatacaatgtgtgctgctgtcctcgttcaggcttgcgtggagttgtgcctgtccagccatctgctgtgttgtaagtgcacatcatcttacattgcagtgtgagtccgttggctttggccaagacaccattgtgtagagatttagtgctagatgcctgtgtgctgctccactagtacattcatgtgcagaggggtactaatatgtcctcatgcctgtctaataatcccacgagtgtggatgtctaagacccataggttctgctgtagtatcatatctgtgtgcttttcaggtgtagtactgtgtgccactgaattcatttatccacgagtacaaccttacaagaacatgtgtaagcacttctctaat

SEQ ID NO: 32512 - DNA, 1201 bp, Mus musculus
tgaaatttgccaaaacaacaacaaaagtcagacaatttacaaaaagtgtagcggcccatgaatatcttgtaacctggcatcttctgcctagatggatttccttatttgtggtgacagtggccactgatgtcagtttttctttggcagcgacctgccctgaacattgcttcctgcttaggtatttttatgtaaagtgtattttctttttagacagggtactgagctgaggaagcggggcctccagggcttgacgctcgggctaagcactcagaaacttgtagggtttgcgatggcggtcaagtgaggtcctccggtctctctacagatacctgcggtgacaggctggctttgaactcttaatccttgtacttcagccttcagagtactaggattaaagtgcacaattctgtgtttagtacatgtgtactcctctgcagctagctagcaggtccccagttgctcagtgctgcaggcccctagttgcccggcaccgtgaggccccagccccatgtgttggctttgcagtaagcatcatgcatgaggactggtgctggaggaacaagagtctggaagtggaagtgctggaggacgacgtgtctgcggtggagttcaggcagaccggttacatgctgcgctgcgcactctcacacgccatcactctggtatgtgctgcttctgagggacctcagagagagtgcccagcggggcgggcaagacagctcagcctcagagagagggcccagcggggcaggcaagacggctcagcctcagagagagtgcccagcggggcgggcaagacggctcagcctcagagagagtgcccagcggggcgggcaagacggctcagcctcaaatcctgcaagttaccctctggtctacacacacacacacacacacacacacacacacacacacagagagagagagagagaatgagagagagagagagagagagagggagagagagagagagagagagaagtaaatggcttatagcaattgctggagcctggcacagcaagagtgtaatgacagttaagccaagttcccttttctaccctgggttcccacctgccagggaaggcatcctcagcctgcagtgttacaggtcctcctcagcccgtgggcagctgggcagctcggtgtggtgcggtgcggctgcgtggtcttgtctcttcctgccgcgttgggatcacagtgc
